United States Patent Application Publication US 2008/0114160 A1 - sequence listing, part 43

SEQ ID NO: 10252 - DNA, 74093 bp, Oryza sativa
agtcccccctgcacccacgttggatccgcccctggaggcgggttgaatgcggcagcggtatcggagctttgcaaggtggtggcgacggcggggggtggaagcggttcggatacggcaaaggcattggaggtttgcaaggcagtggatgtgatgcacaaggaggtggcagcgcccgtggatctgatgcaggaggggacagcagcgtagaaggtggcttaccaacctccttttctaattccggcgccaatagttggggacattggcggcgatgaggtagacaatccattctgctaccaaaggtatctcccgctccatctccctgccaccaatacgttcttctcatgcaatgaaaactgctttgaatggcattgaaaactgctttcaatggtggatgtagcacatatgcacggcgggtggttgcatacctaattttttgtatgaaaataactgttaggtatagtaagtactagaacattagcgtgccggttggcatgctttctttatagcagttatttcaacattcatgttccatcaaatattgtattatcttgcatataattacgagtatatataatctcctgcaatgttaatatgggattaattatatatgtttaaagcaatctatgtttccggtgtcgattaattatatatgttgagtttctaccaatttattgagataattgatattagaaagtattaagaaagtagaaagtaggtggagttaaatattagaagggtctctgaaaaaatattagaagattgataagtttttttttctaaaaaaaatgactgattgtaggcaaagaattcatgggaagattgtaacttacaaagcttacctcgataatccataatactctctatgtccacaaatattagttaagttgtggcctatgggcggtctttgggttcacttcacccctcatttttgtaggtcactataccatgttgccctctctttttcagttgagctgaaactaatttacaggagtatactggtgtccatgaatgcagcctgtcacacttgttttgttccctcgtgcatgacatgacatgattaatttgggacccctgctggctgcagctaactagctagcggctgttgcttgcttgacctgtttattttaaaactactagtaacagtaagagtagaataatcagtaaggagttctgaaaccttgccctgaacagcttcagcttgctccaacagtccaactgcacccacgaatagttaggagtagctttttcatatattgccattcttaactagataatccccgcaaaaaaaattaactagataatcttgctgttgttatacgagaaatagcatggatgcttaacatttattgagcgcaactctttttcgaaggttataatacaagtccctggctctgatccattaactaggacacacacacacacacacacacatatatatatatatatatatatatatatatatatatatatatatatatatatatatatatatatatatatatatatatagagaaaatcccttgtatacccttgaaattttaactaatcccttctatgcctctgaattttgcttactttcttatatacccctaaaatttgattttgatcccttccatacccctcccgtcagttgattgttagttgaccgtctaatttctataaaaatgaccattttaccctttggatgaacatagaaatttatgaattacattattaaaaatgtaaaagcttctcacacgagactattatagctatgagtttgttgtgcgatgcattatttatcccaaaaaatatttttagataatgaaataaaaaattgtgtatttatttttaaaaaaagtaataaaaaaaaggatcattcatacaaagataggacaaccaattttcataataatttttttatgaatgctcccgatcaaaaaaaatcattgtcctattaaaatttcaaataaaaattttaatttattaccttttttatttccaaaatttatgtcaaaattttctgcactaattatttagtctcattagtttcataaaatgcacgtactgtgcactcaaacaaaattttcaatcgcttttaagcttatattcaaacctatagcatcaagggcaaaaaaagacatttgcaaccaaatgtaatagtgaaataatggaaaatgtaacggtaggggcatggaagggatcaagttaaaatttcaggggtatagaagagatcgggtaaatttcaggggtacgaaagggactgagtgagttttcaggggtacacagggaatttactcatatatatatatacacacacactgatgtactctgatttttagctatcattgccatgatcagtccctttggtctttactacattttagacattgattgattcggtgatagattcacctttacatcacaaatcgaaatactttatttatatgttgggggtctgtcgcatctgattttcgttttaggatttataaattatttaataaattatcattagaatttatattaaatgttcattaatttacaagtgaagttaaatgtgggaaataaaattccctaaatataaagcatgactggatttaatttttattaaattctccataattaattatactatctggaattttctcggattttttcagagctcaattactaattttaataatacaaagattttttcagtaattagttaatcaataaactaatcattaaatgatctatatgtaattttgttaaatgttttggttgtttaaaaatccttaaattataaattgagttattataaatgatcttaaaatcctaaaagaaaagctctaagtttagtttaataaatctcaatgtaaaaatggtctagataaaactttggtaaatatttctcttgtttctttagtttctggattttttgggatttatttgagccaaggaagtatttttaataaatggaattgcattccatgaataaatttaaatagaaaaggtttttaaaatctcccttttggctttgggccgaaagtcggcccagccttccctctcttatccccggtcacgtgcgctcggcccaagtcagcccaggccaagccgcccctcctcctctctctcagccgccgacatatggggcccacatgtcggggtcttctccttcctccagccgctcggccgagtccgagccgctgcgcctctctgccaaattcgctggcgaccatgatgtcccaagccgcagccggtgatgatgtcatgctgacgtcataaagccccttttcccttctaaaaataaatcttaattgtgtcataaatcataaatccttttctgtataaggttaaaatcagattaatcttaaaaaatccatttctaattcattgtaaatcagattaatgtgtttcaagttgcaaaagtgtataaaataaagatctatatattaaaattatatataaattgtgttataaatttatttaatcttttttaaataggtttaattgaattaaatcctgtaaaatttatgactaattcatatgaagtcagaatgaggccgttcaagtctttaaattcatctaaaatcatgatctacatgtttgtttactttttatgtactgtttatttggtttttattagtccttttcctcattttgcgtgttagcttgtcgtttccgtcgttgcgaaggttcgtgagtgcgttggaagtgttcaataagactaattgaagaccgattattgcaaggcaagttgatcctatatttaaattctttatttatttcaactgtgcatttaatttcgaatgtcatcgggtggtgtgaacttatacctttgctatggccaattttcattgattatcctatttcttgataccttgggctataatttgactagttggactttatatattggttcgactagatattagtataattgcttagccatgcttagaaacattagcacatgattgggatgattaatgtttcactattacttaatgatggatatttaatggtagctcacgatggtcaatcgtgattggttattaattacttgtcaactaaaacttgattaatggtgagttgtaagcatatggttttgatggttgtgctcatgacaaggaccggttcgcgagctactgttgtgagacattaaccgtgccaaccacaagctagcatgggcaacggctggacactttgtgtagcaaggctcaccgtggtgcaccagactgtgaagcggcgagaagtccgtgggggtcgctggggagttcatgcctctggttattgaggaggtgattatgatccaggaaaggtgcgttgctttgagttgagttatgcgaggggtcttgtcacaatcactcgccatggtgacgtgtctgcgcggacacggtgacatgacaatgggttgtgtcttgtgggtacagtagtacatctctggccagagtaaaactattcgaatagctatgcccgtggtcatgggcaagttgagcaatgtttttcgtgattagtcccacactactcattaatgataataatgtgataattaatttggcttctggtttggaatggcttattcctagtttggaggtttgatctgtacgaccagggttggttgtcaaggtttggttgggcctgtgcagcatgggtgtgctattcagtgttgattaatattgatgattaattactctactgttttacaattcttaaatgtttgctaaatgctgcttttgcaaatgagcctatattatgccatcctttggtatatttttgcacttgcatatttgctgtgtgtcttgcggagtattccatgtactcaccttgcaataattaatcaaaccttagttgaagaaaaaggatctaaaaggagcagacatttagcttatacctcagttgagctgcttatgggagtggagccggagcttcgctagaccgttaatccgctgttgtttttcttttcttttgtaagtatgtaatattattattatgacggatttgtatattaaattgtcagtttgtgtacctcggctgattcctggacaaggattttatgcacaaattagttcagaaattactagtgaattttcaagtgtgacaaggttcatgtctctaacaactgatcccatcttgtattggtactgtgttttatcctttccaggacaatattggaagacgatagcgaccacaagctcctattgagaaggcactcatcgggcaaatcaacattgaggatatgagtggaaaagctaaggatgtgattagtgaggaggggagcaccaaggagatgaaggatagcgacgatgatgttggcatggtcattgggggatatgcacaagatctatacaatcatagcggcctagaagaactcatgcaagaccaagatgcgttggaaaaatcggtaaagaattttccggaatgttttaagagcacaaaatttagatgaatgattaaattatgtgttgcttttatgctggtttggtggttatgaatgatggcctaacatagtatcttgaagtgtttggacttttggtattgtatatggaagcatgtgtaattatggtagtacatgagtggtgatgaatggtatcctgcaaaattattttaaaatatgatcgtttattgtggtaaatgaaattaatatgatgtttctaacattacaaacaatatgacgatgatgcatgcaatgcttatgaaactcaagaatgatacagcttcccacatgacatgatttactcctaatgctgatattacatcgtcatatatacaacctgaaaactgcccaaaatatgaaaccatgataaacttcccatattacatatttcaaaagctgaaaccatcataaaacttctcacattacatggtttgttgcatttacttgcgtaacactgatcttaacttatcatatatacaacctgacatttaaccaaaagttgaaaccaggatagtgctttaccatattgcatgatttactgcacttggttggctaatgctgttcttaccttattatatagctcaaaaccacaactaagggtattagggagaatgtctagacgctctagcctctctttacccatatgagggatctcgtatccatttccaccattagctttcataacctctaacaagcaagattgcaatgttaggaacaccctatttagcttgttctcatcataggcctgatgctcagcattatctattaggtcatccatattcctggatatccttctatatgttaatgattgtagagacgcaaaaaacccaagatctagtgcattcatatatggggaattaggaggctgatgcatgagtcggatgtcaaacccttttgggaaactgcataggcaaatcgaggatcatccactaggacatgagaaggagcattatcctactaaatccatatactgttgtgtgtttcttctcgaggccaacttgctattatagctggtaggagtttagcaattagaaatgaccttacggtatctcgatcaaccttgattgtcttggtgactagagtcccccttggtctattatgacttgtcctttgcggtggttcctaagtagtacaataatcaagttagattaacaattaatttagataaaatcactaagtaaaaatgcatatatgaagaggttatggtacctttctggtgaaaggccacaagcctatcttgccgtcaaaagtgcagataccttcttcattgtatctaggcctagcaactgctgccaagaacatcattttatcaatagaatttttgttttggacaggtctgtatggatcatcctcccaatggaccatgtaaatggttcttgtccttttagttgtattgaaccattttttatctatgtgtacagtgtttcgcatatcaatgaacttgggttcatttggcaaagtatgccaatctaacatggaaagacaccaccgcagccttgatggtttattctcttccttcaacaatggctttagtgtgtttgagtgacatcttagcagcacttctttcaacatcctatgcaacatgctctttggtataccagaggctgatgcaaatgaccgtaaagtgccccttagttgcaagggaacattagcaacatctgtcatgttgatttcattctttttgcaaccacaattcttttttttcctagaccttacatcgattggtattccgtgggcaagacattgcttcactcttcgccaaatagcttgcactctagcccttttcacattaaacattgctgtaacttcagttgtactacctctgtttcaggttataagactttctagcattgtccacattcatatagatgttaatgaatccaggcgcatatatatatatttctagattcattaatatatatatgaatatagacaatgctagaaagtcttataatatgaaacggaggaagtaacatttttttcttagggttccattgttagtttttccagcaaatgcagcatatatatgttgtctttgtattttggtcagatttttgttttgatgttcatcttcctaacctgaatcatccaactcctcttgttcgaaaacaacttccacatcacccgcatacacgccgtactcttgcatgtctacaacaacaattataaggttagtcatctgtatcaattcagaattttaatattttattgtcatgtatcaacattcttgcaaaattatggcacaactttttaggttcaccacgtggttttatttgtaatatgatttaaccatacatattagatctaagtgcgacagagagacattgacacaatttagtttatgtgctttctttcagattgctgtggtagtgaaccaattgacatgacaattgtatgtaaatacaccatatcaatgtatttattggtcaatctcattattatttgtgatttactatgtgctgaaatgtctaatttacaatccttaattgttattgcaactaatacaaccaatgacatggctagacgtactattgtaggtagttggcatgatataatattactaacttctaatttaaaacatggtttcagataaataatattattcttcaatgatcctttgggtaaaaccacattttatcattttttttaagtctaatattcatgtcggttaaatgacttacctggatgtatttgtaggtcttcctcatcggcatcaaagttgagattaaaaggaaaggcattatggttgtgatctccatttacttgcagaacttgatccatggcatcagcatcgtttacaataacaaataccatgtgagtaccatgtccaaaaacaatactttttgccatgcagattattctatatttgtccatggttccatgcagattattctatatttgtccaaggcgaagacgacggccttgtccgggaaggaggagagccacgtcgcgaacctctcctccagctcgcctcgcggtggctccggcaccagtggccccgtggcgagcaccggcttgccatactgcgccgcgatgtagtcgatgtaggggccttccatctcgtggcaggtcctgatgacgagcgcgtcgcaggcgttgtggcaggcgacggagcggtcatgcgtgctcggcatgccgtggaagctggtgaaaatgtgggtgaagtgggcggcctggtaggtcggcaccgtggagagcggcgacgacggcgggaacccctcgggcgccgacgcgagctcctcggcggtcgggcgcgcgccgtagaggccgcgcccgtgggccatgaagtacgcgccggagaccgcggggaagatcgagaaccgcgccgacctgacgccgagacgcctggcagcgtcggcgacccacggcgtgacgaagtcgaagagcacgacgtccgggcggagcctcgcgagcagcgcctccacctgcggccgcgtgccgtcgagggcgagcttgagcagctcggcgccgtccgcgtcgacctccgccgtgctctctgtgccctcggggagccccggaacgcgcggcagatgcagtgccacgacggcgacggccgtccgcaggcagcatggtctcgagtctcgacgtgggccacgttggccgccgccgacaggaacgtgacacgcaccccaccgacggcgaggaggctacgggccagctgcgcgaacgggttgatgtggccgaaggcaaggaacgggaacaacactacgtgcaacgtttcgccggcctcgtcgccgccggcggccgtggcatccacaccggccatgcttagttcgggactgcttttcagtgtgaagcatttgtaccccattaccatctatatatacgcggatggcgcatggctaaatcaataattagcacatatcattaacaattttgttgtatttttaaaattaacatgcaagcaatatcaaatcattattttcacattatttaaatatatattatagatattagagaagttatctgtcaattttaggtgaaatgatctttcagaaattaaaccatccataaatatttcttccacttttttgctatccaatgccgtcagcgcatgttagatatacacaattagcatgtagctatcagtttaggtgaaatgacatactctagtacatatactgtatgaacgccttttgttgctaattattacgtgcagtgataacacagcgtacaaaagtaacgcattgggtcctaaatatgatagggccaaagtatttcagaaagaatcctggttgttcttgtaagagtattagtaacttgcgcatgcaaatgtattttgcagacttatccacatgcgtgtttcccgctatatacctttgcttcaagctaacatcttgcagactcaatatatacaaggcaattcattcgcatttgcagaagaataaagaatcaagcttcattaaaatttcgttcaatcttgaaaagtgaatgttatagataagacatcattaatattttttttggctcggcgagacccaccatatacaagtcttacatgaaatcatacctcacctacggacggtgttccgaataaggaaagagaagcaaagtcctacttgagcacgacaagcaccactcttatcgtatccatacttggttatctaattctacatagacaagaggacacctgagggtataaatacaagacccccagtaggagagacgacacacacgggaggcgaagaaaaaaccaatacggatctaggcaagccacacaatacaatttcaatctcgccgtgtgatattcgaggaggcagaatacactagccgccgaccacatgtgagagttctatgttgctaagctgaccgggactagattaagtcctctccaatattgtactcgtgtgatattgatatataaaaggcaacaccggcttcagccgataggagtagggctattacccattagttacgtggtccgaacctgtataaaagtccccatctcctgcctcttttacctcaatctcgcgtataccatgtcactaacaatttccatattctacaaataccgtaggcggctatagcccgtcgaaagtggcgtgccaggtagggggatatggtgcttcaaggtttcgatgagatgggtccaagaggcgaatcgcgtgaacaaaaaatcttcgacgacttcagacctaggagatatgactcgactgaattacacaccacttcaaatcggaatcatcattatcccaatctttatcatgacaccgctgctatggattttccgatgacaaagaatcgacgacttggggtttattacaatatttcgtaaccatcatcgctgtttacggtccttaactaccaaatttgaccatcaattcatgcataaattttaccatagtctaccactaaatctagcggtaggggtttattacaaaccacttccacaagtgttggtgaatatttgtatgcgggtgaatacttgtggaaattaagagaaaacgcaagtaagagaaaacaaattccagccaatgagagaagagtacatgaatcaaagggcccacaccaggaggtgaaccgcctcaacgtcgtccaaacaccccaaaccgtcacgtggacctaccaggcagtgacccagataaaaggcggcgcgagggggcttagccagggttcggtcgaatgaggggtggctcccctctatcacaatttccacatagcatcaattatctctctcctggagacgttggtgcaaggctcacggtgagtaaccgctatagaatgtcggtttgaggacatgctgtggcttgaaaggagttggaggaggaatattctctcaaatcacctccacattataaataggcctccattccttactctcaacacacaccaagatataaatcattgctacattccaaaggtgaagatctacttagctagttcttagagtagggagtaaataagagaatgtctggagaagtgccaggctgggctgtcggcattcttctcctggggaagtgcaaggtttgtcggcactcttctccaaacttgtcttcatataagtaagcattcatgacttctttgttgtatttactcttcttatttaagtaagatattttctcatagttgcggattcattgctctacttaggtagagtactttagtcttaagttggtaccgagattagagtagtaatcaatagcatatacattgtgtctaggctggaggttacatttgtttgttgtgtgctccacgggttgtaggggtaggcggtaggtgatgacaaccctgtccctctttcctaatccttaacattcggatacattatagagttgtaagccagagtcttttaggtaactaaaagattttaagcactaatcatcaaagttaaagggagcatccttagctggcaagctggtgaggggtctagctactaaagaaaaatgattaatgaaccgacaataaaaccccgcatgacccaggaaactacggacccctttaacattataggaggtcggagttgttggattaccacaattctaactttgtactcctgtactgctttttcggagactcgatgttcgagcactattcctagttaagcacaaaatccttttcacgaagtggcacttttactagttctgaaccatgaaatgacacttttcctagttaagcaccaagtcctcttcatgacaccgctgcaagactttgtccaggttctccaagcattgatcaaaactctttctatagatggataagtcatccatgatgatttccatgatttcctcaatcatgtcggagaagatagacatcatacaccgttggaacgacacgggtgcattacacaaccgaacgacatccgctggtatgcgtacattccgtaaggacattgtaacatcctcaaattttaaaactaaaatttgactgcatcatgctggcttttgattaatttagtgtgttttaaaaatctatttgattcctaagtggttcaagtattacttctttagaaccctactaatttaccctaattataccctttattccgaaccttactaaatttgagcaaattctctcaaatttcaatctttagattatttccttaatttaccctaatattagtaaggatttgctatactccaaaccatagtgaaacctttccaaattcatagtttaaattcaaatcttctcaaggaaaatattcaaaattgttgaatttcactgttcatcgcacacaaggagctcgatgaaatgcctagcccagctaactcagcccaatctctacccaatcttttgcaaagtctatgttggatccttggggaccacatcccactcaaaaaccatggtttagttggccttctcctccccttctcgcgcgctgcctggcttcctaccttgccgcgcgccgagccgccgcgcgtcggcctcgggacccgtcgcgcgtgcccgattgccttggcgtgtcgtcgcccgtccgacgccctcaggccgccgccgccgcaccaatcttgacgacgacaaagccgggatgacctccgccgcaagaaatcgccgctcgatgccgtgcgttcccgtccaaagccgccgccgagtccgattttgattctacccagggtgaatcgcgccaattcttgccacacggttgaattgaagatagaaggtggtttcccctctctcaattcaagccattcacccccaagccgaccgttttaaccctcactaccgctgcgcgtcacgcccggattggcgccaacacgtcgccagccgtttctactcgcggtcaagccaatccttcgctggtaagtattcaaacgtggcctcccgccactcatattgaccttggccaccctctcacagcctctgccacctttgacatatccaatccttgagctcatccatggcgatgatggcgtccgaactcatccacttcccctggccctataaataggaccccaaccctttccttgtccatcatcgatcatcaataaccatagccccgcaactccgaagctctgtttcaccaatccattccatcaaccaccctcgtccgtcgatcgaacaccttgtgcgcgatcgactccacacccctccatccatcctccaccttatataccccttagaacacctatatcctaccatgttttagcatactagatcctaaccgaagctctgcgtcgagttttacctcgccgtaccaagccgagcaccgccgcccccgcgctgctctgttcttcgccgccacaaagtttttccggccgcaacccgtcgtttcaaccgatctcggtgagttctttcgttttaaccatctatgtactccctagattctattttagcaattggtttgctctaccatgccaccctctgggctgccgacgtgagcacggccaccgccaatggaggagctcgtcggcaaatatattccacaccttgccgaaggtcggcaagctgcttaaacccttctaggtacctgatagatgctctagaacccctccccgagccatgtctaactcacataaccctgatcaccttcacggcttaactatgccaccgccgccctagccgctagctcaaccacataccaaattaacccctccgccgccgctcaccgtcgccggagtaccctagctccctcccatcctcggccgcaacccctcttctcctccatcaccgccgcaatcgccaatcctagcaccgccagccgtaaatagggatcggctggaggtagaagaagagaagagagagagagagagagagactgacaggtgggacccgcacaccgtgccatttcacatttaattgattttcaaactttagaaacccatatctttgaaaatataggtccaattccattgaaacttggaccaatattcttctaaaatcattctctatcttttgagacccattttgttatttttctattttattttattttccctatttttcttatttttggattgtatctgaattccttttgaatttgaattttatatgtctaaccctaggtcttgaggaatcttttgacacactagataatagcaatcaatctcaggacatcgagcaaggcaagttaccatataccttttgatcatttaagcctatattttacaaattatttatttatagcattcttttcaatattctattttatatgcataattcaaccatagaaacccagataatttagtattgcttactttgcttacaatctgcttaaaattccttaaacttagattgggacagtacgtaaggtttggttgatttctgggtggctagtactgtctcgatcgatatagtttttaccaggtacttatgtcgaacgaacgggtacgaccacagtttctagaatggggatagacctagttattatgttaattaacaatatggcacctctgtatagtggttcttatttttaagtcctcgcgcaggaggcaactatagcagcgaaaggcaacttttaaccattaccatgtacaggtaaatggtttgtgatactcgagtataaattatatggtatatttctaaaccctaatcgagatgacgtggtgtcatacgattagttccccttaaatatctcgggaacgccagaactcctcttgctgctgttaacaatacgttcagagcatatgaggatataagttcatggaataggtgccacaattgttaataacttaatattgggccatgactatagccgatgattatcagcaagttgtggattgcgggtaaagcgtacatctactgcagtagaatatctttgaaactattcgaatagccgtactcatggaattgagtaccaggactcatatgttaccctggttagaaatttaaagtctatatatatatttataaattcttgctataactcttctagattgtttattaatgcttttcacaaagaaccccattatatgccaatgcataacatatttccatgataacttgctgagtattgtcaatactcattcttgctcttatagccctttttcagatttgggtcaagaggaggacccctatgactattactacgatgaccctgataatttagaaaatccctaaaggttatacctctctagtcagaatgtatataaacttccgctgtgtattaattctagttaattaattaggtgagtacctattattgtaaaacccttagtattgtagaactttaatgtatgcaattaagaaccagttatattgtatgtatcaatatttactgatccagggattgatacattaatcatagtcggatccaagtaattagttctgggacccgacggacatgtaaacattgtcttgctttgatcatcggcatagatgggaatttgatgatttcctagctaatccagcatctcatcaatgaaaggtagcgggaaatggtctttctttgtagctttgttgagctttctgtaatcaatgcacatccttcatcccgtaacaatgcgtcatcgaatcaattcattcttcgagttttgaatgaccgccatgcctcccttcttacgcacaacctgcaccaggctaacccactctctatacggcataaaatatattatcccagcgtgtaggagtttcaagacctattttttcacgacttctctgatcgcactatttagcttctgttgcggctcttgtgcatacgtaggggtaacgccccagggcctgaaaacgtatcatcccgttatagtgcgttgtcggatcaagtcgttcttcaagttttcaatgactgtcatgcctccattcttagtcacagccttgtcgcgcccggaaaaataccttttccagaacactagtgtattaatacccgtcccaggaaaagccgggatacaccaaacaaatatgatacaaaaagtacatatttattatattgataatatttacattattacaaaggcacttcaggcctgacaaacaaaaataaacagcagcggactagcgagcctacgactccatgttcacaggcgctcaactggggtataagccatgactccacctaggacttcttctccaaagcttctcttactgaaggggggaaagatagagcaagaatgagtacaaccacagtacttagcaagccacaccaggagatgcatgattaatgcaagggggtacaaggggataataataggggttaagtttggcagtaaacagcatttaaaagtcacttagttgcccaaagctattttgtaaacacgatcctagagctacacaatattattaatcaaggccgtgaacccacatgaacctgccttaacccaaggcctacgatgattcagaccgaactggcaacctgacctggtcccaactcgtcccaagccaacccaggccaaccattccacattttagttgttaagcaagttttaagaattaaacaactaacttgggtacattgctaggcttgcccataaccaagggcgcggctattcgaatagatttactctgatcagaggtgtacatctttacccacaagacatatctttactccacattccatggccttggaactcgtcgtaaacatgtgacataacccttcacccatcctagccgtgaacaaaagtaccgacccaaccctgcctacggccagtatcctagataggcaggccaggattgagcccctagcaacaggatctagaccgggtgcgccacacacataggggtgagaccacccgcgtactagtctagtgccatggcatctcgactaacgggcaccgacccgtgtagcattcatttgtctagacatctcgattaccaagccgcagctcacgtagccttcatttgcctcagagatatccatcgtctcaacgacttcatccatctctatccgtgtccttttgttcaggactagactgagcaccgagttaagccttacccattagacatatggttagtacggtagtgctttgcaacagaggcccgaagaccggtccttatggtggccgaggtgctcctagcaaaaccatgcacctcgagcccagcctacaaccatttaggagtttgaatagagggggaggtgtgtgttcaattccatcacaagccaaccattccataatgtccaaatgatatgagaactaattaatcagttataaaaccatctagtgtggcataattaatcagcgaagcatctacctaaattcatactagtggaaccattaatacagtacccactagttggggttttgttttcctagggtaagcgaggtgataataaacaatagtaatgataaggctataacaaggattaataggtattactaaaaacagtgataacgcgggaatttaaataaagcgataatgcaataatttaaatcaaaataattttataaactgggattcaatatgctcaaggatgatgcgacttgccttgctcagagagaacggccttctgaaccttcggcgacgaccacgagccacgcttcgggaacctccggaacgaaagaagctacacgaagcacacaagcaaagctacaagcctataaagaagcaataacagtatataaaaagaaagcatagggttctttaggttataacaaacattaaaagacttgaacgggtcgattcggggttcgtatgaccaagatatggtcattcgaagtttaatgttgttatatggagatttgcggattattataattaggctttgcaactataaaacatgtgtaagcgctatcctggaaaagacaggaaggctgtgctgttgacatgcggaccccacatgtcaacctaagggaccacggtagaccgggtacacagagacggtccacgggtcaacagaagcggaccccgtgtgtcaaccgaggtgagtggccgacaaacgtactccactagacaccacgcgggctgcacacgtggaaaccacgcggctaccgagcgggcacactaacacggtcaccacacgcacatacgaacgactaccgacaccgatacatgggtaccggggtcgacaaccgcacaacgggcacggggcaacaccgaaaggacgaggacggggcagtgggaggacggacccttaccaccacgcgacgaggcgtgggaacgacgacgacgaatggctcggcggagacggacggaaacgatggagacgaatggacaacactttggcggcgatccttggacgaaggcgagacgcagccggcgcaacgcttgacgacgcggagccaaggacgaagacggcgacagggctgcgacgcactcttgacgaaacgcgggcgacgaacgagcacggcttgacgaagggagggccgacgacgagcgggaacgacgagaggacgacaagggcagccggcagcagctgcacggagacgagaacggcgtggaacgcgccactgcattgccgacgacggaggcggcgccatgggacgacgagccgacggagaggaacggccgaccggaggagacgttggcgaggacgaccggcgcggtaggggaggagggggaggcgacgccgaggataaccttgccactgcaatgccgaaggtggagacggcgacgtcggccggcgcactggctaggcggaaggggctgccggagtgggtgccgacgagaacgagggaggggcggcgcggacgacggcgttcgggcgaaattcgggcgaggagatggtaaggccggggatgaggacgacgccgcggagctgagggaggcgacggcacggccgaccgaggctcaggcgcggcagccgaggcggccggaggcggtgtagtggcggcgacgccactggacgtcgacgaggacgcgcctccggtggtcaccgtgcgaaacggagggcaggctgggggagaggaggcggttgcgatgccgaggatggcgacgacacggcctaccggtgcacgggcgaggagggggaggcggctggaagtggccggcggcacgggagagagaggagggcggtgggaagaggcggtgcgaccacggggagacgcgggaggaggctaaaacgagagaacggtggaaggggatcccattttatagcggaggggagctagccgggcacgggagagggcggaacggcgccaagaaaggcggacggctgccatggaaggtggccggggatggcgcggccgttccgggcgattgagggcgctactcaagggggaaattagggggaattgaagaggaaggaattacggagaaattactcaacgtcgccgcctctgcctcgccgtcggccgtcttccgtcttccgtcgtcgtccatcgtcgcgccacacctcggtgagttccccacgtcgtgctcttgtcttcatataagatgcagtgccgcgacggcgacggccgcgggcagcatggcctcgacgtgggccacgttggccgccgccgaggcgccgacaggatcacaggaacgtgacacgcaccccacggacggtaaggaggctacgggccagctgcacgaacgggttgatgtggccgaacgcaaggaacgggaacaacgctacgtgcaacgtttcgccggcctcgtcgccgccggcggccgtggcatccacaccggccattcttagttggggattgcttttcagtgagaagtatttgtatcccattaccatattacgggacgcgactccggtttcgcgcccgatggaaggggattaaaatcgggcgtcgatttaaatgcaaaattattttaaactgatttttctcttaaattatttatataaattataatccgattgcaccattaaattcgttgtaattaaatcttcaaaacaagatcacacatgaatatattccgatgaaaaaaatagcttattattgaattattatttttaaatattgcattatgttccaccaggtatatcggaattgtttcactaagtagattgaaaatgtctcaatcgtttaaatcgggtgttgtttcaccttatataaaaataatgtttcagcaaatagcgaaaaaatgtttcagatcacatttttggtggaaaaaaaccaaattaaacatagtgaaacatttttggtggaacaaaaaataaaccaaattcccttaatagagggtttccaaaatatgtgggtttttttgttgtaaaaaatattttaattcactgcaacattagatatataaatagtgaaacattgtaaatacactaggtgaaacatctttttggaaaaaggagagggacaagtgggtgggtccaacagatgagcacgtgggggagggggagggaccgattttcccacctcccccggtcaaccgatgctgggcattctcctatattaagggcacggctaaatcaataattagcacacatttaatgggccgggtcaatgtttgcttggcaaatccaatattactataaagttgatgctcgctacttgagacacccacaatcagggacggaggtagagtataggagtgggtgcacagtagagtataggagtgggtgccgggttgcacaggaaccagtcaagaaaattttttagctatacctcaccaattttaaccatgtgtgcacccctaatataaacttagacacccgtatcaacttaaacttgatctaaagcagagtaaattaagcaagaggcacccttctccatttccgtcgaaacaagatttcggcaatactaaaaggggtgccaatcaagcttgaaaagtggatgggttagaagataaatgtttatacaagttcaggccttctcaatgaaaagtaataccctactcctgtctgaggatttattccactgagtgtattattgatctgacaatctgggagaaaagtcatgtccctaggagccccggacccctccttatatagggggaggagcagagattacaatggacaacccatataccttacggactacgggatacttccttatattcaagttaacataatacacgagtccttttctaaacatattctatctatataagctatctactataaccaatcggatatacatgccatatgggtatgcggtacccataatctttccaatttcattctagctctgcccctgtctacaatgtgggtcttaaaagacccatagagttccttatgatgaaccttatacattgtgagacttaaccatgaggcattgaatattaagattgaccttaagcttgtggctcacctttaggaataaaataattggataaataaactgcacacgtagcgagtgagagaataataacaaggctctgtcataaaaaacgtgccatttcttaaaaatggttggagaaaacaacggaagaaaaaataacttagtttataaaaacaagccgcttcgaaaaaaccataaggaaaaaaaaccgtttataaaaataccggatcaaagaaacaatcggactcaacgcgagaaaaaacccgcaacggtttgagaaaccgtccgacttagcgcgaaaaataaaaccgactgtttctttaaaaaaaaagttagagaaaaccatatgactcaacgcgagaaataaaaaaccgctcaaaaaaagcagtctgactcaacgtgagaaaaaccactttttataaaaaaaatggttcggcatcgtgcaatgccaataaaatgtctgatttgaaaagaaaaacgttcgattccagaaaaaaaaaagattcctaacgttgtgtaatccatcgtctatcatgtcgatttggttttttcgaagcgtcgttggttgaatgttctgacgtccgaatcttagtcttgcttgtcttttttttttacaacgagataaaattaaaattgatggagtggtttttgtttcctcatctattcttctgtattggaggccctacacatcacgattatcagactattttgttaagtatagctacttttcctgataacatattatataaaaataatattaaaaaaatacacatatttttaattgttatttggagagtacacggtggctttattttgtgtagacttgaccatgcgaggcagtgtaagatttgattgatcttattactggttgcaagactgagattgaaagagtattttagactatatgctaccacatgaataatccaattcttttgggtaaagcaagcatccacaattacattaaagatgttctaatttttcttatgatatgtcttaactgtaacgatctatacagacattatcattgacatggttatgcataaaaagtgtatattgatattggattgtttttcgcccgttgcaacgcacgggtatttttgctagttactataaagttgatgctcactactctcctaaaactcaacatgtaagtatgtcatatcatcacccacaagcaatatattattatctagagtattttaaatcatatacaagtatgtcacatcatcgtattttaaatattatgtcaatatgacatatcatttctaatgtatttttaaaattaacatgcaagcaatagctaaacaatattttcacatcattatcacattattgcttgcataatgtttaggtgaagttatatgtcaatatgtttaaatatgacattaaaccatccataaaattgacatatagagattagagaagttatatatgtcaattttaggtgaaatgatctttcagaaattaaaccatccataaatatttactccatttttttgctatccaatgccgttagcgcatgttagatagacaattagcatgtagctatcagtttaggtgaaatgacatattctagtacatatacgtagtaatgtatgaacacctttggtcatgctaattattacgtgcaggtgagaacacatcacgcaaaagtaacgcattggatcctaaatgtgatagggccgaagtatttcagaaagaaccctggtttgtcccttgtaagagtattagtaacttgcccatgcaaatgtattttgcagactcatccaaatgcgtgtttcccgctatatatctttgcttcaagctaacgtcttgcagactcaatatacacaaggcaattcattctcatttgcagaagaataaagaatcaagcttcaatgaaattgccaatcgatcttgaaaagtgtcggtgttataaataagacatcactaatattttttgttaggctcgacaggacccaccatataccaaattttatatgcaatcatgcatcatatacgaaaggtgttccgaataaagaaagagaaaaaaagtcctacttaagcacgacaaggactactcttatcgtatccatacttgttttcctaatacaagacctcctagtaggagaggggacacacatgggaggcgaacaaaagcaaatacggatctagacaagccaatacaatacaatttcaatctcgccgaatgatattcgagaaggcagaatacactagccgccgaccacatgtgagagttctatgccgctaggctgatcgggactagattaaggcatccccaatgttatacttatgtgatattgatatataaacggcaacaccaacttcagccaataggagtagggaaattactcatcagttaagggatctgaacctatataaaagtcactatctcccgtctcttttacctcgatctcgcgtataccctgtcacttacaatccccatactctacaaatactgtagggggatttggtgcttcaaggtttcgacgagatgggtccaaaaggcgaatcttctgaacaaaaaatcttcgacgtcttcagacctaggagatatgacctgaccgaattatgctccacttcaaatcagaatcgtcatcgtcccaatctacatcaagacactgctgctacgaattttccgatgaggaagacatcgacgaattggggtctgggagaaatgacccgaccaaaatatgttactcctatatatcgtaaccatcgtcgctgttgacggtcctcaactaccaaatttgaccatcaattcctgcataaattttaccaaagtctaccaccaaatctagcggtatggatttattacgtactaaccaattccataattattggtgagtatttgtatgcaagtgattacttgtgcaaattaagagaaaacacaaataagagaacataattccaaccaatgaggagaagagtacatggatcaaagagcacacaccaggaggtgaaccgcctcaacttcgtccaaacaccccaaaacgacatgaggacccaccaggcagtgacccatatgaaaggtgctgtcagggggcttagccagggtttggccgaaccaggggtgttagcgccgtcaacgccggagagcttgttcagggacatgcgaggctcgtccgtggcgtagactcatcaggctggtcgagctcgacatcgatcgccagttcatcatgtaaacccgccgtgaatagctagatttactgctggtcggagagggcttcagacatttagcatgcgagcgtcaagaacatggtctggtaggcagccaccgtggatgtctgcatcagccgcttcagttcaccgagcgagttgcagtggatcggtggaccgaattggccatggcagaggtctttgaactcatcccacgtcggaggccccttgtgaatttcatagtgaaagtaccattcctgtgcgttgtcggcgaggtggtacgttgccaacccaacacgatcactgtcatgcgtcttctggccacagaagaattgctcacagtggttgaacctgttgagcggatcgtccttgtcatcatacttggggaactccaatttgtagaaacgaggaacgctggtagcgctgcccgtatcctgtggtcctgtcaccaatggcggcgattggcccgtcacggcaggcgtacccaggatgccactgccgcccaaacaaggtgcgatctgtggcgacgatgatgacatcgtgccctggagttgttccagggatgtgatgcgtgatgtggccaccgcaacggtccgactgagatcagctagatcgtgcttggaagccaacaatgatcacatccctggaaccttctgacatttggtcttggagcttggtgggcgagtcggtgggtttgagaatgggttgtttgtggatggagagatcttctgacaccatggtcttggagcttggttgttacgagctccggtgtatgatctaatggggtaggagtgagtaatcggtggctgaggtttcggcaacttaattagaagatcggcgacccgtggtagtggcacagaagaagagatgagaaaacagagaaagagatgggaaacaaagtggaatcttgcaagctgatttcaatcccaaatgccctgtaaataggcttacaaatctaacttaatgcctaacaaataatgaggaaaatgtggagataacaatccaatctcaattaaacttatcattggctaggagtgtagctgtccgacacggccgctgttaggcgcccgtgctcgcgtcgcctgctcctgtgcgcgctacaccttccgcgtcgcgtgtcttcctccttcggttgcagacgatgtgtcacgcccagaaattgctaacctgaattttaagcagaatgtgtattaaatatctgtccagggccagccacgtcttacaaaagtaataaaataaatctaaaaaatgcaacggaaaaagcaaataaacaagacttaatcttcacgaccaaaagtatagcttcctccataaactacaggcaatccttgacgtccggaacaagctcaatcctcagagaactcatcatctgaaccaatttctgcctctgggtgggtgggggtgggggggataaaacaagactgagtaccaaccactgtactcaacaagtcataccaacgggaaggtatgatgcaaggtattctcaaaggagtggctcattggatatttgcaataaaagcaacatttataaatcattattttgaatgagtaaaaacagtgtataattaagtagtattaaatcatcattgtccaacgctaaatccacgttgcaacaggtccaaccaaaccacctgaactacaccagttctataagtcatattattatagtgggactaatcacggtgaactggttgaccacccaataaccgcaagcacggctattcgaatagttttacctctgatcagaggtgtacaactttacccacaagacatgattccacacatgttaccatgctgatgttgactagggttcccgatcttccgaaaggttctaataggtagtcgatttggacggagtcacgacacagttcgatccggcttctaaacaaacacgctcttgagccccgcaatcgcagcaccacgtctcctctggttatcacccgtgttgaaacacggatgacctcgccgagaaggcaaatccctgtttgcgaatcgaagaacacaaacaagaacaaagaagaatacaaccaaaattgcaaataaatgataaagctcacgagttggggtcttacaaaccgatctagcggcgaaactgttcttgacagaataatctaagcaaaacccaaaccctaaatatgacgacgggtattgatatatagaatttagggtcgtgtaaacaacccttgacgcaaccctaatgggttccaacacgatacacggcctaaacgcccaaatacgatgacgcagcaccggaatagattatggacgttaaattgttcggtcgattcccgttgacttggaaagaatttgaacgtgggaccagaaccattggaaaggttatgttctaagttttccatccatataaggaacgccccaatccgtgcacatatgcgacttgggcgcctgttttagtgcagactggtcctggactctgaatcgtactcgaagtcgacctggtttgggcctccatattgacttggacgtccttgatgatcctccatgcctctaagtccctctctaagtccttgtcctctcctttattcctaatcacaatatattcattaggtagcaatctattctcaaaatcatataaagaagaatataggaacgagctcacctctaaattcaattgtcgcgcacgagctcttgttattggtccttgaatgaccggtggaggattgttgtatgtatctgaaggagtgatgtcctcatcacatgccctgaagtaccgccacgatactgcaaagggggaaatcgtgacaaaacccatcatataactctccctaaccaaacatacccatctcaggtttcaccccctccttatgccaagtcgggcaatcccctctcgtgcctaggtaaatccggaaacaacagagacaattatctaggtctgaaccgcacaatcgcctctacccttgccatggtatgttagctaggttaagttatactctagattaagcctggagcccatgctggcatgtgataagaacgagtatatcttccatggattcccgagaaccggtccttaattgtcatgggtacgacttccaaaatcatgcatgtacccacaacccaccattaaagcatattttagtttaattaaaccgtaaccatggtggtacatcatcatacaattaaggactaaattataatgaatcccattgtgagctaattgatctaagtatggctaagcattcctaaaccaatcacctagtcaattataactcaagttatcaatggcataagatattcaacatgctgagtacgataggcatccatcccacatgacattctaaaacaatgcaatttaatagaaagtaggggattttgtaaaatagactcaacatgatcaatgatgtatgtatgacttgccttgctcttgagctgactgaatctcggcaaccacttggaaataaattggatctccggaactgacggaatctaaacgacaacaaagcatacaagaaatacaagcaataaggctactgaaacagcaaaataaaccaaatttttttatcttgttctggacgtcgaagattgcatgtggtttatggtggaagctatgcttttggtcgtgaagattaagtcttgtttattcattttttccgttgcatttgtgagatttattttgttatttttgtaaaacgtggatctagatagagatttaatacacattctgcttgaaattcgagtaagcgaatttctgtccgtgacacgatgccaaccatgacacttcggtatcatctcgtatgcaacgtatgcccgcatacatgttcatatatatgtatagttgtattggtcggctctgataccatttgtaacgctcaaggcccgaaaacgatgtggctcttaattttggatatacttttgagtatgtggaaggaaaatggagggagtggaatatttagagaattaattatgggctaaatgaggttttggatttgggatgggaggataaaatatattttcttgcaattattctaaaaatattattcttctgccaaggttggagtcaagctatagaaattaaattacagactagataggaattgactattggaatatttatataaaaaaattggatagaggagaattagagataactctagatccaaggttttggttaaggattaattcgaatgaaatcagaattacggtggttgaagttcaagggcaatatcagaggatttcttagaccataattcatacaagtaaaaagtttttcaattaaattaaataaaggaattttagtctaaaaaagttttgaaattcgaaaataaaattcaatcacaaaattcatcaatttagccaaatatatttttaaataaaaaacacaatagaaattaaatgttggttagtttgaggaggttactctaattattctcctaggtttagaaggttattaaggtgctgaattagaaaataattatttttaggatgttacaacagcacaggcgtggttcgagttttcacgccacgtgccgtcgaggcggtcgaagaatgcgttgcggctcagcaggagctcgcgcggagtcaacacatcagcgtaaatccaaattggcgcgctagggctagtcgacatgtactcgcactgtgaaaggcgggcgtaattaaatagaaggaaaactatgcaggtaggaaattaatcaccgcaagacaaagaataaagtagtactcactccgggttgataataattatcgttttggacatgagcatggtcttaaaaaaaattaaccattattttttattttaatatgtgtaaaatttttaacaaatatgtgattttattaaagtatttttttaaaactaatttatatatgtagtcactgtatttgaaagataaatattataaaaatgatttataatcaaagatactaaagtttgacctaactcctatgtaaaataataagtattatcaacccggagagagtaggttttaggtttcaaatcatcatcgatacaagttccaggttgcagctgcgagaagcacttatatgcgaatgggccatgcctgggccggcactgcccggcacgaagtgccgaccgtaccgtgccggcccgatcactggtgggccgtacctagcgcgtgcttgggccgggctgtgccgtgccggacgggtcctgtggccatctatatatgcgatatgcggcggacagtttgagaaaatgacaaaagtatgatgtagcacagtattacacagtgatatgtactaatcataaaaataatttttataaataagacgttaagtcagacgttggatataaccagtgcaaaactgcacttattttattttatgacggatgtagtactccctagagcgagaaccgcgatgcagtatcaagcaatcacagccgttgattccttctcttcacagtcttcagaacagagtccgattttcttcagagttgtgacagctgtcgatctgattaacgacgcgtgacgttccgttttcagcccttgagccttctcagctccgccacgaactcccgcacgaacctcctctgcacggcgtcgtccatcaagaactcccgccatttcttctcctcgccgccgccgtcttctcctccggcgaacgccgccgccagcgcgtcgcgcacgtcctcacgcccgaaccacccgtcgcgggcgcggcgcgcgacctcggtgcccacgcggagctcgcgcgcgaacagcgcggcgttgaggtactggtcgcccttcatcggcagcagcacgaggcggcagccggcgacgagcccctccacgacggagctgagcccggagtggttgacgaagcagcccacgctgcggtggcgcaggatgtgctgctgctgcacccacccggtgtgcaggatccctctccccttcaccctctcctccaaccccggcggcgtgagcttcctcagctccgcctcggcgtccgtgcccttggggaagttgagcactgcgaggaacggcagggcggtggcctctagtccgaggaggagctccgtcgcggcggcgtgcagcaggaaggtctcgctgccgaaggaggcgaacacgacggagttgtccgggaaggaggagagccacgtcgcccaccgctcctccagctcgcctcgcggcggctccggcacgatgggccccgtcacgagcaccggcttgccgtgctccgccgcgatgtagtcgatgtaggggccttccatctcggcgcaggtcttgatgaccagggcgtcgcaggcgttgtggcatgcggcgacgcggtcgtacacgcacggcatgccgtggaagctctcgaacacgtagctgaagtcggcggcctggtaggccggcacggtggcgagcggcgacgacggcgggaacccctccggcgccgacgcgaggtcgtcgacggtcgggcgccccggcccggggaggcggcggcgcgcgggggccatgacgtacgcgccggagaccgcggcgaacacggagaagagcgctgccttgacgccgagcggcctggcgacgtcgacgacccacggcgtggcgaagtcgaacagcacgacgtccgggtggagcctcgccagcagcgcctccacctgcggccgcgtgccgtcgacggcgagcttgagcagctcggcaccgtccgccgacacctccgccgtgctctccgcgccctcggggagccccggcacgcgcggcagctcgagcgccgccacggtggacgtgccgccggtgccgcccagcatggcctcgacgcggggcacgttggccgccgccgacaggaacgtgacgcgcaccccggcgccgacgccggccatcttccgcgccagctgcgcgaacgggctgatgtggccgaacgccaggaacgggaacatcaccacgtgcaggtctccgtctccaccgccgccgccggccgccgtcgccaccggcgccgcaccggcgcttcccatcgtcactcacgacgaacgtggattgcaatcgagggcagtgaacggagacggttggcgaggactttggcattggttctcgcgactttaaaagggagatggagctgttcggacacagtactgcggcttctgttcggacacaggactgactcgtgctcgctgctcctacctaaccgctcggacatttttgctgttcttttttttttacttactagcaaaaatgcccgtacatttgcaacgggtgaaacaattctaattacaatatacgtttttcatgcataaccatatcaatgataatatttatatagattgtttatagctaaaacaatcagaaaattagaacatcttcaatgtaatggcccaaccttgatgatgacaactttaccgatgctttgctttacctaaaataattggattatttatatgacaccatgcatataatttaaaatactcttccaatgtcattcttgcaaccaataataagatcaatcaaatcctacagtgcctcgcatggtcaattctagacaaaatagagttattttgtacttttctctaaataacaattaaaatatgtttattttttaatattattttcatataatatgttatccaaaatagtagctatacttaaaaaatagtctaataattgcctacagaatatgtagggttttcaatacaggagaatagataaagaaacaaaagctaggtaggtaggagatgaaaaaaaaatgatggatcatatccgaccccaagcgtccatcaatttagcattttctttacagttttttcaagagcaacttgttttttttatgaccgatgtttttttttcttgtgcggtattttcaaaccattttttagaaatggcgcgttttttcccttttttctatcagttttttcctcgcatgttttttttgcttttttttacaggcaatggaaatatttttttcccgcgctttttttatggacaacggaaaattttttctatcgtgttttcttttgctcttttttctaactttttctcacgcgtttttattttctcgcacattttttctgacttcctttttaaatagttagattatattagattagagatagagaagagatgataatgactattaaaacgaatagaaatcggatttttttttgccgcgccttttttccgccctttttactttttttttctcacctttttttttgccactttcttagggagtccgaccttttctattttttttattttttacgatttttttcttttctccttttataggaatcggatttttttattgctttctccaatttatggaaaatcagacctatgtttttcttttcctttttcaccacttctgttccccttttataggaatatgattttttttttatattttgccgttttaggaggaattggatctatagcgtgttttttttttggctttttcgccactttgggaatcggatatttttttcgctgtttttttattttgacggacgacggaaacactttttattttttaagtagtagaagagactagcgtaatgcctcccgttgcaacatgtcctaaataacattcatcaacataaataaaaatcctaaaccatatattacaactgagcataaataataaaggaaatataatcatagaaataacaacatgacactacaaataattttgaccggaattattaatataatgctaaagtccccttttattcatatagctataaataattcaatgcgaaggaaaaatataagtttcaataatttttattggatcaaatagtaaaacaaatactgtaaatagaaaaacaactgaaaactaaatttagctagaaattgaaaaaacttattttagcccatagatgaaatattaattttgaacgggtactcgtttctttgacatatattaaaattttccaattcaccaaacggtagcgaggaaagtgtccggatgtgttccacgatgtgactcgtccatagatagcggtggttggcaacaaagaaaaccaaaacaacagaaacgcgaccaacaacgatgtggtcctaacaggattagaaacgccaacaacgagctctagtggtgaacacggccgggtgagtgcgttaaaacacgttcgtgaatgaggtgattcctttttccttggacgtgctattgttggcatcgaagaaaactgaattaccaaaacaatgggaatgcgggagccaacgacatggtcccggtagagaaacagcaacttgacgagctctggtggtgaacacggacaggtgagtgtgtcaaaacgcgttccgagatgaggggattccgttttccttgaacacgctgcggttgacaacgatagcaagaacacgagtggcaatgaagtggtccccggaaaacaacaacaacgatctctgatagtgaacacggccagatgaatgtgtcaaaatgtgtttccgagtgaggggggttccgttttagttaacacgagggaggaacgaaagacaaacagaaatcaactaacaatattcatcatcttccctagcgctgaagccagtgtgcttcgggaggacgcactggcgagaagggatggagggtcgggagaagagtggcgcactgggaggagatagctgctagaagggagggggcgcacgggaggataggagtgctgggacaatggggcaacagggaggggaggcgccagcagaaagccgcgggagaggaagggagcatggggccggattggacacgtatgcacgatgtatggaaaattttggacggacgaactaatttttggttggaagcagattttaatcttttagattgcttacggtcgttagcgatcagtttcgcccgtcaatattaccaaaataaaggagaactaagtcatgcttgcaatgcatattgtgtcaaaataagatatattccactagaactaggatttctaacctcttgcagagaataaacataaatagaggagattcgatagcaaaaccatacaatagatcaatcctacgctgtcgagaatcagacttgaagacaaatgggctgagaacaccaaatttacaagacccaggaagaccaaaattcacaagtctgcggagaggagcggaagaggaggccgcctgccaaagtttgggccgattgggccagcccagggttcggccgaaccagccgtaacgccatccgatgcagggtttggctggatggtctggattgcttccctatggtggttggagggtactaccgacctttccaaccgccataaatgtcattaccagcctataaaaggccctcactccctctatttcaagacacatctcaagcaagaagcttcatacattctctcaagtttagtatagtctctagagcatagtggaatagaaataggatagaatcttcagtccccggagtcttcggaagagttcgggtatggctctagtagcttttctttcttttgtaagacttgtactatttatagaatattcttctcaatatatttacagtactttacttcactgtgattatttgagtaccgactttataagatattattcgagatataattgtctagctagcttactcgggagatgcaatggtgtgggtataatgttcatttatatgaatactcttgagtcacgacggtgattgtagagtagtatttggtagataagcgaggtgcataggctattgaatatcattatttgcggttatatgctgtggatacgtcaagatgggccgttgatggtgacaactcagtacgggtattccaccgcgtgtgtatataatcctaagttactttcctggggagggtacttctccgtatttagccctggttggatgaccatgacgggttgtcgcaaggaactcggcaaccaggggtggtatctcgaaataccaggatggcatcgtaaggggtattggctatataatcatatagtactacctccgtcccaaatacttgtcgctttgattttgtttgtaacttttgatcattcgtcttattcaaaaaattatagaattattatttattttatttatgactttctttattatcaaaagtactttaagtatgacttatcattttttatatttgcactaatttttcaaataagacgaatggtcaaacgttgcataaaaaagtcaaagtgaccactaatttgggacggaggtagtagataatatcgactaaagtgtgtatgtatattagaagtataggaaatgattttttttcatattttttccacttggcctagaattagtatgtatgagaatagtgaatgcttctgattcgtgtcaccctaccctttgaattaaactgacccatgcctagactttgattattacaagtaacatataaatattagctcggttctctctattataattttctctcgggattaaacacatacgatacccttggaatacttttaggtgaaatgatataattgtatatccgcacgcttgcagatgaaattgtaaccataatataccacgagtgtttctgcgccattgctggtaattatatttctagtaatgtcgttaagaaataccaacataggtaaagataaagacaaataaaaccctgtcacctgtcaacttatagaaggaaacccaaataacaatagatatataaacttaacgaacaagagaagataaaataaaagacgagagtcgtataataagataggagaaggcacctacgccgatggataaacaagcaaacacaacaacacccccaaccacttgtggagagagaagtaaggggttgaagaccatcaaatcgatcaaccattggcggaatggcctcattcgattgttcaccctgcttttgcttgatgaggacgagtttgcactcccagcacttctgaaaaccagtttacgtgagactccagagttatatattcacccctttgaccttgccaatcttcctctcaaacggttctaggggagaacaccgtagcgcagctgagaatgagaaaaggaagatccatatcacttcaattgtttttaactcttagatgattaatatatggtccaaactatcttcctaattttcttctctcataaagtcatattatcttacttttgcatttgaatcatcattctatataccacttactactattgtgcaactagtctatatagaaaaaataacaaaaaaaatacttacatacatatggactatccatatgaaaataaataatattatctatctcgactcatctctttttttctactaatgataccttgtgtctatatatattgtaaggattgctataggtaaagtatacttagatagaacccatctatatggattattttgccatatacattagtgatgttctaaagaaaaaccatcaccaatactaccggtctggtttttaaaccgatatctctaatttattatagacgcatatttttaatttattattaaatccagtgcacggagacgttggcaaggactttggcatagttctcctgactttataaagatggagctgttctgacacagtagtgcggcttctgtacgagaggactgccgcgtgtgctcaccgctgctacctaaccgctcggacgtttttttttttctgtttcttctctctttctggtctatgctataaaataaaatattcttacctcaccgtgggatcgcttgaccatataaggccattagcaaggtggtcgatttttatgactgacaatatatttaatggggtgcgcaaaattaaacagagatggtgacgtaggtgtttatgatggttcaggtccttggaaagagataataccctatatccagtgtcctatatccagtgtgtttttctctgtacctatgtggaaaaatgaactgagaagccaagaagaggagatatgtcgggttgtggagatgatccgacctcctctctcgggacccctgccccctcttatataggatgagggggagggttacaagaaaagtatctacaaatctctctattctatatctataaaagatatgcaggatccctaagatttatatcttatctagggaatctctctttctttatttacaagtacgtcgcatgggcctaggacactcgacccaccccatgaggtgcggcccaaagcttatcgttggatacccgggtaccgtgtacctcacaaaggtgttcagggaagttgtgataaaaaaattatttgattacaaacttcactactatgtaaaagattcttccttgcataaaaacaaatttttacatgcgggagggtgacccgtatgtatctgtgaaaataaaaattttgcatgcgtgtagaacaagtgcatgcgaaaatcggttttttaatgctaacgcgtaagcggtctgattgcttaaaggaaaaatcgcaaaaagaaattccaaaaatcaaaaccctaaccctggaatccaaatgacaacgttgccgctgccgtcatcctcatcatcatcgtccttgcatgaaaccgccagcaaatccttgcgcggggggagggggaaggggagggggaggggtcggaggggcggcaggatctatgtgtaagggggagagggcaatgtgccggcaatccccaaccctaggtcgaatgatttcttccgcgctgtgccatcaatgcaataggtttttctttctataattctcgtctggtcgtgtattgctggtctggctgcaccagcaagcgtggacttgttggtcatattttgataaatcgtccaaacgaattactaataatttagtttaaacaatacagtattagttattattaataaatctatctattatataaagtacattaaactttcattaaacttttcagaaacgctcctaaaccaccacgtggcgtcctaaaaaactcttaagccgtcaagtggcactctaaaatataacgaataatttttctttaaattggtggggtcaatatttccaacattaggtctaataaacacctgtccccacctcccctcccagtacgttacctaatttcctccggtaggtttgtacgtactccctttcccaatctctaatttcagtgttaaatttaagtcacatgttttactttttattgttgttatatttataattaaacaatgtccatattgttgattcatattgttctatatatgggccatattctttgcatcgcaacaaaatataaccaggaaatattttaattataaaaagttgacaacatatattatgtcaccttaaataattctacaaacacgtcccaaattatattgatgatatccaatctatctattatatactaaaaatctattatacttcctataaacgctcctaaaccgccacatgccacccatataaacgctctatagcgtcacgtgcggctctaataaattagaataaaatttaggaattctaagaaaaaagaaacaaatagcctttgattttcactaaatataatagactcaccactccaatccattggattacatttttttctctttcttaataataaaaggtgtccctcttcccgtggatgcagggtgtgtgcggtttgcacattggtatgtacctcctctccgtttttctctttacgaatgtttctttaatttctaacagaccaaatttggctattctttataagaaatattttggatactttaaataatcataacatcttttaacttttaattatacgttctatttgtatcattacgttatttatgcatgattaaaatcacaaattaaaatttgatacacctgttgactataattgcacttgtaaaaattgcattcattttattttgaccctttgcaagtcgttcaaacatagtaccacataaagagttgaaataccctagcccgtttaatccatttattctttacaaacactctcaagccaccacatggcactctaaaaaatagagaaattccaagaaattctaagaacaaacaaaatatttatcccatgattttaacttaagtcggtggacccactattttcatccgccagatcaatttaaacaaatccttccacctacaccattgtcccgtaagtagccatggcaaccgatactcctataccgccacgtggcatcctacagacgctcataaaccgccacgtggtactataataaattatataaatttataaaatttctaagaaaaaacaaaatatctatccactgattttcattaagttaggtggacccttattttccaacaataggtttatctaaagaaaaatcctacctaaccccaaaccggggtataccatgggcctgtacgttacatacgtttcttttataggatagtacgtacttccacccatacttccctcgatttcttcatattttttacatatttattatcctattattagagtttgaaaaaaaaatttttttattaaataattcagcaattataacacctaaatcaaacaactaatatttatccgcttatatctttaaaattatttatgattaaatcttcagctaaagaccaaatttccacaataatttaactttgaggaaaagatgtcattttggattataattttagacttttgcatgccattcaataaattgtaaaaatatgaaataataacaatattatacacttcataataattaaatgatatctacaatcataaacgtaaaataaaaataactatgagtaatgttcccaaaatatttagttagaaagcaagagttatgctaaaaaataagcagctataccataaatcatgggatcccctaaatcatacaagtaatatttttcttatgtcttttgattattttacatttaaagacccatatttggggttatattttctgacttttgcatgtcattcaaacaattataaaattatgaaaaataatgatatatgttttatcattgtatataagttcacaataaagtaatgacaaaagtaaagtaaacctaataacactgactattgttccaaaaaaattacttctcccattcggatagtataataaatcaataataaaattagtagatttgtagtgttcatattttgtcccatttgactttctcttcatctcctctctcactcaactcatctgtcttataatttttaactaattaacaacataatataaaaatgatcaataattggaaagctaaataattatgattcttatgttatatttgatttttagtttatttgaattgttattttatttataattaaataaataattcaagatccatatcactcatatttcactttacaaaaataaagaaatacacaatttgagcatacacacctatcctttgcatgctaaccaaatataaaaaaacagagctttgtaaaaaatgacaataagtattgttgactaaatctcgacaggacccaccacataccatgtcctatacggaaataacctgcgaatataggaggagttccggataaggaaagacaaccagagttctacatggaaacgacaagaactactcggattgtatccatattggtttccctagttatacttggacaagaggacacctatgggtataaatataaggccccctctaggaggaggggagacaatcaacagagacaatcaacaccctccacaatctacggaacaacagaagccaacatacgccaagacaagacgccggatatcgacttcagggataggcacggctagtcccctacggtgtctctggatattgataggaaagacattgcgctgtctctgatctcgccgggcacgaactcgaggaggaaggctaccctgttgttgactacgagtcagaccttcagaccgtcatgtcgacaacagttagataggctaccccaaatattgtactggtgtgattatggtgaataagagcaatatcggcttcggccaacaggatgtagggttattatctgacaattcaggggcccgaacctgtataaaaatcatcgtctccgtctcttttacctcagtctcgcgtataccctagcaccaacgatccccatactatgcaaatactggaatcgcgacatcaaacgtcgacagtggcgcaccaggtagggggattttggtgcttcaggatttcgacgagatgggtttaagagatggactctccgacaacaagctactcgacgactttagctgtggggagatccaacctgtctaagtacatctcccgacgagatcggaaccatcgtcatcaacaattcgatctctcgagatcgaccaagcctcaagatacgcgacgtaccaaaagatgtcagatcgcatgatatcgaacgagtacgtgacaaggtaattgatagattggttttttaaattgatctactaatttcatagatacatccggcatgtatctacaaaggtacacaatattttatctgcaatttatcatacctattcagatcatacagcattgtcagatctataatttattatgtttaattacctaaagcatgttttttatacaatatatattgtgcaagtgtccccgatgttaaatcgacaacggtttaatgctgggggctcgctctattttcctatgtatatatcatgcttatttacggtttacataatgccctgatatttaatctgctcgttatatcctgataatgctagaagatccatgcagttttttgagtacatactcgatattatctgctatatatcttgtcttctagaaaatattttgcaggaacaattgagcactcgagtaggttgtggtcaagtacaccgcattatcgaggacgatctcgacaaatgcagagtcgtcgtgcccaacctaccaacgaagaccgatgacctatctcatagcaccggccatggctggactatttgagaaaaagttgttaacggataattccttgtgaacgttgtcggtttgatcacccgacatgattgcgaacggacatccggatatgctactagttgggtgtgtgagtcatgctggccacatgagatgcacatgtaataaaccaactctaacgcttccattggtgcaacctcagatggtcgaggtatgactacagcaataacgcagcggtcctcgtactacgacttcaaatgatcgagagatacctactcactggttctcaactagtcaatcgtagcgatctctcgtacatttacttctagtggttgagttacgactactacctggttcttgaccagaggtgtagcgattctcccattacctctacttcaacaaagttgatatcaggtgcacagtatcgccaagtgttttacccagagatcccttaccacaaagacacctagcgttgaaacctatcctaatgtccctttacgtcgtcctgacaaggcctccgaggaacctaagggaactttggttggggacgcccagagcggataaggccttgtcggattcttcagagacgaaagaccatgtaagatctagtcgtgtaagagttctcgccgtgcgtattaaccaagccgtgtaatcggaaatagattttccaacttcatggctgggggctaggatcagtgcttgttcaaccgaggcaggtcaaaggtccaagagcctcattatccgagaacgattctccgatgacaaggctgggggctagggagagtgtataacttaacaaactgactgatcgaagtcggtagacgctcatatacaaaacattggaaaattctattcgacattatcgaagactccatgtctctatggttctacaccaagattgactaaggcgagtacgacaaatgttgacaaggctccgtcgcagactctacgcctactcgattactcgagaacggttggtggatctcgacaaggagtacggaatgaagagatggtgtacccgccgagataaaatttcttgacttcaatccaaattctcgattacagcaagacgggagacttagtcgtatgctctctactttcttagttgacatcagagattgactcagacaaaccctttaggtgcccgcacgaggttgataaaggaagtctaacgttatctctgaactcatcgagaacggtcacatgagctcgataacagttactccaaagtctgcgcgtggttgagaatatgaattcgttcatttgcattgaagtcgggggctactgtcaggattatggataccacatacctaatagtagttgactaaatctcggcaggacccaccacataccatgtcctatacggaaataacctgcgaatataggaggagttccggataaggaaagacaaccagagttctacatgtaaactacaaggactactcggattgtatccatattggtttccctaattttacttagacaaggggacacctatgggtataaatataaggccccctaggagggggagacgatcaacatagacaatcaacacccaccacaatctacagaacaacagaagccaacatacgtcaagacaagacgccggatatcgacttcagggataggcacggctagtcccctacggtgtctccggatactgataggagagacattgcgctgtctctgatctcgccgggcacgaactcgaggaggaaggctaccctgttgtcgactacgagtcagaccttcagaccgctatgtcgacaacagttagataggctaccccaaatattgtactggtgtgattatggtgaataagagcaataccggcttcggccaacaggatatagggttattacctgacaattcaggggcccgaacctgtataaaaatcatcgtctccgtctcttttacctcagtctcgcgtataccctagcaccaacgatccccatactatgcaaataccggaatcgcgacatcaaacgtcgacaagtattatatcacctcaaatcaatgtacatcttctgtagcacacttaaggcatcacgtgttatgtcttaattaaaaataaaaccttacaaattgtaagaaaagacatgtgaccatcaatttgtacttaataggtggatccattatttttaaccaatatatataattttagagaaaatcttaagctgtcatgtgctacatcttaaaatttagaaaaaaaggatattagaaattttgataaaagaaacaggatcatcgattttcacttaaatcattttgaacaaaacaccccctccacttcgccctcctctcacatgggcacaacagaacactagccgtcccctcccctctcagcttgtatgaatctgaaccaacaaaaaagagaactaacttgatggtacaaataaggaaagcatgtttactaataataatagttatttaggatttgttaaaaaaggctaccaaacattcaattaaacaagacaaaacattttactttttagtttacgtttaattatttgtccgacaagtttccaaacaatctaaatatttacttttgaaacatggttggtatttatacagatgatagataactatttatacgaatgaattaaatatatattttttaaaagctaacaaatagtttagaaaaattatgtagaaatagtacttttgaaacatggcagttatcatcctgttgatatttcgcccatctaaatttttcaaacgcatcctgaaatacatgcccgcgcaatacgcgggttcccttactagttaatgaaaaattagaaaattgccgttgatttatagactaatataaaaagcacgagttgttaggtgcaattaataccgcgattacaattagcgccggattaaccctgcaattagcgcttctcaatccctctcctcgccaaaaaaaaaaaaaagtcacccagaaccgccgctgcgcctcctcctccttccgccgccgctgagccgctcttgctcctctatcgctgcgccgctcctgctggcccgcatcaccgacgcgcccatccacacccacaccttgccagtgctgacacccctgcgacattgccgccgccccccgcgatttgccgttattcccctagatcgggtgttgccacatcgccgtccacgcctgcggttcctcccctctccccttccgtgatctccctctccacacccacggttcctccgctctccccttccgcaatctccctctccacgcccgcggttcttctgctctccccttcagacgccatagccgatctcctcacggccgttgccatcgcgaccaccatcgattcctgaccgccaattcggggtcacggtgaccgagcccccgccgatcgtcccatcacgccaccccttcgccactcactgccaggtcgtcatccatcgttcctcctctactcacgatccccaacatggtccatcagaatcgtttgtgctctccgctctctccaaggtgagtcatggaaatcttctcttgtatcaatttcataccgttatgtatctcatctctcaaacgatgaacttttgttcatctcacgatgatgaacagtatggtcacgaacagttatgtacctcatatctcaatggatgaaattttaatgccaataaaatatacagatcgataaaaaaaatgccaattagtaaatagaatgctgcatactgaaattttgcactcgatatataattgaagaatcacatgattttaacaaaatacactggagttgagggatagttcaaagcatgtcatttgagagatgaggtaattgactgaaagccggtagcaaatatcatatacttgttttagtggataggtagatggataattgttgggtgcgggtttattctccactgtatttgtttttctgaatttggcatcgtcttctatatgaattttatatccttggacagcaatgtttctaaatttttttaaaggggaccatgtgtctgaaattgaacatctggagaaaggttctgtcattgcttatttgccagccttctagcaagagttttgctgcgagttattgcatgacataacggcagcttgcagtatgaattggaacacacaaagtcagaataaaacaatcaaactttatgctcatgattatattcccatttgtagatactatattcccattggatgtgggtaagatgggattcattttttggtccattttttaccattgaatggtgagcagtacttccttgttgattcctgactcccatctgaacacagaggacttggagctgctacattacgttgacagcgactatgctttcacctcccgccttcgtcacggctacttagcaggaaggtcttcccatggtgctcgatcacatcgccgcctccgcgcacttgctctttccccgacggtcgatgctggcaccgtgccgctccacctcaggcagagaagattagatcgcctccacggctccgccattccgaatccggccagttctgcaaatgaggctgctgacatcatcgatccgccatctcgcacagcttgatgggcatcatcgctcgcctttgcctcatgacctttccgttgccaactatcgaagctgcctaaatttactagcaggttaataaattcatctgggtttctttgctaatcatctttacctaatatatattggatctaattctttgttgctttggttatattattgtattttcaggtcatcggttgaaaccatccatgtgctgaataggtctcaagataggagcaagttccgcaagacgtgcattggacacagccgtcgcatcgctcctctgcagcagatccacgcaccggccaccgccttcacaacatgatttggaggtggagaagcttggtgtgccctcgacgagttcttccacaaatttactaccctcgatgatggcccaggccgcggcggctttgtcggcttcttcgacaacactaatgtctaccttgccaacaatatgtgagttaatttcttcctctctgctttctgaaatacttttcaatgtgaacactagcaatgtgaatcatctgatattaagaaggtcattactttcagaaatacttctataaaagtttgtgtgcatggattgttctaaatgttttgttttgtagatatatacaattttcatcaatacaaattgttagttagctcatatgctccttgttgatgcaaattttgtcatgtaagtactgtattcatggttgttggatgtaggtatcaattaaaccatattctttattatcaacgtataaccaatttaagctcaattttatggtttgctgccgttggtatagaatatgcactgtttaattaaatatataagtcaaagctgttatctatcagtttgtatgtttctattaatgatattttgatgcaatggataggatggctgttacggaatgtagcgaattcttgatgaaatgtactttctaatattaattgatcaaatttgagtatggaggccctttgcttgtcgactaagtgacaacgtcatggctagggatgcactggtgtttttatatttggatctcaagccctcgtatctggttctccagctgaatgtgttgatgcgatgactgcagcttaccaatggatgactctgtcatcttttcgctggcttgaagaactctgcagagaagcagaggtaggatatgttgacatcaggtgcttaactgaaacccgaatagaatccatttattttgacttcaaactgatgttcagatctgacatttggtgcacaacatgcagttgggggttttgacgtttcttaagtttttttcattgaacttgatcagccaaataagctattttagacgtgattcatgacctgttagtctgaagcgaaagcagaatcagattcaagaaatgcagatgtagaactatccaatcatatcgatcgagcacaatcttgtcatgccattgccagacatccattcttgcacaaagcaaactccactcaagattgttagataatgcatgtacatcaaaataaagatatatgcttttctctgctgaactgcatattctggatcaatcatccatggtcatccatactcaaaaattttgttggtatatcagtcatggaaattacattttattttttcttccttttcacctaaactcacagtctgcatatattttatacggtcccttcttaatgtttggggcttagctattagtatttacaaattcatacatgtgagtgttacctcaatatgtattatctgatctatacaagttcatactgaactggtattatacaatgtacacaaactatttgattctataatggacttagtagatatgtacttacaaaatccaagttattgtctgaacatgcacttgaaatatatttaaattcagtgtggaaacatgctctagaaatatttctaacttaagtgtgtgaacagacttttgcaagtgttgttttctcccaaggtgccttgcacgtgcacgattactagtttattaaaaggactgggctcgtatagccaatcttacaggacaaccccttttgggtggaagcagatcctctgacatgcagttgagtcactgatatgtgggtcctactttgctatggcccacacgtcagtgactcaactgcacagcagttaagtcacagaatctctttcccttttgggtacagagaacatacataaaagtcctgaatttagcaaacgactatagaaaatctgtacacttaacatcaccgctcctaccactaacatgtgggtcccacaatctatagtgttacaccacattttagcgagtacttccctatttccctattgactcactccaaatttcaaaatcacctacttgttcaataagaaaaatcatattattacttagactaaataagtgttttattaattgatttaataagctagaaactcaatttattttccattgcaacgtacgggctctaggctagtacaagaaaagcaatcaagtcctccatgcatgccttgctggatctgtcgtcaaagatgacttgattgcccatagcaaagctgcaccagattttgccttggctcaatccctcaacgaggttttggctttggcaaacctgatggaactcagccttaccacagaaatacactgtcagagtctcagagataaaaagagaaagcaacacacctggatcagcctaggagctgagccatagctggggcctccaaacattggaggtagaagcttcattactgcagttttttcaacgtagaagcgtgctatggttgccacctttaattcttgcatgccggagagggacaatatggtcggcgttaccaacccttgatccgatctgactatgacccaattgacgatagcagcaagaaaggtagagacatggtgagcaaactccggcaaaaccaccggaggcagtcgcgatggcgctatgatgaggacgactagcgtcgactacaacctcgagcaccaaaggaaactctcaactacaagaaaatttgacacacaggacaagtccgacgacggatctacaaagaaaaggagcccccaacctctcttcccccatcgccggcggcgaaccaccggagacgaggagggatcggagagggttctgagaggagaaggagaaaggagttatcgttgggatcaacatatcacttcctcgagaagatttttgtttaaaaaattatgtacatggctactggctacctttgctgtcttgcagatcgaattgtcacataaacgccacgtcaatgccacgtcaaatgaagaccgagtcaaattagcaacgtaggcgtcacgtcagtaaaaaccgccgagggacctcatttacactggttttaacaattgagagacgcgttgtatctggttttctggttgaaggacgaaaatcggattcgtcgacaagtttacagatctcagatgaacttattccattcacgaacggacgaacctcctagcagatcggccgagtcatgaaatggtaccaaagggcccagtggcgacgctgggctgggctatcaatcttttctgtcctctacctgcaaagcgtttgttaaatgcttaatatctttttacagacgcatatgcttccatatacagaaaaacacacactaattaatatacctatgcacgctctacctgtggaaactcaatatacacatgtacgctctacctatagaaactcctccaagagattaatccgggatattttgagattaataaagtcatcggagatgtttcattatcgatggctacgtcggcaaacacggaaagaatgaaaaatgattagttgtacatgaaagcatcagtgttaaatctagtacttaaatttaagcacataagtttcaatataagaaatctaaccggtttagtttaatatgcatgtttgcacagtccggcttacgaacactaaataattaattaattacaattgaaaaataatcgaatacatagattgccccaaatctgacagcgcttaaatgtgttaatagtaaccatccttttttaagcctctacttaggataaaaattcctctgtttagaccctccttaaaacactagcacaatcacaaaactaattaatggtagagtccgttttaactcattgaacgtcgcttaaattccatttttcaccataaactacaaagccgttttttatacaagagtaaaaaaaatggactttgcttaaattacataaagaaatggactttgacataacggcattagagggttattatgctacacgcatcgcacatacgtgcacgctagagggtctcaaaaaatatgttatgccaccatctttgcttttattcctgggagaaacatcatgcaggtgtggttattttgtatgagacattacatgaattgcatcgtacaaatatgagtggagtaatttttaacattgattttgagaaagcatatgataagataaaatggtcatttgttcaacagactttgaggatgaagggtttctctcccaaatggtgtgagtggatatcctcttttatccaagggggacatgctggtattaaagctaaggatcaaattggtgacaactttcaaacacataaaggtcttagacaaggggatcctttatcaccaattctctttaacatagtagctgatatgttagctttgctaattaaaagggctaaagatagtgattttcttaatggggtaatccctcatttagtatatgatggtttgtctatgttgcaatatgcagatgatactatcattttcttggagcaagatttacaacaagcaaagaatctaaaattgatcttatttgtgtttgagaatttatctggcttgaaaattaactttcataaaattgagttattttgttttggccaggcaaatgagtgttatgatcgatattctagtatttttcgttgtaagctggggttttttctttttaaatatcttgggatttcaatgcattttaggaagttgagtaacaaagattggaaagttattgagcaaagaattgagaaaaaaaacttagtagttggaaaggtaaacttttgtctgtcgggggtagattggttttgatcaattcagtcctttcaagtttagctatgtttataatatcattcttttagataccgaaaggggttcttcaaaagattaattattttagatcacgtttcttttggcaaggggatgatcataagaaaaaagtaaagattaactagatgagatataatttgtcaacccaaagaccagggcgatttgggtgttcataatttagagattcaaaagaaatgtctcttgagtaaatggttatacaagttaattaatgagaatggtgtttggcaagatttattgaagagaaagtatctttataataagtctataacacaagttgacagaaaacaaggtgattctcatttttggtagggactcatgaatgtcaaaaatacttttttaagtatgggttcttggattgtgaataatagggaacaaacaagattttgggaggataaatggctagggaatagggccttcagagataaatatccatctttataggctattgtcagaaggaaaactgcttctattgcaagtgttatgggctctgttccgcttaatgttttctttaggagagctttagttggacataatctaacatgttggtatgaattgtgtgcttctattgctcatatccagttggatgattcttctgattgttttagatggaattatcatcagaatggtcagttctcggttagatcaatgtacttacatttaataaataacggttacattgatagaaataagttcatttggaagcttaagatgccgttaaagattaagatctttatgtggtacttgctaaagggagttgtgttaactaaacataatctagcaagaaggaattttaatgggagtttaagatgcagtttctgtatgaaaaatgagactattcatcatttgttcatagattgtcattatgcgaagtttatttggagagctgttcagttttcttttggattataccttcctagaagcatatctgatattttttatggttggctttgggggtggacaagaaaaagagtaaactgatacttgttggtgcctctgctttatgttgggctctgtgtttgagtaggaatgatagagtttttgataaatcatcatctgtttcctatatgcaggtaattttcagagcaacatattggcttcggctgtgggctcaactgcaaaagtgtgaggaagatggagagttcttgaatgttgcatgtcgtaatcttgagacgacggttatgcaacttttcgccaaccatggctagagattcaccaacagactcgagtagttctctttgtcttgtttgcttttcttttattcgtggttggtatatttgctttattttggactaagctcttttagtgtgctactcttgtaataatgggatgtagctcttttgagcaaaggccgggatgtttcattccattatcttaaaaaaaaaatctttgccagatttttttgagcaactttcactatcaaacatgaattctaaatgaaaaggggcacttttccattctcagatatacttatcaccatttctttttacaaaaaaagatacttaccagctaccaccacactatatatttgcatccaaactttatagctaaattttattaatgaggttacgaatattttaaatataattgttgaagtctgttgcacgatatagcggtatagctatatacacaaaccttacttaggccccgttcggtagtgctccaaactccaactccagtgggagctggtgttgacggtccttaaatcataatatatgaccgtcagtacttgcatataatgaaataaaacatggtatccaacttagtggtaggtattattactaatcatttccactagtgttggtgaaatatgtgtatgcaggtaatttgaggtgaaaacacatccgtgatatgacaaaatgcacctctgcatatccaggacacgtttacacggattagaggctccataagccaataaaaaccatttagaattgggccaaaacatagtgcaggttattgggggcccattaagcaacctaccggccaaaggagaggccgggaggacactttttgggttcggccaaacccgttatgcggccgttcaccgtctgcttccacgtggatggcttggattcctcctctatggcggttgcagggtgttttggtcatttcccatacccctaaccatcatttggagcttatataaggaggtcttcactcttattccaagacacacaactttgagttgaattacaagaggctctattgtatcttttgtacattagaataaggtagagagtggggagaagcaccggaggagtgcccggaagtttggcgctcatccgacttctacctcaacgagtgtagcttcctaggaggaattctggaggagtaccggagctgtcggtacactctgctccgggttcggagaacttcttctataaagtaagcattcgtgttcctttcttatgttatttaattatttagtctgagtaagatatatttccatctttgcgggttcattgtttagtattcatactaagtgctctagtactaggactctggatagagaaggaagttcttgtgcaagtattagagtagtaattaataacttagacgtgttgtctaggttagagattacctttgtttgttgtgtatcccatggatttgtcagatgtaggcggcaggtggtgacagccttgaatcccgtccaagtaattctccacgttcggatacatcatagagctatagccgaaacaatgctagcagactagcaggggtcggcgcccgaagcaacagataggaaattacctttgcttagcttagataattaggtagattacacacgttccctgagttcgatatccttttggggtcacccgaaggtgaagtgctacagcggtattccgtgcgcttgcggatttatctatgatcgtaagaaataccaacaagcatttctggcgccgttgccggggaacggttgctaatttatccgagtctaggtcatactcgtatctttatttttatttcttcttctcttattcctttccttgatggagcaacccgcaattcaaaacctttctgctcctcgggctgatctttgtgagccgtcctgttcttcaaaaccaatcctttctgatggctacgaaatcagtcctggccttatagccatcattcgagatcaaaccttctctggtagtgttggtgaaaacccgtacctccatcttcgggactttgagctagtgtgttcatgtctatccatcgtaggcatgacacatgaaactctaaagtggaagttgtttcctttttctcttagagatgaagcgaaacaatggtacactttgtctgtcaagaaattccacggtaaatgggaggagcttaagtgtagattctgccttgctttctttccattaacccgtgtaatcaatcttcgattagacatcctttcgttctgacagaacgagaaggaatctctcggtgcagcttgggccaggttttcactgttaactcagtctggcccagacttgtctctacccgatcatgtgttgttacaacattttcgatacgggttagataaggagtctgccgcaaatctcgatatttcccccggaggatcgttcgcacacaagacaactgccgaaggaagagaactcttagatttgatcttagagaacgattctttcggccaaagcgaagccatcccggagatcgagattatccatgaggatcctctgcacatggagtcgaaacccgactcaactgtcgaatcctcattccagtcgctggagccggaggaagaagaaattcattccccggaaattccattccaattcaggggtgatctttatgaaaattatgagaataccctgaattattccagcgaaaagaaggctcatcccaagaatgagccgttcgaggaggtgatgtttgtatcttcgttcgtttcttctggacctatttcccatcttcatgaaactgaacgactctcatcaccctcgatcaagcctaagccttgtccctctggccctcagaacgtttttcttgtttatcaccaagaaacaacccgattcttgcacgatgcatcagttgtgaaggagaaccttcaggccacggacaagcttgagacatcgactctggaggacgagagaaaacattccacatatgagcatgaaagtttttattttgaaattccccttaattcatgctcgcttaagaaatccccagagtcctgtttgattagtaccacttccctgtttgaggaccacaaccacctttcggttctcatttctaacatgtttagaaggatggttgtggatgcttatatttatcataatactgcaaatctcgtacttgtttgtggcactaatcttgcagagcgatgttccgatggtcaagcttttgaccataaacaaagcactgtcaggagataccctggattatcatggtaagtttccttaataataaaagcaagaaccagttcttaggataatatgcaccttcgggtattcttggtcactaatcatttcagattgagattaagaacgagggtcatgcaatgcctaagaacacggtagctacatcaactgtacactttggtgatccttggtattggaacacactctataggagaatccgacatcacacacttggttttgatgtcttgcgacacaaaagtccaagtgtgggggggaaggtcgacgagcttttcatgacgagttccatcaactagggccatcttagtttgaagttggtgttagtcctagcttgctaaaaaaagataataaaacaaaggaggagaaaagagagacagaagaaaagaagaagaaaaaatgggagaagaagaaaagagcaagagagctgacgagctgcatttggatcaaagaccgcattatgtgcgtgtctttgaaatatggcgatacacctcgctagtagcaatcatgctgcctactcccagtccctctctcaagctcatgtgccaccttggtttagactttatccactcctagctagctgtgcacaacttctcgctcccgcaacacctacacgcatgtaggcaagaggagatgccctcttcttttctaggtgtttgctgctccactctagttggcacttgcatatttgcccagaaatagatgcatcctacgtctctgtgccaacgaatcacgccttcaaggcataaggttcttgcacccgaggtgtgtgcatgaccaaactgcttgcctgagttggtatggtcaaagcgccttcctccggtacaatctgcattgaggtggaggagaaatcaacaatcatatgtggccataccaccgctccagagatttcaacatacacatcatgttggcagtaagtgcactcaggtatacgaaaggcagaaaaattcaccacatcttttactcatacttatctctctttgaatgagacttgagtatacatggttatgtttcttatgtctttttgcgtatgctctgttttgggtgttttcgcgagacatccataggctttttaaattaagcatggtgcttaggttaaactagtctactttaatcaaattagacatggagtcgagtttgattaatgaactctcatagttaatttgttcatagacattggatatatatcttctgtggactaacccctgcaggaaagttttcaaattgatgggtgagtcctcaagttcaattcacaatagaggtaggtcagggccgggaacaaatcaattgctaacatgcaaaggagacacatatcacctatcaaggtgcacggtgcgtatattactaattgctcatttagcatgatcatgcaaatttacctcagccatgtatgagttgtgcttaaatgaaaatttggtgaataataaaaatttgaaaaaaaaatgtttcagaataaaaggactgtctctcaaaataaaataaaatcttggcaaacttgtgggatccatgcttcttaagttttaaatctaatttcattttagcatggatatgaacaattaatcttgaggctatgataaaatctttgtagtgcttcgagtattttttttttgtccactaaccttttgcaggaaataaaatgacaatcaaggagcagtgtacaataacttcaaacacttatatcacgctcctttgtccatgggaaagagatgcacatggaaccaagcagaacatatgaaaaacagtttgcattcaattgaggttcaaagcttggtaagacctatctgataagaatcctcaacaacttgtgcatcctcatcccatgttttcatcctgccaaatccatcgttgccataaaaaaagaaaatacaagaaaataaaacaaaataaataaatgtggctccttggtcttccaaccaagtgagtcctttttgcttcactcgtctttgtttttcttttttgtgtccaataaagagccccaggtacaaagacatgtgtgggggtgatcttgcacatcaacgccgaaaccaaagcaagatcaccctaggagtgatcagccatgacgaaccacacaaggggaattgatgcagtcagaaccaatgaggggacagtcgaacctccagttcaactgaaccacctctatcatgaatcgttctctgttttatacagggctcaggtttgcacaatttcctcgggacatccattctatcttgagtttaatttgattatcaattctaaaatatcgaagataattaaactcaagctagggatggtacaattagagttcatggtctccctgaaaataacatgcatgcctattattctttgctcattacttgtttcttgtagtgacaaatccaatagggatcccatgctatcaaggtaattgatgaatgtgatatagtctgatgatagaaatcttgctcttcatgttgtacacttgggaattttataaaaagaaaaaaaaacatataatgatgctaaattcctcattgatctttttattcctattagagccataggttgatcattcatgattagcttgctacatacgctgcttgtcatttcataaagcgttgtcaagttttgtgaccctagtgaaatgcttttcatactttcatggtcaagatcacacacaccccacatacacgcacatatgcttgacttatacactggaagttagcattcctcatttgtcattcatttcatccatagtccacaaaataaatactccatgtcatttgtgcctcttcctccaaagttctttaaaaaaaagagagagagagaggggcatggctatgaaaaaaaagtgctcatacaagtatggagcatgatgatgagaaaaaaaaaagaaaaaaaaagatagccatgcactctcccaaatttcaaaagagaaaataaatggaggaggaggcatacaaaaggagttattttcattttcctttttccactcacaaatttaccatacacatacacatgcacattcttgaccagaaagtatgtcttgtatttccgtggatccattattttactttgcaatatatgtgatgcaagcaatgctctactcttttccataccctgaactccacataagccttattagatggtaggaaaagaaaaggcacaatcatatgcctttgtgaggaatcatacactttgagtgatcgagagaatcaatggaggagcaaagcaaagttataatattcgtcttacttgaaaaaaaccccaagttgttcttcctgaaaagttagggtgacttgaatcaagattgttccatttctcaattgcccaggactgcatggtagacactacaaagatccacaagtacaggtatgactttgaataatttgtttgcatgattgttagtaaggaagtcataactctattgtagagtccatagccttcactcgggatgagcaaaggttaagtgtgggggtgttgttgacggtccttaaatcataatatctgaccgtcaatacctgcatatatataatgaaataaaacatggtatccaacttagtggtaggtattattactaatcattaccactagtgttggtgcaatatgtgtatgcaggtaatttgaggtgaaaacacatccgtcatacgacaaaatgcacctctgcacatccaagacacgtttacacggattagaggccccataagtcaataaaaaccatttagaattgggccaaaacatagtgcaggttattagaggcccattaagcaacctaccagccaaaggagaggccgggaggacactttttgggttcggccgaaccaaccagttcggccaaacccgttatgcgacctttcaccgtctgcttccacgtggacggcttggattcctcccctatggcagttgcagggtgttttggtcatttcccatacccctaaccgtcatttggagcctatataaggaggtctgcactttcattccaagacacacaactttgagctgaattacaagaggctctattgtatcttttgtacattagaataaggtagagagtgaggggaagctctggaggagtgcccggaagtttagcgctcatccgacttctacctcaacgagtgtagcttcctaggaggaattctggaggagtaccggagctgtcggtacactctgctctaggttcggagaacttctataaagtaagcattcgtgttcctttcttatgttatttaattatttagtctgagtaagatatatttccatctttgcgggttcattgtttagtattcatactaagtgctctcgtactaggactccggatagagaaggaagttcctgcgcaaatattagagtagtaattaataacttagacatggtgtctaggttagagatacctttgtttgttgtgtatcccacagatttgtcagaggtaggcggcaggtggtgacagccctgaatcccgtccaagtaatcctaatcctccacgttcggatacatcatagagctatagccgaaacaatgctagcagactagcaggggtcggcacccgaagcaacaaataggaaattacctttgcttagcttagataattaaaactcatagaaaatcctctctaacctagcctacctaccatcagttgaaaaattacctttgcttagtttagataattaaaactcatagaaagtcatctctagcctagcctacctaccatcagttgttgtccttggatagtcttagccttaggtagattacacacgttccctgagttcgatatcttttttgggtcacccgaaggtgaagtgctacagcggtattctgtgcgcttgcggatttatctgtgatcgtaagaaataccaacagctggatccaatagaagctgaggttggtgtcaaagtgtttggctagatttgtcagctccacgccacgacctcccttatcgacattttatcgaacaccttgtggcgcccctgccgcacgcacgccgccaccggtccttccacacgccgccgacgtcgctccgcactcgcgccgcagccggtcagccggcacacctccgacgtcgtgccgcctgtgacctcgcgcgccgccgcccgggccgccgccgcctgggccgccgccgcctgcgacctcgcgcgccgccgccacctgtgaccctgtgcgtccccgtcaccgcgacctgctggctgctgccgccgtgtgccgcttcaccactctgacgcgcgcccgcggacgccgccaccatagccctccgccggtcgccgcgtcgggaggaagacggaggaagagagagtggtcgggaggaagatgtggaagagagagaacgagggagaggtgtgtagaggggtagttcagtggtatttttgtgtaaatacattgaaaaattaaagtgttgtgggtcttttggggtgtagtcgagttgtggagcagcacaaacctagctccacccccgtagtacaaatttatggagcaactctgctagctccactctgaaaaataaagaatatgtaccatttggcacagctccaattctaggtaagttggagttgggagctggagctgtgccaaacggggccttagacagtgttcagtttccttcaaacttctaaaaattccgacacatcaaaagtttggacatatacatggagcattaaatgtggacgaaaaaaattaattgcacagtttacatgtaaattgcgagacgaatcttttgagcctaattataccatgatttgacaatgtgatgctactgtaaacatttgctaataacggattaattaggcttaataaaatcgtctcgcagtttacaggcggaatctgtaatttgtttttgttattagtctatgtttaatacttcaaatgtgtgtccgtatatttaaaaaaattggcacacaaactaaacacggcattatacgagggtcaaagttaccaatggtcaaagttttaaaaaaagtcaactctgtcaaaattacacgatgacggacagacagatatcaacttttgagcatccatgcacttttccctgactgtacatgtgtgtagacctgctgttcctatgcaagctaggacacgcatgcacaggccaagtttgcattcagcaagctgcttctatgtgaacaacaacatgcatgattggtctgaccttacgtcgacagtagatatagcctacaataatcatgtaccgcaaggtacaccaataattccagcaataatctcttttactcatcctatttatgcaaaaatactacgaccatcctaaggccagccacctttatagggtactggttctacaatatatatagggtgtccttaatagatccaacaaacagctttgcatttttcagaacttattgtatgccatattctagttaccagtgcaatacaataaaggttgaaaaattatggttgaaaattcaaattttgactgataaatataagcataagcgaaaagatgaggccgcaagatatcactacgtataaaatacaaattgacagcatttttaatgtcaaagaagagagaggatagattttatagaggcattaaattgcactaataccatggcgaaccattgtgaaagagagaacacaaatagggttccaccaatcctccaacttaagaccacacggaaaaatcattctaactttctctgcacttaacatctcaacatcatctccatcttatttatacgtgccttgtgttacttatataagctcggtgtagattatctacgagactacaattagggcatgtaggcgccccaacgagggtttattcatgcgcacgtgtgacagggagttgtcaagtgtgcaaaattcacaaaactacaaacattttatcaaaaataatacttaagtgtaattctaacttaatatccacaaaactacaacaataacaaacaatttttgttatgaaagcagatgcacaatggagacacattttttatgtgaaaaatccttacaaaaaacaagggcatgtcaaccttaaaaaaacaagggcatatcaaccggcaatgattaatatagagaagataattacaatgcatgggatacaatggaccattgtaacctcccatgcggcgccggctcttgcaaaagatatataaagaggaaaaaatagtaatgctagtaggtaaagaactattacattctaaaatacggatcatatatttaatgattttaatataaaactgtaactttgccctctttttatgattgatatgtggactcaatcaatcaaatggataacattatagttcctaataaaattgacatgattttgtaattggagccttggaagcggcacaactcgtgcaaaatgcagattagcaacaggtgtcgtaaaagcccaacaccactgataatgtttgcaggaggagcatgctgagctgctgcccagggccagcagtgtccagtgtcagcgggaacagagagctcactcacttctgaggctgagagagagagagaggatgggcctggatgatgataaagaaaaagccttcaattgcaacagagaggtgcttccgaaaaggaggacacacagtgatgcacaaaagattagggaggatgaagaaccaaagcttggtcccttccttgtacccttttgctgcccttgaattattgcaactgtgagacatgcagagctgaggggatgcaaggagcaatgagaagtgacagcaaatgctgccttcagagttttgttctactagcaaacaatgccattttgccactccctctgtgtttcagataattgtcactgccattgtgttaagactgtaagaattcaggatgaacccagatattgtaactcaaaagtgatcaacatggtgttgccacgatgataattttcaataaccaaaaaaaataaagcctaactcagtactggttatcttcgtacgttccaattggcttcactattagtatattagtaatagtatatgatgcttttgtacgaatttggtattacatgcaattgtactatattcttagaatcggttttcaaggatatacttttttatctaaagtaaaaaaaaacttattggctttgtttgatggtatagtccggtgatataaaacatttgaactatataaaaacaaagtgatcaatcaggagcgcatttgctatttgagaagtcgggtcaaaaatatgtggattttcatttaggatgttaaaaatctttgcgttgaaatggcactgaatctgcataaatcatatgagcaagattggccattcttgttttcagaatttatatatgtatatatatcagttgagcacagaaagcaaagaaagaaatgatgcatagcctgccttttgcctccttgaaatctgaactagacaccaaagccttacccatagtccctcccatggagaaatttacacaaagctaacaaaagtaacacacacccaattaagctttattacattgagcatgccagagtgacagccctgtaattaccagacccaatctctctgaaaccattgggtacacatatatcatatatctacacaaacttcaaaaaagaaaaagaaaaagaaaaagaaaaagaagaaaaattcgagcaattaaaaaggagcacaaatacagtgagcaatccattgctggttgatgcaacgcattgagtccatggtggattggatggattcatcgccattgctggtgtttcttcttcttcttcttcttcttcttcaacctttggtgcttcgccgcgatccggacctcgacaacgcggccaccctcctcagcaccttggagatcttggccaggctcggcttgccgccgccgccgccgaagctcatcttcctcgtcgagaacttgagagcctggaggcagcagagctgcctcaccgagccttcctcctcgtcgccgtcgtcgtcgtcgtcttcctcgtcggcggtcgcgtgttcttgcttgcgttcgacggtggctcgttcttgcttgcgtttcgccttgctggcgccgcccttggtggaggtggcgccgccgccgccgccgccgacctcgtaggcctcccagagcatgtccatgttgtcgctggacgactcgacgacggcgcggtcgcggcggagcttgagctgcatccgttcctcgtagagcttgcacgccaacgtccgcttccactccttctccttccgcggcgacccctcgccgacgacgaggaggtgctccgacgacgtccgcgagtgcacccgccgcgcgatcgacgtcgacggccggaggggatcctcccttggagattcttggtccgccgcgtccttgaactcctcctcctgatcatcgtgcgattcttgcagtcgcatctcgtgctcctgcgattcttcttcttcttcaggttgcacgccattgtcacaatcttgctcttgtaactgttcttcaggttgtgcatcattttcagaatcttgttcttgctgttcttcttcttcttcaggttgcagaaatttgtactcctgatcctgcaattctttgacaggttccacatctttgtactcctgatcttgcatttctggctcaggaagaacaattttgaggttctcttcttgccattcttcttcagactgaaccaccactacgctttcttcagattgctggtccttgctgcatttctcagtgcaggtttcagcttcagattgcacgcattctttcacatccttgaatacttgttcttcttggtgcatgccagactctgcaacagaagcaatttcttcaacttcgcatttttcagtgtaagctccaccatccaatttgttgcattccttgaaatccaggaacgaggctttctccaaactgaaatccaccgaattctcctccatttcatcaagaactttcttgaaattgccagaagcctgcgcctcccactgcaagattctccgagaaaccgaagaaagcgatttcgcgggaggctcgcatttcttgatctccactgagacagggtcacactccagtctcttctcctcaacgccatcactgaacccatcgccatctgatgacgaaccaaagctctgtcgctgaatgtcttgcaccgacgtgtcgctcctcgatgaacaattctctgaagaaaaatgcggagcacttagctggtttagatcctcgagaacgaccttcttctcctcgattccgtccttgatctcgtcaagaacctcttgatccatggagatttgggcgtcaatggcggcctgatgccatgggagctcgagctcggtgtggtcgaacagcacggctggcttgtgttctagaatgaggcaagaatcgccggtgtcgcagagctcacccatgatctcgccgacgcggagcacggaggcggcgtcgccggggccgaggacgaaggagcagagctgggcaaggagcgcgacggcgccaccgccagcgccgtccgggtccggcctgagctcggcgcggagcgcgccgacggcaatgccgaaggtccacccgagcgagcacggctccggcggcgagtcccccccgcggcgggcgccggcgcagggggcgacggtgacgaggacggcgaggaggagcgcggtggtggcgaggagcggggagaagaagcaggcgagcgcgaggaggtggcgcgcgaagaagagcgcgtacgcggcgtggagcgggtgggacgcggcgaaggcggccacgccgagcaggtcgtggagcacggacagcgccagccgcagcggcgcgtcgcgttcgaggaggtcgccatcatcaccgccatcgccgccactgtcggcgcactggcgcggcgccaccattgtcgtcttcttcgctcggtggggcgtggcttggcttcgtcggctagtagctgctacctaggcgcggccatgggtgccacggagcttggcctggacgcgcacgcaatcagtggaggcagcatggcgcgttgcggcgtggtgccatgtggtgtcgcacagtggcgatctttggcatggagggggaaagagatgaagaggagtaaaaaagagaggcaaatttgatgatgatgatgagatgagagagagtggctgtgtgcgggtgggttttgtggtgatttggcgggagggtgtggcagtggcacgggttcgcgccatgtgtaattatacggaaatataatactactagtaataataaggattacaaatggttggctccaccatggtttgaatcttttgggattttcggatttaaggttaccccgagtacatgtaagaaattccactgtagccgaaaatctccacattgttcgaatttaacaggaagttgtaaatttcaagaatttgcacgatgtcggatactcactccgttgaaaattatagaggtgtattttgtgttgttacaatctctccggctatagccatttgtaaatggttctagctatttgctctcatgtacaattaagctgctatatctgtttgagaaaactaaccgctaaatgtcttattccgctatttaaaacattgttacgattaggctttgattaataattactttaaatggacataatttttgttgcataaaaataatgtcattatttagaattatttaagattatgttttttataattggtccacgtctcgtccaaacgaaataaaataaattaaatacgtcttattttcatggccggagggattactattttagacatcagagtaactgattttggttttcctttgctcttgttcaggacttcgaggtttgccttcattcagcagtaggaattgcgtagctcaaaggccacgaagctcttgtacgcaatcccttcacgacaagacttcgtcgttcaaaggtcaaaacgttctactcctaccacccatttgaagtccaaattttaaatggtcctttccgtttcgagttccaaaagattgcaaatctttattttcaatgaaataattgcaatttttttctatgtctgctttataacttctgcattggcgcccgaattacagcacttcataagacgagacttatttaattcttgtaaactattttttttttggtctgaagctccatgtgtgaactacaactacaatgaatgctattactgtggaccagtacaaagtacagacactattacgggagtacttttaccaactgagacagacaaatgggcccaactgataagccgccaaaatgtttctgacagttcgtcaaaacgctctaaagcaagatgttttacgtacttatagtaattaatggtatttagtgtttgctagtatcccatggtttcaataaaggtaagtctaatggcgggtgttcgtagaccgcgaacacgttgcgatagcccaatccattagcccctactcctctctctgccttatcttctttacacactgttttctgtggtgacagggacaatgggaatggcgaagatatctctgacgaactccctctgctccttctctcgtgttatccaaacacaaattagcttcgatttcctattcctccaccatcaccgcctggccttgctggcgtcgaaaagcatcaatgtgtcggcacggctctgcctggtcggcctcctcccctacctgttgactcgctttgccccccacgtgcgaccgacccaaggctttggtggcatcgccatcgccattaccaccgcctcgcctcccacccttcctgacaccgactgcctaccacttgtgcgccatctcccatgccatgcttctaagctcgatccaccacttccacctcccagctttcccctcaggccctcccccctccacctccttgaccctaacactaaccctaacttcctatcattatgcggttatgtagtgtttgcaagatgccaatcacgtgcatgtttatgaattaggttttctttagcataagaatatcctagaaaaaaatggaggaattcaatggcgaatattctagggactgtttcaatggatcctttgtagcacatgaattttctcttagttcttacaggattgaactaatccatgtgaaagtcctgcaatttttttttggtaaggtttgtgttcctaaggaggccaagaagatcactcctttctacaaatctataatcttctttgaagcactgccaaatatttattattatcattagtagaaacaatttaaaccattgatttatggctattagtgccagcataaataaactattttactactgttaggtgatatggcagtgtagatagatatgtaccatatatctagaaaataggactaagattgattctactacccattagagactgctaccaaaattgttaattttcttatatttctcatgtaaagcattcagacatattttcagtaatttatacggttcagtttctcttagggcgttcacagtgggaggatgtgtcgttcagccttgttgccgagaaccgaatattcgacgacacgtcagccagccgcggagccaaaactggtcacacgaacttcgctggaatcgaggtatgcggcacggggagaaaggcgggggcgcggcgttgtggaggtcatcgcctcgtcgctccgtggtttcgcgcgctgccatgatgctattcccctccaacgttctcctcctctcggtcaccggcgaggccaccgccccgagcaaaccgcgccgagcccccaaaatggtgccactcgccagatccggtgaacttgaggccggatttggtgagcttgatggggcggcgccagaggaagaggaggcggtggcggcggcacctaacctcgctgttggcgccggaggaagaggaggccagatccgccccgccgagttcctgccatctctcgttcgtagcgccgtcgagctcccgcgtgtcgtccttcgctcgtgtgccgccgagctcccgccatcgctggcgccgcttgggctgcgccgccgccgatacctacagcgctgccgagctcctgtcatcttctgctcgtgcgccgctgcccgttgccggtaccagcgtcgctacgttagcctcgcttcctccgctaggggaaggcgaaaagaggggcgaaaagaaggaaggagagagatggtgggacccctggcggaggcgaaaagaaggaacttgagagagatggtgggacccgcgacaataaacctgcactgcgaagggtgtggctaatagtgttcctaatctaggtggtatttgaggaacagtgaaagtgggtgacgctctgtgaacgctcttagaattcagtatgtcagtttcgacatggcctaaaggtgctattaactcacggaggaaaaaattacagtcaacaaagtcacttaccgcgtgtcattacactgtcaaggtacatcacctgtctgtctgagagagagagtgtgtcacttcaatgtactgccatggtacagtagtagtaacagagacgctccaaaatataaaagcagagaaaaagaaaaaaaaagtcatcagaagctttttgcttggccaaattgttcctcattccaatcctcattcctcaactaccttatgcaagaacaacttggacagaacaacaaagacgaattaacaccaactaatcaagcccataatgctgccataactctgcattaaaatttccctagcattgtcaaaaaggcctagagccgtgcaaccaaaaggcaaaaggttagtggttatagggttacatgttgtcaaatttcatttcccagagatcacggtgatcagtacctgccgatttggagtacacagagtagggtgataattgataaggtcacccgtaatggttatttataggctctctacaagagattcatatcagcatatttttctacttggaagagattaaatgaagagagagaacaaagctatctactaacctggagatagtctatagagaaaaacgagacaatacattagagagttatagatacccatgtagacatactattgaggtggtttactattaatctagtctattgctgagatgtatatattttatagagagcactttaatttatcattgtgggtgctctaagactcttgtttttctgaatttcgtcgctaatcagtagtactcgcttttatagatttgtaccctctgcctctaacctttttgttttccgccaaaaaggtcaatatcaaagcaaataattgaacttagatcagtgaagatttcgagcacatgtcggcaacagttagcgcctcacaatgtgttacacttcgtcgaggtcgggtagttcttttaccctaccgaaatttgataatgttaaaacctttatccatgtatttcttcttcttgtttttttttggtttgtatgtactgtcaccaactcaccataaaccccagatcagatctatgagcaagaaaaaggaaatgtctaaaacagtgtcttcacaatgccaatagcaggaccagcaggcaacttacaaacatatagcaatgctccatttcctgaagagaccaaccaaaatgcatggccgtattgggaagcagttcctccgacgtagagtaaagatggacatgtgtcactgtcacgtgggacccaccctcgtgagcccacacgtcagttggcagaggcacaagtccctctaattatggggccggccgtatggtgtgctacatgtatccgttcccacggcttctcctgcctgtgtgaccactgacgcacacacactgttccctgcagcttcaataatgcaactacagatgcagtgatcctggaggtgtgcctaaccgtagacccaactgacaaatgtctcaataacctgttggttcatttcgggtgtgtttagtttctaaaaaaggttggaagttcgaagaaagttgagagtttaaaaaaatttgtgaaagtttatgtttgtaggaaagtttttatgtgatatgatgtgatgaaaagttaggaatagggggaaactaaacgcatatagttatctcaaaatatagttattgtagtacagtgtgctattttaaaatagagctatttcttttatttacttcttctctcgataaatcataaccattagccatttaattgtttttatctattttttttcttttcaaccaattatattgtttctctaatcatttctacgtattttttttaacatccgtgctcatctaagaatgtttgtattttaggacgtgggtggtagtaggctagtgatgacctgactgttcagctgcatcaccaatcaatcaacaagttcagttatgtgtaatggagacttaaccaacctaatgatttacctgaccaaacagctttgatagtatttgtttactacctacattgttgggtagagatgtcctgatgatgtgtggtcattcagcaactaaaaatcaatactcaggccagttttaaattttttttttccaaaaacatcacatcgaatctttggacacatacatgaagcactaaatatagattaaaaaataataattgcacagtttccatagaaaatcacgagacgaatcttttaaacctaattagcccatgattagccataagtgctacagtaacctacatgtgtaaatgacagattaattagacttaataaattcatctcacggtttccagacgagttatgaaattagttttttcattcgtgtccgaaaaccccttccaacatgtgtaaatgacggattaattatacttaataaattcgtctcgcggtttccaggcgagttatgaaattagttttttcattcgtgtccgaaaaccccttccgatatccggttaaacgtctgatgtgacgtctataagttttctttttgcgaactaaacaaggcctcaggtctctaaacatctcttggtgaattgaaagagaggacaccatcatgggccatctcatttggtgctggcaggtaatataatcttcttgtttctaccacatttattcacatttgaacagtagcagaggagaattgtttctgaatctgaagaaactagcaggactgatacctcagggccacagttctttaagtatttcacctatcaatccagctctccaacttcgcttgcaagaaaaacagtacccaaaacatggcacaattccaacaaacccataacaccagccagccaaacaaaccaagaacccttcagcttgagcttcactacctcttcacatgcaacgtggcctcgtcgaaaacgacagcgacatcaccacacatggcagcaaacacacaaatctcaggccaaatgatgccatgcaacaatgcatcgaattagaaggcttaggatgccattcttccatgcaacggatcgagacggacgaggagccggcctaaaaactcacttttccgctttcctgcctcctcctctagaatctctggatacttgtggcctgcttcgaccctatatggacacgtaaaacgaaaaaaccattagcatattattgattaagttataattattttaaacttaaaaaatataattatctaatattttaaaacaacatcttctacgaaatatgatgtttaactgcttaaaatcatgttaacataaattgagataaaatctatatcttatatctaagagatgggagagaaaatgagagatgaacaccatggcagtggcaccccacccctggtacggatgcaccaaccaggaacaggatgatgtctggaaaaaaggctctcaatcatatgcatctctcattgatcagagaggatcagggattcataggtagctgagggatccaatccatctcactgtaacagcaacagtcggtgcacgttcaaccagagcatccaaaattctacaggctagaaagggacactataccgtgcatgaaaaatctcaggaagctttcgttttaagctagcgaaagttcgtttggccgagtttagttccaaacttttttttaaactttcaattttcttatcacatcaaaacttttttacacataaaatttcaattttttcatcacatcgtttcaatttcaaccaaacttctaattttagcgtgaactaaacacacccttaagcatcaaatgctgtttcaggagatgctcattctgtcatcacaggcttgttctcgctggccttgggcctctgctcttccattttttctgtcttgagaaagggcagtgaaaagttagaaatcttgatttcaagtgagcacatccattataagtcatgtaggagttcgtgataacatcaagggagagagatattatatactccctccgtcctaaaatgtagcaaccttatattagatgggaca

SEQ ID NO: 10253 - DNA, 3033 bp, Oryza sativa
acccggccggaccgcccccgcgtcacgctggccgagctgggaggctcgctggtggtggccatcgacgaccaccgagctgccaccctggacctgtggttcctcctcgccgccggcgacggcgagcagcactggtcgaagcagtacacggtcaccatgccgtaccaccggcggccatggcggtgcgacggagagagggcggagccagtggtggtgctcgacgacgggaggatcgtcttctgggtgtgggccggcggcagcggcgggacacggcacggcggcggcgtgatgcgggtgtacgatccgatcaccggcggccacaccgacgtggcgacggcggcgaggtgcgcccacgtcggcgtgtacacggggaacctgctgtccctagtgtcggagtagtagtcagtgagctctctgccgataatgaggtgcactacgagcaggtgcagactataagccaactatagacatatatcgaggagatgaaagaagagagatgagcagtggggctacagatttgtagccacctgttgcaacatgaaccatatcgaggagatgaaagaagagagatgagcggcagagctacagatttgtagccacctgctgcaacatgaattccaagacgaaatgtgtgtatgataggtgggactagatattaatagtacattatatatttataggtaactattatatgaattggctattaaattgactatagatgatttagagacagtagttggctatactattaaacttctctaagtacttacgtgaactttctaccattgcccacgttcatgtagatgttaatgaatctagacacacatatatatgtcgattcattaacatatgaaatggaggacgtagtacatacaattagaacttcaatttccaacggctacatatgtttactctcgatcaagacctaaaagcacaccctcgaactggcctctctttcataggaacccagtcttgttcgagtcaatcttattgatggttagaagcagagttcacactttgctctaaactgatgtctagccagtagatagtagagaggaaggctaaatccaggttaatgtcccgtcgctcaattcatctttttcataataagatttgattataccattgagagaagtgatggattttatagagatacgcccataataagtatattgattccttatattcttatatatctatttgatgttttggtcatcaaaccattgagagaagtgatcgattttatagagatacgcccataataagtatattgattccttatattcttatatatttatttgatgttttggtcatcaaatcggtcgatgctatactaccatagaatcatgtctaaaaaagtgaaaactatttacaaatgctattatatgaatgtgttttttttattgataagtcaattaatatcatgttgcaaaattacattatattttgtttaaaatttgaggactgactacacacgtttgttctggggcaggcgtactgtcttcaccagatagactaatcgccaatgtgccccactaatcgtgcaattttgtgagcggattaggcagagcagcaaagcaacaaaccgagagaacacaaatagctcgcagaaaagttttcagtaacttgtaaaagatcccaggaagtttatagtaacttgtaaaagattaggagtatcaaaaaggcaggcacgcatcatgcaagattctgagccatcatacgatggagaaaagtacagcagctcactcagtcgccaagcaaaataaaaacagattggggggtaattcagacataggagacaataatcttaacaagttctcagactcccactactaacaaagctcttcttgctaacacctgagaaaatcttccatgtgagatgaatatctctagtagaaaaagccgagcaccttgcctccgacgttcttccgcctcgcttcttcgtggtccatgattccggcagaggtggtaaggacaatgtacccaaactacataacatatcatagttaaagtcagagggcattttcacagaaataactgaagctaagtgatgaagtatttctcaggcgatgtaacttaagctaagtgatgtctcttgacaagttggtggtttcgattttgtgaactaacctgacgggagggaagcagcctagcagtccaggactcgatttccttgacaccaacatcaaagcgtgggctgatgacaccacacttgttaaggcgtccattcagctcaaccacgatcttgccagaccggtggtcatcaacaaactcaaactcaccaatgtaacctgcagtcagaaatgtaacagtatgggttgtggcatgagtcctgacatcattgtgtataaacaatcaatcacagcttcatgtctacagatcagtaacagtacacgctgagagaagacataccatgcttctgcatgacgatgaggaacttgatgatcacctttgacgagggccggataagaacttggcgcttaccacgcttctcagcattgtacatggttttcagagcgtcattgaggacactgactctcaccatcttgtctgcaaaatatgagaagaaatttgtattacttaaatattttgttaacaacaaacctaaagacagtgcaactaccaaatgtttttccattgtattttccacaggtagaaaatggtctaaaaatagatgatcactaagctcaatatgacagatataattatagacaaaacaccttaactacaaataacaatcacaaatgcatgtctgttttgtgatgagtgtataacatatacatgcaacacacaaataatcaaggatcacatttgaggaatggcctgaaagaagttgcctaatggtaatcataagcattttacatcataactgttatcaaatcaagtaattgcaactactatcatgggcttcttcagaaaacagcgatctgatcaagctgcaggttcttgagcattaagaatccaacaaagaaaagaacatatctaagcaaaaaccagaccaagctgccaatctgacgatgaaaaacgaaatggctg

SEQ ID NO: 10254 - DNA, 6412 bp, Oryza sativa
agatctagctaggggtgggcataaaatcaccgaaaaccgaaggccgaaccgaaccgaactcttggttttttcgatagtcggttcctccttcagttttatttctccagtagatcggtcttcggcttctccatcggtttctcatctccaacaactgaagaatccacccatccgtacaaaccgatcaatctctaagatcccattcccctacgtgaaaacagcattgtctaagcctttgaccaatggaaaagtccattaatagcatccatttctcattaaaacccgtacggcccatagccaatccagcccatccgactaccaccgtggcccaatatgttgctacgctgcttgcaggacttcagcctgcggcatggcagaacaggtacgtacctttttttcggcttactcggtaaaccgacgaaccgaaccaaaccaaaccgaataagtttggttttttgggcgcggtttattgttttgttacaaactcttcggcttagatttgtctagaaccgaatttctaaaaaaccgaagaaaacgaaccgcaacatccgaggaaaccgaacgctcaccttagatctagccataagaatataaaattattttatatcttatgcctttttaatgtatcttggtttgaatccttcatactaaaaggatcaagcttaaggtcaagagaaaaatcttaaacattatagtattacctataggtaaaaagatgtatgcatgtgggtccaattttatgattattgtgtatctcatcattgatgatgcctttaggccgttacattgttatatttgtattaaaaaaactttaaagaatctgtgatatccctgacaattacttttattcttgagtaaattgcattgccggtacacgaacttgtcaggtgggtgcaatttagtgcacaaacttgtaaaatgcttgttttggtgcatgaacttgtctagtgcatgcgggggaaggcgaaaaggacactgcatggctaatcttattgatttagaagttgattaggatgctatgtagacatatatcaaagaaggttgctattagacatacacatcttcaataaaaaaatagaataggatatagtaatagtagaaaaagattaaaaaaatccaatcagtgataaaaaaatccaatcaggatatatggaattcatcatttccatgatgaagcataaagtagagaccaaatttttaaatattgcttttcttatgcatactcactacatgtatgcacgtcacaatttctaatcaacatcagctttgtaaaattaatattgccaagttattttggtccttgttcgcacgaactagaaaagtttgtgtactgaaacgagcattttacaagtttatgcactaaattgtacccatttaacaagtttgtgtaccgccaatgcaatttactctttattttttatacagtattgttcaaattattacattgttacattgttcacatatggagaggaaagatatccttaatgattattgttactttcactagataattcatgatggtctacattaatacaaataaaaaaatgtcgaggacaaattggccaggaaatcaaatatgttgttttcgaggacaaaaaaaggaattttaccacatcttgtctaattctttggggcttatcacatgagtaaaaaatgaatcatctcattttattttgttttacataatgcaacacactagtacaaaagcgtttatcattgccacaattccagactgccaaaattggcagtgaaacataggcaatgatgcctccagactagagaacttttacggtacattctactgctagtatatactaacagtatatactactgctagtatatactaacagtatataaaagggtagatttggtatttgttaaaattctgaaaagggttgtttagtcatttaaaatagagattgtttttttatcacaaatagggattagctttcccgtggatttttttccctggatatcgtcaattcgtcatccgcttcttctcgttacatctggcgacaccggcgacggaggctgggcccatcttgctccctccctggcgcccttctgcaccttcgcctggtctgccggccagcgccctcccgtagacccagcatccggcgccgatttgggggattttttggaaaaaaatggggttttgggtggacggaaagacacgagagaaaaggagggaaatcgaatcgatttccgatggcggcggcgccgattgtggctgacggtggcaggggcggcgccaaagaaaccagcggcggtggttgcaagccgagcggcttcggtttcgactggtgccgggcaaacggatctgactaagtgagatagcatgaatttacaaaaatacccccatgcaaaaagataaaagacaaatttacccaattcaatttatactgcaggatagttaggaggaaaattagatgaatttacaccgttggatcaaatatactgctagtatatactagtagtagaatgtaccataaaagttcccccagactattactgccggtccaggaaacgacagtgatagtgctcctagggtgtaaaaatgaaaatgaataaagaaaaaagacctcatactccccataaaaccacttacgctgccacctcgatgatctatatcacctccggtcctgaagcctttgttgaacacccacttgaagttttgccgcttaagattcatggctctagagactatcaccacctaacggctgcaccgccattctttgatttccaacaacactacgtaccatcggctcatagctagatacctcgtggaacagggaaccactgtcaacatctacccatggggtttataccaataatgggtacaaggaaaaggaggcaggggagtcgaactggtcgacatggtgcttccttattgtgcccattattggtctgtctatgagttctccactggcctaccatctagtgtgctctaggatatcttcatctcgcctccctatactttcaattcgtgccttcatccctgtccagatctggccaaaggaggtgccatatatgtcagttgactccttttttaggcactatcacagtcggtcacctgaagttttatgattttacggagtcatcaacatttttaaccttgacaagctttggtgttacagaatcaccaaccaccttgatatctagaaactcctgaacaagatgggtttacaaatcaaaaccggctagaagaaccgattctaatgaattaggggtaaacatccatcttataggtggaacggaaggtttttggaacaaacttataaagaaattcgcactcctgcgacaagaatgaacaacttacagcggaaacctacttgttaaatttacaccaatcgaacaccttaatttatcagtacctttagttttgcagaacttttttcaagacaacaccaatatgcattatcacattgtagttgcaaacaatagctagtgtttctttataacttgttataataggagctaatattgcagaaacatagcttatatatcttgcatatagtgatgttagtgacagcagccatagatgcagattaagagaagaattctgacaattctatatatccacagaatggaggagataacaggatctgaggtggagaattgtattttgtatatatcttatttcttaaaggtgtacacatctcaaacagcaatgcgttctactaccatttattttgttttatctatagaatcctttcatatggatttgtcccaaactttttctctcccagaagaaaagtttcaaaccaggccgtttgtaaatacatcactgtataaatattcattatttcttcacatttcactcttgctgtcacttttcaggaagaacattaaaatatgtcggtgcttacattaggcattattgctccatatattcatttttggaatgcaatacttggcattaagaaaattgaaatatgaagaaatgacatcttaccaccgatgcgataggagcaatgttagccctttaacactgtgcaacgaaccgttcacgataacttggtttaccttaaaaaatcctttacaattttgttccattggcaaaggactaaaatgccagaaaatacccgttaggaattatcaagctcaaatgacataagtccacactactgtagtacattctgtacttcaaattttatttgtgtttaatgatcccttcctcctggccgggttttccaagagagaagacgactatttaagccgtctaaatctaatccctctcagttttagcctgagctcctctgcaatcttgacaataacgaagaatatcatcctgtatgtcaccatcatcccaaacaggatagcaaggtttacccactttgaatagcccatctccacttgcagcctttccttgagaacctgaagaccactgatagtggcattggcctcgatgagctgatcacttggaaaagacagccctatgaactcattcttgtaaaacccctgcaccgcatacttgtggaaggagatgtagtagcaagggtacttccacaccggcttcgggagctcgttcgggaggcggaagaagccaccattgagcatcatcatgccctgtatcccggcaccgatgatgattcccatgaggaagtctgggacgatgactgcgatgatcatcatcatgctctctaccagcagcgtgcacatgcagagtgtggcgacgaagtatgcgaagtgttccgcacctcgggtcagccctgtgaggtaatacatcattgctccggggatcacagcgatgacggcaaggtaaggggtggctgagagggtgtttgagattacaaattccatgactccgtaatggccgctcaatctctcccttctgaataactgatttccaaaaaatgttctcaggagttatggtatgatttatgcgttattacagcggaagaaggaaaacatttatatctgtttgacttcttgtttgaacaaagatgttattttttgaataaggaaaataaaatactgttttgttttattagtacaagaagaaacatttcctgttattgaaaagtatcactatactgttttcttctaataaattgtaaatccagttcctttgtattttaaaacacaagtgtaagatgtcactcatattgtttcttctaaatataaatattaacatatatagagacatctggacgagtgctttacatttagttttcccaaatataaatcagataactgtaacactgagaattcaattctacaagagaaaataattagtgggatttgaaaatataatagttctaagggaaacaatgttgcagaaaattccagtttacatcaggatagaacattacctttatgtcctctacgaaagaagggaatcctccaattgccatgaaagttacaagcgcggttgtatacattattacttcacatctactctgaaacatttgagcaagtatatcaatacaactgtacataacacggattatatgtttccctaggtaaaaccatatatttctaatgaatatttattacccaactcacctggatagaactgtagctgtaaccaacttggtagaagatggtgccgaggcaaatgccaatgcccaaataaatgcccaaacgcatccagtagtagcctatgtccctgtgcatatttaggaaggatcttcttgttagcacaaggagctttgtcaagaagctggcttgctctttccttctaaatggagttccaccctgttaacacataatacaaaagcaaatatatatctatgaggccatgaagcatcaatgcaaacataataatttaacaactaattatgtttcaaacttctatgatgtacttttagtagctctatcgaaacgaacgattaccgtgagcatacgcaaaaaaagaaaaaaaaactataatatagatttagcggttttactatttgaaacaatgatgaagtgacttcgataaaaaaacagtatttagtagaaaagtattgtcaaattgaaaataaagcaaaacacatatttattgatagcagttaaaagaatgactttttggagaaagcaaactttcatatagtaggttggcaaaggcaggggacatgatcaaatataaacagtaacaaaatgcaatggtgaaggactgcatgttcattgaaatgaaaactggatggttgtaagaattggtctataaaaattcatagaatgctgagtaacaattaaattttttatttattcataatttctttatatatataccacatatccgtccatagagttttatctgtgattacagagtgccctgtgaacaaaactaagagcatgtgtcggtgacatggggccgagggtatcgtgactagaggcttgggtagccgcggtcacccacgtggcctgaccccctcgggggggtcgggcccgaggatgatgtggccatccctccctctgtctccccgagggg

SEQ ID NO: 10255 - DNA, 7932 bp, Oryza sativa
ccggggctcacctaaccacatttattgcgggttggacgagcgcgccacgccgcatttaatgcagcgcagcgcacgcttatccggtccgtgaccggtcgcagtgtgtgaccggtcacagacctgtcagatcgcgggttaggtggcaacaggaggcctgtcacacgcctcgccccggcctgtcacacgcctcgccccgtcccgtcggaatgatgagagcctccaggcactcgtccctggccggagccggcgtgctaactcctggagttggtatgtcagtcccggccagattcattccaggcttcatcgcaaccatggcaaggaagtcattgtatgaagaagggcagacgtgcggcatgctaaactgacgcgcggtggacaagaatgaccggtctgtgactggtctgacgccggtcacgtcatcggcagacaaccgtgctcccacgttgcatctgcttccggcggagtggaggtaggtatgacccatcccatcggagggttattcggacagcggccattgcaaatctccacccataatgaaggaatgacagggttatcccctgtgtcaggcgagtgacggcgctgggcctcactcaaggacaagctgtgatttagcttccaggcgaaggcgcgagccaagttttggtcaagatagggtgggtccccacccaaaagaagagtaggtagaagtggtgcatgtggtatccccttgagatataaaaggaggaccttgcccaccgaaggaaggggggactctcagacgactctgagaatacctgagctcgtagagaagagaaagaggaagaggggttctagagcctgaactctcttgctctccggctctctgtaactccttcacacatagatccaccagaacacaggagtagggtattacgcttctcagcggcccgaacctgtctacatcgcccgtgtctcgtgcatttgctctctcgcgaacattccacagatcgagggtgaagaacctcacttagcgcccccggccgaaccggcaaaggggggcctgcgcggtctcccggtgaggagccccacgctccgtcagcatgctatctccgttccacattacaagacgttttgtcctcttcttctctcatctagatttactaacatatccatatatatgaatttggacacatatataaagacatatggatccatgcatgaatctattgaaaacccaaaacattttataatgtgaaacaaaggaagtatatcttaaagaaaattcaactaattaataatcgtaacataccatccctttcatctcaactatctcattggctgttttctctgaataagtggagtggtatgcatttgttagaatatttgttgcttcagctgctgtttttctgttagccttggagctttccatagttccctacatacattgtaatgctaagtaaataaatatacttccaacagtcctggcagaaaagaatgttattacaacatggttgtcaaaatatgataataaaacacctatacctcatcaaagtccttgttgattgttctcaggaagtggtcggatgggttcctcaggtgtgggcatggaaaaccactttgggtaaaaaactgaaatagatgaatatagatgtgcaatttcaagagcaattaaagagattgtggttattagttacaaacatagttgttaggctgacatattctccctctagtcgcactgaatggaaaatacatttcggacactgatcgaagtccaactttgctaaatgcatatgttttcttatttacgaatacaacggattctagtttcttttgaagagattaagaataaaaggaaaagactataatgtccatcattaaatgaggggtagttaatgagtggagcgtgtttatgtgtaaaatcgggtgaaaattaaatgaggggtggttggatggaaaagtagtacctaaaatctaaaatctttgtgaataaaattttaatcaaaagtcaaaattccagtgaaaatagatagcatacaaaaagagtgtcaattaattacctcagtagcattagaaactgtcccaaagaataccatcctcccataggctagcaataagagaccatggaagaggtcaaagacgtcgccactgggctggtgcacagcggcaatgacagtcatcccttccctggcagcgacccgggtgatgtggctcatgacgtggtaggaggcggcgctatccagcccgctggtgggctcgtcgaggaaaagcagccgcggccgtgtcagcatctcaatgcagatgctcatccgcttccgctgcccgccgctgatgcccttggtgatacggccgccgatgcgcgtgtccatggtgtcgctaagccccatctcccggattacacgctccgcgtgggcgcgcttctctgacgccagcatcgtgtcaggtagctgcaggtgagccgagtagtagacggcttctctcaccgatagagtcgacatgagcacgttgtcttgggttacatatgcctacacaagaattataattatttttttagctgacagtaaagaattaatattttttgggctgtgcacttcatgtacacatctatatgggctgatcagtttggcatgataatgcggtgaaataaaattcctcacagaaaaaaaaacagagacgagagacaagcctcacctcctgtgaagcttaaaaaatattctttgttaagagtttcattattaattcatgtattattgtatataattattagctaattgattattacagtagatattttgtcagtgtagtatgcaattacaacaaagtgcataaaaggcagcaaattaaaagcatggctagtaattaaccttgacctttcccgagataaatggttggaaaatacaattgtgagtgacagctgatataatgatttcttaccgaggttccgaaggcaagcttttcctgccggccatttattaaaatcacaccggtttgattcatttcttgtcctaaccgtcctgcagtgccataaattcatcaatggttaaaacgagagatggagaagagtatggagacgaatagtataaatttactaagcattataatcttgcatccatgaacaatatatatgatttatattgtctgctgccatcttgtttcagcatgaaaaaatggaaaaaaaatgctgaataaaagctacacttggcaacattatgtctaacatgaaataatatcataaaaaatgttctttatgatattttttttagataaatgttttttatgatattatttcatctaaactaatcaccaggcgcaaatatccagcagtccaatagagggtttattcttggatatttatcgacaagatactacagaaaggatcgtcgaagatcaatagtaaattttagggtaaaatttatttttaagcgagggttagtcgaagcgaattaaaatcatatgaaaagtcactgtctctctgtttggaacaatgtacagtaacaggaggaggcaaaaccgaggaagaatttcttgcaccatttacttttgcaccaataatgtcggaaaataaatgtccagtaaaagtcaatatttacttttgctatgttgaagaatgagatgagacgaaattccttcatctcaaaccccaattatctatcgattgtgttaattttttacattttctgttatacggctgcattcgtgtactttgtgttcttacgttttgtcttccattccaaacaagctcttaatctttgaaatttgctcaaagtctatttttaccttaaactataaaaccggttttttttacccccaccctccattttttaaactagacaagaaaaatactatgataatatttttattgattttgcttgcaatggaattgcctttcctagttcatattgacattgcactcattgtccatgtagatgtcacctaagtaggcccacaattacgaaacttccctaaattaagtttatgtgagaaaaaaaaaccactagctctagtacatcgatcagaaatccatatgttttagacccaagtatatggttttaaaaagttgaaagtgagaaataaccgtttctgtaattcaggatgacgaatggactttgagcaaagttgagggcaaaaaataggttttaccctaaaatttgtagctgcccacttccctctagtactcactccttccaaaagtctaagtcctattttattctttaattttttctaaaagtctaagtcctatttgtagttattatatgctatattaaacttttgatcggaaccgaagaaatcattttaatacttattggttgcatgtttattagttttgtcataagatgaatgagttaactataccttggtcttggtgcaaaaaaaaaggacctagactatttgaaggagggagtactaacgtacatggtgtgcactcaggtgaaagtgaaaaaaatactatgcatccattttatataataagttgttatgatattttgctagtcaaacatatctaagtttgattaagttcataaaaaaaatttaaaaaaaatataataccaaattagttccattaaactaatatttaatatattatgataatatgtttgttttgtattgaaaatgttgctttatttttttaacaaatttggtcaaacataacaaagtttgaataagaaaaaagtcaaaggaattgtaatatgaaacgaagggagtagtaattacacaatttttttataaacaggaagatagcccgcgcgtatgcgcgggcatgtatcatgattatgttttgatgaatttatatgggtggaatatcaaacggatggcatataccatgcttcataagttcgttttcctcacaaatttctttatcgttttggtattgctcaaataaattttctaagctatttgttagctttatactatatataatagtacttaattcatctatacaactaaatatttacagccttcctagttatttaaaaataaggtagacttaattagtttgtttgtttaccatacatttctaataaattaagtttggataaaaagtaaggtgtttttcttttttaattgaatgtttagagccttgttttacaaatcttaaaaaacaattattgctaataaatatgtttatttgtactatcaagctagccctttctctaatttgttcatattgacgtaatttgttacacatactttatatgatcaataaatgcgaaggagatatacataatctagaacttgcttccctatgatacgtgtgacctatagagctttttaaatatacctagtcaatatgagtcttaaattttaaatctaatactaacaaatattacttttaaccaattagatattgctattttagtgtgaattacatatataataatacatgaagtaactcataatgccatcataatgccatggcatcgtagatagagggaaggccaatttaattgatatggcaacggctgtttcagtttaagtgaaaattaaaaaccatttctttacaaatttgttagatgttctataattggttcaatttatcccctattgacaattttttttctattttataccagttattatgaatcttaatttattggtttaattatgtatagatcaataattagaatagatatgagacatgtagcttaatataactatggatgtttcgatattattggttgtttctcttttatcattgttactccaaaagatacagagagaagaggagagcggagaacccaagcctaaaagtggagggaacggaaagcgttgtgcgtatgtgatggtgagggtgaggtggaggggactttgtttttctaatttttctaaacgatttaagttaaaaccgattatcatgtattttgttttttaaaaaatcttttttaattttaaagacatcacgatgacttaaaacagatcagatcttagatacaccgatgtaagctggacaatttatcaagagactgccaaatgcattggttcaaattagctatgtaatgttgccgcaaatcatgcaaactgatttaattagctatgttatattgccgttaatctcctttcacaaatcatgtataactaatttaattagctatatatatgtataatcttagtgttaatctcctagcttccatttatatatattgccgtatatataataaatatagctatgagttagtggtaacacaatatgggagctaatcagcttgtgctacgtatatacagagataagttaattagcgataaacttgccgccgcagccaaaccgactcataaccggacgcgcggtatagcataatagaccgtccgagtccaccttacaaaaatatgggtcttttccctgtcttattttttttattaagatgaatctaacagtagagaatgcatgatgggtccaccttattgaaaggaaaatcgaggaaaatcgatggttagattttgtatttttagaatatttattattttctttgatttattaaagcgccgagtgacatcctagaagcgtttgtaggagtgacatatgacgattcagaagtgtttgtagaaaatttaatggacttttagtatataatagatatatacataagtagatagttttaaaaaaaacatagccctggattttcatttaaatcgatgcgtttagtatttaaatcattagattagattgaataaagaatttagtctcttcctgtcctctctctctcacctacgtacttctgttgaccatctatttttatggatgcatgtatttttgactgtctttttttatctaagtttttgtatgattctttttgtgaacagcaggtaattgctttcaatcgttggtacgtatgtaccagagaacagttatactctgtgtatcatataagtaggaggaatttattaattttttaatagtagatctaatctaatggtgtaaaataatgggtccaccaatttaagtgaaaattgacggtgagattaaacagtgccatgtgacggcttatgagtatttataggaatgtcacgtgacgacttaagagcgtttctagaaagtttaatggacttttagtatataatagataaatgaagttttgaaatgtttttttttgaaggggtttgttatctacatatttatattcatcataaaatttgatccattgtctttgtacgatcagtaaagtatactgtaagaacatttcgagtggtcgaagtgaacgaaacaacaaaagaatggactaaggatcggttaatctcatccttaagagcctcatcggttggattatccattatctttatgtccgctaatttaaacaggcaaacctctattttcttttgacagagttctcaattcaccaccctcgttttttgcgtgcacgtttttcaaactgataaatgtgagttttaaagttgttttaaaaatcatattaatttattatttttaaaaaactagcaaatacttaattaataatgcgctaatgagatactctgttttgtgtatactggaggtgagttcccaacctcaccaaacgaacaagaatgtcctgaaaaatattttgtaatttgtctattgcttctgtaattgatttgatatgatgaaatcaaggaagtatcttatgacatcttaggaactgaagctcctatatgtaatatataatattttaagagaaattgatgattgttttcttttaaaacaaagaaacgatattaggtattctttcccttttgaccggtgagagtatcgtttctgttcgggtgtacgtttctgggctttggaccacgaatcagtgcggtgtcctccacctgaagcgattgcatcaaggcactgtttcgtacttatacctgaagcgcgttggaaacgagaagttgtctgtgtttagttccacattagaattgaattgaaagtttgaagaaattgaaatgatacgatgaataagttggaagtttgcgtgcgtggaaagtttgatgtgacggaaaagttagaattttaaaaaaaaagtt

SEQ ID NO: 10256 - DNA, 51182 bp, Oryza sativa
  unsure (1)..(51182): unsure at all n locations
caccagcgaattgctccatcttctccaatggccaccaccagcgacgtcccagaggtaactccatgacactctaccttttcttttcttatttctcatattagatcaacaaaaccctcagtttacttcatttgcacctcgtattattcatgttcaccccttttactgttcatcttactgtagcaaatgagatatcaaatagcgattccactagccgatcatgcattatattattttcttggatcgatgggtgacgaggagcccatggaattcattaacgttgatacaaatcgtatttcatttaagcaatctagcccttgcatccccgattggaatataggcttcaaatctcggccctccaagctccccggctggaaaaactggtatcggcctatgttggaggccaatcatcaagtatggtatgatgttggtatagctcagtgccttgctctatcattagctgagcgcctgaaccggtgtcaaatcttatgatcggcaatataatttatatggtgcacaagatcaaggagatatggtgacttatgtgtttttactggttcaggtcctcggtgtgaggtaacaccctagtgtagttagtgtagattagatctatgtgggtgtgcacaacacagcgttggaatagcacgtgagcacctatgcagagaatgatgagtaacccttagggcttcccccggcgccccttatatagttgctagggctcccggttggatatggtaaggttatcatcataatccatgtacctaccatctatttacatgggataggattagttgccttatcctttacacctttcttagtttacatgtaatccgcatgggcctagggctctcggcccacaccatgcttcttggcccaaggccttgccgtgagcccgtgagtaccgtggtaccgtgtaccccacagcctaaaaaagatgaatccttgattgcatcggccacttacctttggttcgatgccttgaacgttttcatgttcaaccacgcaccgatgaccccactttgctggatattgtcatgctaactgtcttggacatcgcctcatcggcaaacttgttcaatttgagggtaaaatgtgtcaacaagttagaaaccaagtctgttggcggttggtcaagctatatcgccaagcatgctagaattggagcattgaccgatagagagcacatagctttcaagaaactatggctggaaagatttgtcttctacgacacaacaacggttccaacatcaaatatgcaacacatcgcccaagctctctctgaagggaagttgcttcctttgggaaaatattttcttggcgccacttaccaacttctctagcaagcatcggccaaactgttagccggtcaacctatcggacacccgggtggcccatggtgacttgtacaactctggctcaagttctaccctatcgaattagccaaactgcccccctgccaactccagatttccaaccaattttgcaaaaggctatgatagaattgttcgctgatgcatgtcacttggcgaagcggcaattatctatcttggaatagccttacacctgaaaatttcaaactctagtttgataaattctgcaccgatttccctagggcagccagaaattggatcccttatgaagaattcaagggctacacgcgtccatcggacttcaatccgatcaacatcaattccaatgagacaagccgggagatcttcatatcggctatcaccccctacatccttcctactggcatcaccatgggtcactattctcgtgtctcatatgaattctatcatccatcgatggtgacccatcaacttgtctttggccaagtcccaatcacgctgcacttttgtcaattcatagataaggcatacccaatagtcttaggttgggcatggccgggcccaccataaatcaagtcttatacggaattattcctcatatacggagggtgtttcggatgagtaaggaaaagcagagttctactcaggcactacaaggactactcagatcttatccatatttgtctccctagttccacttggacaaggggatatccgagggtatagatacaagaccccctaggaggagaggggacatgccaacaagaccaacataaggaacaagcctaaaaagacgcaatgtaggtgccacataggtcgacaagaggcatctagtgctacctccaaccttgccaagttggtatttgaggaagaagactatactatctgttgactacgtgttggggatccatgccatcaagctaatagagactagaataggtcatcccaaatattgtactcgtgtgatactgctatatataggcaacaccggcttcggccaacaggagtagagctactacctgtcagtaaaggggcccaaactagtataaaaatccatgtctcctgtcctttttatctcaatctcgcatatagcttaacaccatcgtaccacgatacttctaaatacagtagtcgtggtataacccatcgacagtggcgcaccaggtagggggggctgatgtttcaaggtatcaacaagatgggttgtgagaagatggatttttcgacaacaaactactcgacgttgtcggctttgggagatatgacccgaccgaagtgcgttctcatatagatcgggaccctcgtcatctcaatattcatcaagatattgtcgctacggatttttcaacgaggaatacttcaacgactatgacactaggagatctgacccgactagagtacattcctcgaccagatcagaatcattgccacccaacagttctatttatcaggatcagccaagcttcaagatgtcgttgtcgcggagaatatcggttcgatgatattgaccataaggtctcagcccagagaaaatacttccagattaatatcaccgccaaaattcgactagatcagactagataactacggtgctatttacagatgaactcattaatctacaatgagatatcagaataactgttgcccaagttcgattatactcaggcctaagaccttatgtgacggttcgactcttaatcggacgagcatacatacatggtatttggacctcggcaagccgaacacatcctatccttccaagccgggagggcccacgcacatttggctgtactcctagatcatatgtctactacaccctacagtgccgtgtacaggagagtactacgtgcatcaatccttaatgtcatgcacaaatcaacaaaggtaattagtagattgtgctttaaattactctactaattttgttgatatatccagcatatatctacacagttatgcaacattttatatacaatttaccgtaccaactttcagatccacacaatattgttagatcaacaatttattatgtttacttagagcgtgttttttatacaatatctattgtgccagcgttcctatattacgtcgacaacggtttaatattgggggcttgctatgtttcttctgtataaatcatgcttgtttacgttaaatatagtacccgatattcaatttaaatctgctttttatatccctataatactagaagatttataaaatatttcaagtacatacttggtattgtctgttatatatcttgccttctagaaaaaaaattcaggaataatcgagcactatagtgggcagcagacgagcacacccattgtcgagaatgttctcgaatgaatgcagagttgtccaaccaaacctacaattaagaccggcaacctgtctcacatctagtatcggtcacgaataggtctatttgtgaaaaagttaccacatacattcccctcactaatgttgtcggcttgatcactcgacatgattgtgaacggacatctgatatacttataagtagggtatgtgagtcatgttggccacataggatgcacatgtaataaccaactctaagcgcccttgcaagtggtcgaggtatggctacccctagcccttggctagctgttgtatcgatcctcccgccatctctatgagtggtcaaggtgcgactacacacctggtatgagtacaggcatggtagctatcccaccacctctacaagttctctacgaatggtcgaggtacgactacacacctagtctgagtacaggcatggtagcgatctcaccacctatacgagttctttacaaatggttaagataggactacaaactagtagcaatcccaccacctcttcaagtggtcgaggtatggctacacccggtccttgaacagcggttgtagcgatcctcccaccatctctacgagtggtcgaggtatgactacacacctggtccgagtacaggcatggtagagatccttccacctctctgaatcctctacaagtggtcgaggtatggctacacctgatccttgaccagcggtcgtggcgatcctcccaccacatctatgaggattcgagctatagctacacctagtccttgaccagcggtcgtagcgatcctcccatcatatctatgaatggacgagtacaactacacacctggtcctcgaccagcgtggtggcgatctcatcacccccgtgcattaatctctatatgtgtttatacatatcaaatgtgtaatatttgtccgttggtcctatgttttcatatctcaaccggttgaagtcgattctaatatcctattaagttagcccgacaagcttcggggtcccatggatctcggctgtggatgcctgtcactgttaaagcttgttcaggtcatgtaagattggtcatgttagagtacccactagaacgtatgaactaagacgtgtactcgggaaaacccaacttcatgggtgggggctaggaactcactgcttcacattagtttgttatgagattcaagctgcctttgtggaaatacaattttccataaagacagatggggctgggaagagtacaataaactacgtttagctaagggcagctctagcgagagtactcttttattgtcacacacatattcaatttatttttaatatttaactcccaagcgttcgcttaggtgcttttttatcgaacaatttattataagttatttatttcaggaaagttagatatatagacttgtcacgtactctatacctgttcggttgtccgggaacaattggatgggtttgacaagcgttatagggtaaagcgatggtgtgctcgccaagatggtatcttttgacttcaatccaaattcaaattggcctatcgttctcgagcaagatcggatagggaacttggtctcatactctatatctcctcgggaagcagagaacgattagatgagtatgacatcatatgttcaaaggggggatccnaangggnganggatttnnngnagatggggnancgatnngatcccctcccccctccccccctccacctggtttccttttttggcaccacattactttcctattttagtaaatttatgcacctaaagtttatacacctcaagtttacacatctaaagtttagagacccaaagtttataagtcaaaagtttatatatccgattcaaatttgaatttgaattcaaatatttttcatatatagtatttctatacatctgaagtttatatacccatttcaaattttaatttgaatcatatctgattcaaatttgaatttgaattcaaatattttctatatatagtatttctatacgcctaaagtttatagacccaaagtttataagtcaaaagtttacatacccgtttcaaagttgaatttgaattatatctgattcaaatttgaatttgaattcaaatattttctatatatagtatttttatgcatctaaagtatatacacctaaagtttatagacctaaagtttataagtcaaaagtttacatacccgattcaaatttgaagttgaaatcaaatattttctatatatagtatttctatacatctaaagtttatacacctaaagtttatagacccaaaatttaaaagtcaaaagtttaaatacccgattcaaatttgaatttaaattcaaatattttctatatatagtatttctatacatctaaagtttatacacctaaagtttatagacccaaagtttataagccaaaagtttacatacccgattcaaatttgaatttaaattcaaatattttctatatatagtatttctatacatctaaagtttatacacctaacgtttatagacccaaaatttataagtcaaaagtttaaatacccgattcaaatttgaatagaattcaaatattttctatatatagtatttctatacatctaaagtttatacacctaaagtttatagacccaaagtttataagccaaagtttacatagccgattcaaatttgaatttgaattcaaatttttatatattgtatttctatacataaatttttctaactttttgttttttttacaaaatttttgtggtgtactgtagtaggaagagaagaaggggtggagaaaggggggagaggagggaggagtgtatcgagtataggggatgggcggacgggtgatcgctgggcggacgggggagcgatcacccgcccattagcatttccgtgttcaaagggtctttggtcaaggacgcaacggggtcatttgcattgtagtcgggggctactgtcagtgtcatagataaggcatactcgatagtcttggttaggctcagcggggcctaccatataaaaattcttatacagaattatgcctcatgtacggagggtgttccggatgaggaaggaaaaacataattctactcgggcactacaaggactactcggatcgtatccacacttgtctccctagttctgcttggacaaggggacatgcaagggtataaatgcaagacaccctaggacgagaggggacacgccaacaagaccaacataagggacaagcatagacaaaacccaatgttggcgatacagaggccaacaaaagggatctagcactacccccaatctggccgagtttgtatttgaggaagaagactgcactagctgtcgactacgtgttggaaatccatgtcgtcaagccgacagagactagattgggtcatcccaaatattgtactcatttgatattgatatataaatgcaacaccggcttcggccagcaggagtagggctattacctatcagttaaggggctcgaacctgtataaaaatccatgtctcctatctttttacctcagtctcgcgtataccttaataccatcgtatcccgatacttctgaatactgtagtaatagcataacccatcgacaacttcatcgacaaaatccagactcgagtacccatcacaagcacactcatgagcaatcggctcttgaatctcaacggtccagatcttggccccttcatcgattgggacaaccaccaattttgtccaccaactagcataatgaataaaggggaaattaacatttcttacacgtatatcaataataaataatttaattgtattaggattggagaactaatgtggatgcagagaatatacattaaagtggaggagaaatgaagctggcatgcgaagaaacacagttccgccgaatcatgtctgagcacgagattgatgggcccacaagtcagtgcaaaccgacttaaagaggggccaaaccaccaggaaccatcatatgggcccaggtgccatcctctcatcaaaggcggtggtgaaagacggtggccatggtttggctgaactaggcttggcgcctccaacaccgagcttccacatggcgattccttcttcactcctaatggcagttatgtccgtttcccggcctacaactagggatgaaaacggatcgaatacgatcggaaactagctctatcatatttgctttcatattttttttcggaatcgaaatcggaaacccagatatgaaagcggaatcgaatcttatcggatataaatagggagtgaatacgaagcgaaacgaatacggtgacgaatattaatcagaatataaaaacccctcaatactcacaaacgatttttgatattgtgtttctaaaatcatgctatatcatgttattgtgtttttactatattattttggctattttttgtgactttgttttatcaattaaaaatttgaatttcaaaacttcaaatgatatttgaaacagtaaataaattcagctgaaaaagtcatgaacataaaagttgtagaactcatcaagacatacaacttttattttagtcatttcttcatccgacaaagtgataataacattgttcataaaatttacatctctctcttctagtttataaaaacaaatgatagagatgtaaattttgtgaacaatgttactatcactttgtcggatgtagaaatgaccaaaataaaagttatagattttgatgagttatacaattttgttgtcgatgactttttcagttgaaatcatttagtatttgaaaacattgtttgaagttgtcatatttttaaattcaaattcaaactgttcaaacaaagtcatatagcaaaataacaaaaataaaagttatagatcttgatatgttatacaactttgtttttgacaatttttccatttgaaatcatttactacccgaaaaaattatttgaatttcttatattttaaaattcaaattttatatagttcaatcaaacttggatggagaaatgaccaaaataaaattggtagatctcaatgagttctacaactttgtttttaacaactttttcatatgagttcatttagtatcataaaatttaatttgaagttcatttttgggttgggctagcttatgggtctgatgtgtaagtcggatatccgatggaaaatactggataatatccgacggatatccgattccgacggatatcacctatatcatattcgctttcatatctgacaaaaaatccgaattcatttccgaattcaaaaatttccagatatatccgaccgaaactatctgaatccgaaaaaaggtccggtcggacggaaattatccgaatcactttcaaccctacctacaactgacttcactactgtcattaggaggctataaaaggagaagcttacttcacttcacaacacacacttcaaggaggaaattccccctttcactttgtattctctatagtttctagtaggaataaagcttaggagctttaatactatagtcttcatggagttttggttatgtctctagtactttactcttctgataagtctatagtccaattaatagaattatcttctctatttatttattctcatggtttatatatttctttgttgagtataagttctatgagtagtatatactttgtatatccgcttcatcctaggctagtcgatctgttctacggtgatggtcaaatgacctttataggttgctctagctccaacttgttcatccgtagggtgagagttccggaggagttagtgatattatttgttggaataagcatggtgcataggctaaataaatgtcgttggatgcgggtgtgccccacagtaagtgaggtagccagcaggtggtgacagcccggtcagtcctttgtattcctccgcatttggatatgacgtaatagtgcgtaaatgccataaccatgctggcagaccagcagagagtggtctcttgctggtgcctgggtgcctgcaactaaatcctatgttgtaagcttgtatatgttaagtgtatactagacatgattagtatagaagtacagatgaattgtagtttcctaaagctaatttcctactacatattcttatagaggtggatctcctgtgtgtatccactaccttattaattattatcctaacccttgtttagactatggtgaattaattataggctgattaaggagatacagaaaaacatatctttatgtcaccactttccctgtggaaatataactacaatactcttgggaatatttatgtgtgaaatgctatagcggtatccatacgattgcggatttatctgagcccgaagtagaagacgacctccccgacattaacctagaagtggaacaagtccttgtcgaggaagtcgcaaatgaggaaattgatgatgctgccaatggttctgcagatgaggagcctgccttgccgttacgaaaatatatctacagccgtttacattgcataaaaacaagtaagcgatgcaagtgtccatcgaaaatctcctccacatcatcaatcccctccagcattgtaaacttaatcctcgttttctttcattcctagtcatataactttattttaatcatgaattgctacttgcagctggccgctcaacctcctttcctcattggcagacctcaagcgaacatgctccttcccactcgattcgattgtcgatagccatcacaccgatgaaggcccaaccccagactgctgctccaagaatcctggtataaactatctccattaactccaaaatttacctttcacgcttcacctctaatacaacccttgtttatacagaatatcaccgatatcttttctttcgatgttcgccaattcattgatgacagtgaagacgacatcatgagcaaaggctaccttcccacctctagacactatcagaagcgctctcctcgacattaccaaccagctaaatgcatcgcttgatgccttggtcgagaactgcgtgccgatctggggtcgtatcgaagaagttcaaaaccttcttcccgacgaagtcatcaatgacttggcgccaacagcctacctcgagacctatcggatcaaagtcttcagggctcgatagcgtatggctgaccgcgtcgtcttgagaactgaagaagctactatcgaatctgatagacaattagccagagcagaaaaaaaccaagctcagtgagttagccgcggccctgagacaacccaaaagcaaaccaaagaattggacaagggagaagccgatctgcttgctgcgctggagagcacacggcaagagctagaacaaagccactatccgcaagccagctgatcggcgtaaatctattaagccgataccaaggtctgatgccgaagacgcaaaaatcatcgacgatgttgatcaaatacgcccgcgtgtggtatcgacaatccagaaatatctgggttgatgtaaaacttctgagttccaaaacacttaaactattttgttacacaacactcttttgcttacaagctaattttctcctttattccttctaaattttctcctttataattttgctttataagctttgtacaatagcttcatgtccgtaaaccagttgatacggaggcacttgaatagctctatgacacgccatctgataagtccataacgaattggctagtgtagtatgccatttttgtgttgttctgcaatcttcctctttatcaacttaatcaaacatttattagatgttgcagcttgtctgttatgttgcacataataagaaaaagaattcaacaaaccgaataaattcaactgatagaaaacaaatagaataattattttcgttgcgcactatataaatatacttagcaaatggttgaattcaacaagaaagaatgaaacagagtgaaaaatagtgaaaactaatcttgtagcagttaatctccaacaatcccaaaaatttagagcaaagcctcccctcctctagctggtcgaacaaaacctagaggtgccgctatgttctttactcgatcacctcgacgagtgaggatgatgggctatatactgcgagctcataggtgccagttcataaatagaattggcacatatatatgtctgacagcctcgaaggtgttgtttagtaaaatgagcactcatagtggctactcgcgcagggtaggccttaaaggtgacggcacctttccctgataaccttaagggcccctttgaatcataggattgaaaaaatgtagaaataggaaaaacgcttgattttgatatgaatgtaagtgtaaaacagaggattgcaaagcacatgaaaaacataggaatgatcatttgattggaccacaggaaaaacacaagaattagaggagagttaaagactcataggaaagttttcatgaagtagaacctcatgctagatttcctctaaaacttgcatggcattaggccggcaatgggaaggggggagggcaaagggcaccaccacggagcccctcgacagccttgcgcgcacccgcgggtgcacgcgcgtgccagcgagggggcccgcagcggcgctgtcatctcctacggccgccgctctctctctcacttggtggggtagactgtgggggagaagagaaaagaggacgccggccatggggcggtggcacgagggccgccggcggcggcgacgctgctccgcgtggctgcacgtggaagtaaatggctagggttttcaggcggctggggacgggctagggcttttgatcgcccgatctctccgctcgaccgtccgatcgaaaccttggcgatcggacggccggtgtcggccggccgaattgagcacaagagggaggcgcgtggcggcagctttcccggcctaggaataggttgcggcctagggggaagggggcgcgcgcgcgcgctcggccgtgggccgcctttttccaatgggccgaaagtgacgggcaatgaacaatagcgcttttccttttttatttgtctattttcatgcatatttcaatagaatttgaatagattttgcatgttttacctctgtttaaaatttgaaccaaaggggtaattttttacacagagtaaataacagaatttcttactgttcatatgtattttatatagatcttccgctacaaatagatgaaattgataaaaattcgtgtttctaaaattaaatttcgaaccaacgggagaatttaattttaagaacattaattttgtgctatgatgttgtaattttctgacaaacgttgttaatttcaatgttatagttatggctttatgtgttatgtctattttgcccaacggtgatttaggtttaatgcataatattttaatgttaattttgttctcacagtacatgattatttcaggtggctactccttgatgggttgaataaaagatattctgaccctaaagggagataactacggagagtggaaaagaaaactcgaccttgcttttatcttgggagtggtggattgggtcttgaccaccccatgtcctatagaacctgctacacttgtcagaggtgaaaaagagtcggatgctgactggcgaaagagagagagggacaatgctcccctcacaatgtcgtatgacattgagcatgcgaaatggtccttagccagcaagaaatgttttgctgtggtaaaaaaacacaattgagccaaccatattgggctcaatcccaaagtgtgaagccgtctctgactaccttgaaagaataaagagccagtttactggttcttcaaagacttatgctacatagctgataaagcagcttgtgacagagagtaccatagaggtggtgtaagagaccacattcttaggatgagcaacatggcttccaagttgaagccaatagatttgggcatctcagatgactttctggtccatctggttatggtctcattgccaaagcactttaacaacttttttgtcaactacaatataagtccagagaaatggaactttgaaaagctcatcgctaattgtgtgcaagaggaggaaagaatcaaagagtccaatggtggctctattaactatgttaaagataacaagaaaaagaactacaagtcaccctcctcaaaagtataacagcctcagcatctgcctcagcaacaacagttcactgttgaaaaggatcagtgtctctactgcaagaagacaggacattacaagaaagattgtcctggcttcctgaaaatgatcatggtgttgacagaaaacacgaagcctgggagatctgcttaactccagtccaggtccaaagctcgccttcgggtgtgctagcgtgccagttgatttgatcctgtaatcaacaagaaatagaagcaaagaaaccgtggttaaatctataaatgatagccgatcggctaggtgcgatgacatatcatttatctttgagccgatgtcatatgtgaatcgatcggcagtcatgaataaataagaaggaactaaatctactcaattggctgtagatattaacaatatatactccttatatcaatatatacttaaatcaagtgattaggatagatcggttgtcacgcccggaaattcactagtaatttccgaacttatttgtgcataaaatcctcgtctaggaatcagccgaggtacacaaactgacaatttaatatacagattcatcaaattaactaaaacgataaatacttacttaagaggcacttagtcctcaccatgaagaaaactgcagcggaaaataaaatctagcgaagctccggctccactcccacaggcagctcaacaggggtataagccaaacgtcttctccttcgcaacttgtcttcaactgaggttgattgattattgcaaggtgagcatatgacatactcagcaagccacacagcaaatatgcaagtgcacaaggataccaaaggatggcataatataggctcatttgcaaaagcagcacttagcaaatcatttaagagatgtaaaacagtggagtaattaatcagaaattttaatcaacactgaacaacacgcccatgctgctcaggcccagccattctgaaacaaccatacccggctgtacagatctaatctccaaaccaggagctaagcaaattattactagttataacatcaataattattgtgagaggtgtgggactaatcacgaaaaacattgctcaacccgcccataaccgcgggcacggctattcgaatagttttactctggccagaggtgtaccactatacccacaagacacagccccacaacatgtcaccatgtgcctcagtaccaccacggtacctcggaaaggggctgtgacattaccccttgcataacacaacccaccacagtgcaccgttcctggatcataatcaccccctcaaaaaccagaggcatggactccccagcgacccccgtgggcttatctccaccacttctcagtctggtgctccgcaatgaatcatgttatacaaaaggtaaagtcgttgcccacgctggcttgtggttggcacgattaatgtttcacaatagtagctcgcgaaccggtccttaattgccatgagcacgactctcaaaaccatgtgctcacaacccaccattatcaagttttagttggcaagtaattaattaaccaatcacgattgaccatcgtgaactatcattaagccatcattaaataatgagtcataagttatcccaatagtgtgctaatgtttctaagcatggctaagcaatcatatctaatatctagctgaaccaatatataaagctcaactagtcaagttaataataacccaaggtatcaaggaataaaataatcaatgcaaattggccataacaaaggaataagttcacaccacccggtgacattcgaaaataaatgcacagttgaaataaatagagaatttaaatataggatcaacatgctcaaaggattgtgtttaggatctgtgtgacttgccttgcaataatcggtcttcaattaatcttcttgaatacttccggcgcactcgcgaaccttcgcaacgacggaaacgacaagctaacacgcaaaatgaagaaaaagactaataaaaaccaaataaacaatacataaaaagtaaacaaacatgtagatcataattttagatgaattatgagacttgaacggcctcattctgacttcaaataaatttattatgaatttttaaagattaaatcggattaaaacacttatatggattttaattgaattatgacacagtaatgaattatttttgaaaaggaaaagaaggattattgcgtcagcggctagggtttgcggtggaccgggcgcacggcggcggttcacggaaacggacggccgagatcgatccattcaaaacgaacggccgagatcgatcggtccacgaccggctcacgggagagggcgacgatgacgtcagcgatgacgtcaccaccggcggcgacggctcggcggctcgacagctcggacggcgcacgctcaccggcgaacggcggcgcggcggcgcgaacggaaggcaccaacgggtagaacgcgacgcggcgaactcaccggtgaccaaaggagcggcggaagaccaatggacggcgacggcgacgaggaagaagcggcggcggagatcggatcgacgacgacggtggtgctccggcggtcttcggcggcggcaaaggggcagacgaggacggcgacgcgacggcgaccacgacggcggtcttcccgagcgacggcgacgtctggaacggcggcggcgcgcggctgaagcgacggcggcgacggcggcgctagagcacacggcgctagggcgctacggacgacgagaggcgaaggcgaaggtggcggcgggtagagaagagctcgggggtccttttaaaggggctcggaggcggcggcgaaggcccacggcggccggcgacgagaaggaaacttcggggttcggaggaaagaggccgatccaaatcgaactcgattccacgaacttccaaaacgaattagccgatgtttcccctctatcaattcagccggaaacggaaaggatcgatcgaatttggaagggaatggcggcggcgcgaaactagggtttcgggcagcggcggcctgaggttgacgacgaccctgacagaaggggcccacctgtcagcggctgagagagagaggagagcggcggctcggtggactgggccggactgggccgagggaaagagagaagagaggttttgggccggctttcggcccaaagccaaaagagacttttaaaaacctttttcaatttaaattatttatgaaatgcaattccatttattaaaaatacttccttagctcaaataaatcccagaaaaatctaggaattatagaattaagcaaagtatttaacaaaattttatctagctcaattttatattgagatttagcaaattaaaattagatcttctcttttaagcttttaaaatcatttctaataattccttttaaacaacaatttataatttaaggatttttaaacaagaaaagctcttaacaaatataattagattattaatgatcaagtaattactgaactgttctttgtatcatttaggaattgagctctgaaaaatccgagaaaatttcagagagttgacttaatcatggagaatttaataaaaattaaatccatccatgctttatttttaggaaattctatttcccacaattaacttcacttgaaaattaaagaacatttaatataaattttattaataatttattaaataatttataaatcctgaaacaaaaatcaggatgtgacatcggtcatcatgccgagacaatataaatcacttagttcgaaatatatattaataacaggactatatatgtttatagcatagcccgatcagatagatctagtatgtatcggctaatactccgatgctgctctatatcaggatatttaaaataggtataaagtatcaaacaaaggcctaatacgcttgaatacagcaatatcttgacataaagggcagatttaacatgtcaatgaagcatatagagcaaatgtggctaaatcagataagatcggctgaaactccgatgctaccctaatcggcaaccagaaggcaggctagagcttgatattctaagcacgacttaatagatcaaactcaactgatgcagcattaagtatgaaaagaagaacaatatctagacaatcaagccgctagaagtttcataaagtggtaaatatcttatataatctgagtcaacgtcagaatctaacctaatcggctgccttcttcgatagatgttagccgattgtaggttagatagcgatattgccagggattatgtaagatatatgataactcgaagaatcacataaactagattagagtatcataaagatggaagcactaatctcaagaacgcaagccgtcataacaagttttacctcttattgaagatcgaaaccgatgcagcttaacccgaaagcaagaactcgtcgaaacaaaactaaaataaaaagggtggcgatgcaccgaaattgtattgaacgtgtgtgttaaaagttacatagggctcggatctatttataccagagaattacaagatatgtccataacggacacgactattatctctaacaaactctaagataccataagtctttgcggcagacttttgcccaaacatatctctaaggaaattacttaaaacatcctaattaatagatacaattgcctcctcaggactctatccatgtgcggcaattaccttgaagcacctcaatccaacccaacatcacacatcaagttgtactaccgggatcggctacatcggcttacctagtccgactcaaactcagccgatcttatcgtagccgatctggactccagccgattcctgctctgttttcgaactcgatctccgcctccgacttcgcttcgatctaatcttcttttccgatgccgatattaccaaatttggttgttaacacatgccccccaagtccggaatatttgataatgtttcggatttgctgtaaatcgactccgagcaagtttcgcactttgccgttttccgaccgttactgccgtgctttaaatattaaccgtcaccctcgagaaatctcacaccgtgacttccgttttcaccgctcaagcaaaactttgtcttctctctctccggctattcctccgacgcaaaagcgacttccaggcgacttcatctccggcgagatctccgcccgcagcaatgtcatcctccaccaacccatctgatgcgccatcagccgattacgctgaggtaagtccccataggctagatcccctttcatagcagcagatcgattttctcttatcttacatcgctctcttttcctcggttgttttggatttgtagcatctctccaaccaagtcgcgattcccaacctttcgcacaaaaaccactattttcttgtcccaatcggcaatctcgaccccactaatttcattattggtgaaaccaaccggatcccctttaggctagccaaccctaacctgggtcactggaagaatatcttcatgtcttggccatctcttgaaaaacccacacctgataagagctggaccacctggtaccaacgcgtatcggctagtaagaaggttcactgggatgagattggaatcggccaagcgcttgctctcaccatagccaattctgctaaagatgaacctctgatggctgccgccacctacttctggtccaacaccatcaatgctttcttattcaaccaaggggactccaaccttaatcgacatcaccatgattactggattagatgtaacttcattggctaaccctatgagtatgaataccaagaaccaatttgatttcaagaccaagagcataggaggctggtctggctatgtggcggcatatatgggccaaggatctattacccctcgagagcatatagctttcttgctcatgtggatcctcttctgtggatccagctgtggccctacaaccaactggcagtttttagccgaagccctagaatcaaagaaagaatttcctttgggcaaaatccttctcggctatctgtaccaaatgttgaacaatgcatcggctaaaatagccatcggctcaatagttggagcaggtggaccatggtggctgctacaaacttggttaaacttgatagtcatgaaagttgtcaatcggccctctgtaacagaagctgaattcccactacagaacctgattgtggaagatgacggagaagaacgcacccatcgcagatgcatgtcatatggagaatatgcatccacaccatccgatgctggagcgaagctatcggctgagctgctcaaggactggttctgcagcttctacgaaggttttaagaaagatgcacgaatctggtttcattatgaagactcaggagaccttgaacttccatcagactttagatttgaagacattaatcatgagaaattccaaaaatccagagaagttcttatggctgccatcagcccatgcatccttcttgtcggcattcatcaagggagaaacatccaagtctcctacgagttttatcacccaatgagctcagccagacaacttggattgggctaactcctaatcggcttattttttaccgacaagattcagtgccgaggacaaatcacatctactctaatgatggatcggctacttaacctcccaggaccccctctgggcagcattgataatattgaattggcaggatttagaagcaaaaactttgacagatggtggggtgaatagaagctgcatctatttcatcaatcggcttcaatgtatatgacagatctattccttgacgtcataccccaggtaaactttgtcattactaatttgcataatcagttagccgattccttacttgactaatctttggctcctgttttgcagacaatagagtcctcccctcctcatcaaagtaacagtggcaaaaacattgaatatgctcaaggtctaattccgaatagaggtggactatctccccctgttatcggctaccatgcccccaagacttcaactctccttcatggcctaaccagggaaccagccgatgcagacaagaaaaggaaaaccagatcatcggccgtgagtaccttgaccttagttccaaagaaaaagtccaaattcaagaaaactaagccgactgataagccggctgatgatctacccgccttggatccgtctattgaacaagctttagatgaagaggaaattggcaaagatgttgaccaggctgtagccgaaatgagtgacacagaaagaacaccatcggcttcacccaagcagacgcctccaactccttctacccccgttcattttacaagggtaagtatctctctttgacttcttctaaaattacttctctcttcggctaattactcatagactttgtggttgcaaaaaaagaaaactgctgtgaagaaaaaaccggcaacaacgattgccaagtcggctccaccagtaagatgtctttaattcttttactctacagcctcctcctgcttctcctcctgtacagaaatcgtcaagtgaccagactccatcggctgtggggagtcatctcatcgaggaagaagaacaaccagctgctcctgctatcccagtaaattttcctttgtctcaacaattagatcggctataatctaccaagctgtggggagtcatctcatcgaggaagaagaacaaccagctgctcctgctatcccagtaaattttcctttgtctcaacaattagatcggctataatctaccaagctcttactttttccgaaattgtttctgcaggttctagtcgatctcttctcttttgatatcagagattacctcgatgaagcagaggaagatacttcaagcaaagctctagctcctctatccgatgatgtgagaaaaacacatgaagacatctctcatcggctagaagcctcttctttagatagcttggtagttgactgcgagtcaattagggcacggcttcatgaagttcaagctttgattcccgaagatttggccgatgtcctaactccagttgcttatctcgagcaacatcagttcaagctggaaaaagccaagctaagactagccgaacgccgtgagcgcaaagaaattgaagccacaatccaggctaatcggcagctcgtgcatgaagaaaaaaccaaacttgatcagctatccgaaggtccgatcaaatctaatattgatcagctcgaagctcgcaagattgagctcttggcacaacttgaagaatgcaatgccgaattagatctggagcacaagaaactagccgatctcccgcggtctgtcgaagagtaaaaagcaagactcaaatcggctatcaagaatgttgctgaactgactaagtctttgaagatcattcctggaactgatgctcaagatgctcaagctattgaagaagtcgaacaaattaggcaaaaagctatttcagctatccagcaatacttgtctcaataacttttgtgtaataggacttagaaattttttgtaatcggctaagacgctctaatgctttactgtcttgacaatcctctgtgccgattaatatgactttgaaatttgcgcaaaacttcgctcaaaaaatttgcattgcattttgatatatatgtgcccccctaattttacaacgtcaaaaacattgataaaattataaaacaactaagggcgatataacaatatcggccattggacatcggcaaaccacaaccgattaccatgaaaaaaaattaagggcaatataaccaattcggccatctcaaggcgatgtaaacacatcggctgtcatgcatcggcaatacaagctgatcatgcattaacccaaacacttgggtaatatttcttcaaatatttgccattgagcgctcgcccatagacttcaccatcaagcccttgcaacatatatgctcccttagacgcaagcttataaattcggaacggtccttcccaattcggtgaccacttgccgaatttactatcacgagtaccaatcgacaaaatcaacttccatacaagctctccttccgaaaaatctttaggtaccactttcttattataatgccgagcaacacgttccttatccttggtaacctttgcaagggcacgcaatcgtgactgaaccagatcctccctctcatcagccataaggttgtaatacttatcggctgttaaatcgttttgtaattccattcttcgagagccgattctaacctcccatggcaaaacagcctcatgcccataaacaagtttgtaaggagggacttggattgatcgatgacaacccatcctatacgaccacaacgcttcagccaaccgagtatgccattgccgaggataatcagaaattttacgcttaatcaatttgatcaaacttttattagatgcctcggcttgtccattagcttgtgcataataaggtgaagaattcaacaatttgatatccatgttatcagcaaactgaacaaactcatcggacacaaagattgaaccctgatcggtagtaatagtttgaggaataccaaatcggtatattatatgttcttgaacgaattgaatggcatccccagaatcaactttcttcaaaggaatcacctccacccacttggtgaaataatcagttgccaccaatataaacttgtgtcctttactcgatggtgggtttatcataccgatcatatcaattccccaacctctgaatggccatggcttaataataggattcatagccgacgccggcgctcgctgaattgctccaaacttctgacaatcttgacaccccttataatatctgaaacaatcctccagcattgtcggccaaaaataccctgcacgccgaagtaaccacttcatcatatgagccgattgatgagtaccacaaattccttcatgaacttcgccgattgcaactttagcttgatcagcactcaagcacttaagtaacactccatcaatcgtccgataatagagctcatcatccaacaatgtatactttaatgccttatgccttaatttccgagaagccgattgagttggattactcaaatattgatgcacatcatacctccaatcatcggctgttattgttgcaatttcaaccttaacatctttgaccatcggcttataccccgatgccccttgggctaaatcattagcttcaaaattctgttctcgagagacatgctttaaagtaaccagccgaaactctttcattagttcttggcacttctcattataaaccatcaatgtatcattcttgcattcatactctcctgccaattggctgattactagcaaagaatcccccatgatttcaatggtatcggcttcaacttccctgagtagttgcaaccctttgagcactgcctcatactcagcttgattattagtcgcatacggtttaatagtataagcaaactcgaaacatgccccctaggggaaattatgaccaagccgataccacaaccatgagtacacaccgatccatcaaagaataaagtacatggcactatttcaaccgagccgattgaatcatcacgatgttccacaataaaatcggctacagcttgtcccttaatcgcctttggtgactcataccgaagatcaaactcagttaaggaaaatatccattttccaacccttcctttcagtattggagccgataacatgtacttgacaacgtcggccttgcatctaacagtacactcgttggatagtagataattcctcaaccttgtacacgaaaaatacagacacaaacataacttctccataggggaatatctagtttcagcatccaagagccgacaactgagatagaatacgacttgttccttcccttccaactcgtaaacggtattcctttctgtggaggaatcaaaataggaggagagctaagatattccttaatatcatccaaaaccttttgctgctctgcctcccaagtaaattgctgatcggctttcaatctcataaaaggtataaaaggttctaaccttccagacaaattagaaataaacctcctaacaaaatttatcttgccgatcatctcttgtaattctgtcttattctccagaggctgaatcttcttgatcgcattaacactcctttgagttacctcgatccccctttcatgaataagaaatcccaaaaactgtccagccgatacaccaaaagcacattttatcggattcatctttaggccatattttctggttctctcaaaaaccttcctcaaatcagctatgtgatcctctatttctctggacttaacaaccacatcatcgatgtagacttcaaccaaccagccgattagatcatgatatatgtaattcatggctctttgatatgtagctccagcactcttcaagccgaaagtcatgacaacccattcaaataagccgattgcaccaggacacctaaaagctgtcttatgaatgtcttcttcggccataaaaatttgattgtatcctgtgtttccatccataaaactcaaaattttgttccctgatacagcatcaaccagctgatcggctactggcattaggtattcgtccttcggtgtagctttattcagatctcggaaatcaatgcacaccctgatcttgcagttcttcttaataactggaactatactagaaacccattcagcgtatcgacaaggacgaataaaaccagcatcatacaatcgcttaatctcagccttgaccggttcaagcatatcggctttacatcttctcgggggttgctggcgtggtctaacccctggtttgataggtagccgatgttcaacaatcgatcggctgagtccaggcatctcataatactcccaagcgaagcagtctctaaaatctttttaagagctctatcagcttggttctaaactctggagataagttcttactaataaatgtcggccttggccgatcgcctggacctatgtctatttcttccaaatcatcggccgacatgaaaccttaaccttgcttgtcatcgagatcatctactgtatccttagtgtagacatttgaaccctccgcgacgccctcaaaataatagcttgggttctccatcttcaattggttgtatatcagaatcggacacttttagaaaatctccatcccagacttttccagataaacaatccaggccatccatctcccaaagagctaaatcggcactggcaacattaactgacctgtcagctggcacgatctctatcttgtcgccttgccattgaatcaaacattgatgcatagtcgaaggaatgcaacaattagcatgaatccaatcccttccaagcaacaagctgtaagaacccttcccatcgctgacaaaaaacgtagtaggaatagttttgctgccgactgtcagctccacattcagaacacctttggtttccgatggattaccaccaaagcctttaagcaccatgtttgtcttgatgagatcctcggcatttctacccaacttcctgaacgtagcataaggcatcaaatttaccgtggccccaccatcaaccatcattttagacatcggcttcccattgacgtagccatttatatacaatggtttaagatgtcaattctctgtcccctcgggtttctcgaacactgcctgttctggtgacaaaaccaacttggccgattcctcttccacctcgtcaacatcagcttgatcaatcccgaattcggctggcaaaggtaaagaccatgttaatcggtgccgtcacaacactcttcccttttgtcaacctctttgcctcatcggctgcaacatcatcggctacaggaacctgactcttaacacgccactcctgtcttggctttgctttcttcagccgatgattaatttcttgttcaacctcctgaaggcgctccctattcctcaatctttgaacccttctcttttgattcttcatgaaaataccagaaggacaccattgattcttcctgattacattgtcctcctggccatgaccttggttcactggacccaatctttgatgaacagaaactcttgtctgccttagccgattacccctattatatgaccggcttgagctcccgacgatatcactgcacccagggcagttttcaatagatggcaacctcataccatcattccagcagaacctaaagaactcacaaccccaatgagggtcaaaaccatcatcgtattcttcataatgcttctcctgctccttgtcatacttcctctgatatttgttgataatcttagctgaattcacctgagaaccctttgcacggaccctatcggctgtttggccagctgtatgcaccatattaacaggaaaaggattaccatcaaccttcatcggctttttggaatcatcaaacctaatcttgcccccctcaatggccacctgaatctgctgtctaaaaaccttgcaatcgttagtagaatgagacccagaattatgccattcgcaatacctcttttttcctaattcctcagccgatgcgattgtatgaccagcaggaagttgaatttgcttctctcggaattgcagatcaaagatcttatcagctttactaatatcaaagtcatacttctccacttttccagaactttttacacattggcatggtatgacctttttactcctcacccattcggctgcagctatttcagaatcgtcctcgtcatcatccgacccatacatgtatggacaaacatgattaaccttcttagagcttttcctaacttccgcagacctatgttcatgcaaggttaccttctgtatcagatgtgacaagctatcaaagtcttcagacgagaatttctccctgatcggagtaatcataccctgaaaggccagatcggctaactcggcatcagttaaactcaagctgaagcatttgttcctcatctccctgaatctctgaatatactcgtgcacaggttcatcatgccgctgcttaatcgctgtcaagtcagataatttcatctcatgaaccccaccgtagaaatagctgtggaattgcttctccaaatcggcccaactattgattgaccaatacggcaaagaggaaaaccaagtaaaagccgatccagataaagacaacctgaataacctaaccttcagaacgtctacagtcgatgcttcaccacactgagccaagaatcggctaatgtgctcataagtcgacacaccatcttgtcccgaaaatttggagaagtccggaactttgaaccgattgggaagaggaactctctcaacaaactcagggtaaggctgccgatacaagcttccagtctcttttggtttgagcccaaactattccctcattacatcagcaatcacatcggcccacggtcgttgttgagttgccccttgcgactgttgcttcatgggctcgaactgaccgtatgcaaactgaggttgagccaatccccctaactaatattgggcttgtggggaaggaggctgatattggtaactcaagttacccccttggtaattgtgaaggttcggctggatattgcgcatcaagtgctcaggaacaacttgaggcattactgtgccattcggctatacatggtgaaccaaatgttctgggacaacttgatttaaaaattgttgtacaggctgaccaccaggcgttgcaaacccggccgatgcacttattgacccctggtgctgaatcggctgaacgatttgctatcttaatggcgtctgttaattcggctgcaaaggctgctgccttggtggtgtttgctgaatcggctgcagaggctgctgccttggtggtgtttgctgaactggttgcacgacctgttgttggtttggttgtacaacctgttgaatttggggtgtctgctgaatcggctgttgctgaatcggctgctgctgtattggatcaacaataggttgaggtggcagaaacatggcagcaacctgatcttgggttggccaactcgaaacctgcccgctatgttgtggatgctctctcattaacacccgagggttcatcggctggcccggcgccatagatgatgtagcaggtagaggagttgatgccggcgccgtcggctgagttgtgggtgcaacggagggaaccgcctgaatagatggctgaacatcggtgatcaaagaccgataatttgggaagacacctccttgcaaataaaccgggcctgcagcctgatgttcagctattgaaccatcgctattgacttcatcatgtttgatagggtattgactaacaccccagactgattgatcaaagcatgatgcacagcgtaatcaacccgatcttggaagttattgaaaaagtcctgtgccacatcactattaagatttcctccctgcagcccctgagcaccgtcaacttgaactccattcaccccatcaccttgtactccatggacttcttgagaattttcgccttgatttcctagagagccgtcggtagcacccttgatactcggctgagccgagccgtctagagcttgtttcccatctccatccttagaagaactggtcccaggatcattagcaaccacttttattttgtacttctgaacaagtgtccccttgcgggtctgcatgaatgagttcaagaactgatcccgtgcttgctgcaacattgcttcaaaccgacgccgtaatctggaattcgcagtgtacgattttgtgtatcttcgggtcatgccattacggggcgtacacaagtttcagacaaaagggaagctcgcacctaggtttgtggggccttttcgcatcatcgctcgacgcggagaagttgcttaccagttggagctgcccgcatccttgggcaatgtgcacgatgtgttccacgtgtcgcagctcaagaaatgtcttcgagtgccgtccgagcaggccgattcagagcagattgaagttcgcgaagacttgacctacgtggagaagccagcgaagattctggacacaatggagcgcaggaccaggaattgggtaatccgtttttgcaaggtccaatggagcaaccacgccgaggaagaagctacatgggagcgtgaagacgagctaaaggcagcccatcccgatatcttcgctagttcttccgaatctcggggtcgagattctgtttaagaggggtaggtttgtcacgtcccaaaacgatcttaaaatataccctttaatttatgcctagaataattaaaatcctagtgaaagcctccaaaaattaaaatgtgcaaacttaaaagtcaaataaggcttggaggatttttgtatatttcctcaaagcctaaaatgtgtaaataaattttgtggaattttcagagcacaaataataattatcaagaaataaacaaagttaaaaaggttttataaaaagaaaaaccctaaaaatcctccttccctctcttaggccgaatccggcccatctccctccccctctctctcctctccccacggcccactcggcctctccccgcgcacgcgccgctgacgggcgcgcccaccgccaccctcgctgacaggtggggcccacccatcatccccttcctcccgccgcatgcgccgctccctccgcccgcgcctagcgccgccgccgccgccaaatccgccgcgctccgccgcccccgttcaaaattgaatgggggaaatattccctccgattccctctctctttccccccattttcccctctctctctctttatttcggatggaaacccccctaatcccgccggcgccattaatggcggccgggtctcccgcaccggtttccttccccgccggctgccctctctcactcccaagcctatataaaccctccccgcacctcccttgtccatttccgccactcgccgccctttctcccagccggaatcgagctcgcgccgtcgtcctctctctccgccgtcgccgtcgacctccggccgggcctacccgctcgccgggaccgtcccccgcctcggcgtcgtctcctccagcttcgctgcaccgccgccgaccccgtccactgcctcgccgagctcgccgaccgccggaacgccgccgtcccagtcaacccgagccgcgccaccgcctccctccactccgaccgcctcctccgtcgccgccgtcgacccggggtgagccgtggaccgccgcctctttcccccttcccttcccctctcttggccgacgctccgccgtgccaatggccgccgccggcgaccataggggcgcgggcgccgcctcccgccggccgcgccaacgtggccacctccaagtgcgccgtgtggccgccgagtggggcccggccgtcagccgcccgtgcctccgggtgcggctgacacgtggggcccacggtgccggttggtgagcccgtgggtgcacccggtccaccgtggaccgaggggctgccgcgtggggcccgccactcccgtggacccggcccgcgcgccccctccccccggctcacgcaataaacccttttttttaattaaaatttaaatgaagaaattcgcaaatattcacttaaagagcacataaacttcaaatggccataacttggtcatttgaactcggaattggaccgttcaagtctctaagttttccttaagaagtcaagaacccatttttgtgctttgttcctgcttgttatatggagtttattagagtaaaagcctttttcttcccgttgctcgtgtagacgctgcagcttcggaagatccgctctacgtggatgtcgaagccgacgtttgggaaagcgagcaaggcaagtcacatcatccttgaacatattgaatcccagtttataaaattattttggtttaaattactgcattatcgctttatttaaattcacgcgttatcactgttttatttagccatgcctatttacctttgttatgaccttattatcattgctattgttattatcaccttgcttaccctaggaaaaataaaaccccaactagtgggtactctattcatggttccactagtatgaatttaggtagatgcttcgctgattaattaggcaacattaggtggtttcataaccttagactttaggaatgctcatataatttggacattatggaatggttggactatgtggaaatggacacacacctcccactctattcaaaaccctcaaaatggttttaggctgggctcgaggtgcatggtcttcgggcctctgttgcaaagcactaccgtacttccatatgtctagtgggtaaggcttagtttgtggctcagtctggtcataaacaaaggtacagggatggagatggatgaagtcggggctcgatggacatctctaggacaaatgaaggctacacgagctgcagcccggtagtcgagatgtcatggcacagggccggtgtcctgctgctaggggttcaaccttggttacctgtctcgggaatcccggccgtagccagggttgggtcggtactcttgtttatggctaggatgggttgggaactatgtcacgtcttctgtccatatgccgtggtggtatgtggcgcgtggttacacgtgaggaagacgtgtcttgtgggtaaagatgtacacctctgatcagagtataatctattcgaattgccgtgccctcggttatgggcaagcctagcaatgtacccaagttagtgttttaaattcttaaaacctgcttaacaactaaaatgtggaatggttagcctgggttggcttgggacgagctgggacctgggtctggttgccagttcggtctgaatcttcgtaggccttgggttaaggcaggttcgtgcgggtttacggccttgattaataatattgtgtagctctagcatcatgtttacaaaatggccctgagcaactaaaagtcttttaaatgctatttactgtgaaccctaacctctttattataactcccttgtactcgtttgcatttattctgcatccgtgggtgtgtcttgctgagtactgtggttgtactcaatcttgctcaatttttccccaacctagaagaggagttcctataagatgaaggctttggtgtctagcttgtgcctgccgcaaagtgcctgtggtcgtcgccctagtcttccgctgttttccgtttatcttcgtgtgtgctgggccttcgccgcccatgtaataaattatctatttacgcttccgcttgtaaaactctgaattgtatcaacttttggtgtaccttgcctcccgggacaaggaataatacacgcacgagtagaatgcccgttgggttaattccggtcgtgacatgtcataacaagttttacctgttgttgaagatcgaaaccgatgcagctcaacccgaaagcaagaactcgtcgaaacaaaactaaactaaaaagggtggcgatgcgccgaaattgtattgaacgtgtgtgttaaaagttacatagggcttgggtctatttatacccgagaattacaagataagtccataatgaacacgactattatctctaccaaactctaagataccataagtctttgcggcagacttttacccaaacatatctctaagaaaattacttaaaacatcctaattaatagatacaattgcctcctcaggactctgcccatgtgcggcaatcaccttgaagcacctcaatccaacccaacatcacacatcaagttgtactgccaggatcggctacatcagcttacctagtccgactcaaactcagccgatcttaccgtagccgatctagactctagccgattcctgctctgttttcgaactcgatctccgcctccgacatcgcttcgatctaatcttcttttccgatgccgatattaccaaatttggttgttaacacatggcaaagaaagttgagaacattattacatttgtaaatgaatctcattatgttggttattctagatccacatggtggattgattctggagcaactattcatgcgtgtaattgtttaaagggtttccgttcgacgaggactacgcaaagaagcgaaagctccattagagtcgccaatggagttgaaggcaaaagttgaagctgttggagatcttctcctagagctcgcgaatggcttcacacttttacttcgagttgttttttatgtcccttctttgcaaagaaatttaataagtgtatcgaaattggattttgatggatatgattaccattttggaaatgtcaaatgtgaactatggtataataatgcatgtaatggtcttgctgtgttgcaagacgagctttatttgttatctctttatgagaatgtgaatgttgtgtcctcgttgacaaaagaaaacaagaaaagaaagagaactcctgatgtctcatcgaaattatggcactttcgtttatgccatatttcgagggggagaattgagagactagttaagaatgacattcttcctccattggagttctcagatttagaacaatgcatagaatgcattaaaggaaagtttgtaaagagcatcaaaaagggtgcaaaacgaagcgcaggaattttggaaatcattcacacagatatttgtgatccatttcctgtgaaaagtatggatggctatgactcattcataacattcacacacaattactcccgttatggttatatttatccaattaaagaaagatcagaagcattggataaatttaagatattcaaagctgaggttgaaaatcagcatgatgtaaagattaaaatagtatgatctgaccgtgggggggagtactatggtcggcatacgccttatgggcaagtccctagaccttttgcaaggttcttgcttgtcacgtcctgataaattcatcccaaaataaaaatcattttctaaaaggaataatagaattaattaaaattcgaaaagaaattgacaaacactaaaatacgtgccagaaaaatacgaatgtggtccggagaatttttgttgaattctccttggtctaaaaggagccctcaaattttacttaaattttcagagcaccaaaaatatttattaaacaacaacaacaattatcaaagtttaataaaaagaaaacctaaaaataatcctccttttcctatgggccaagtctagcccaaagtctccctctctcccccccggcccgcggccgaagtccttccctcctccctttctttttccctccccctctctctcctctccccgcggcccactcggcctctctccacgcgcgcgccgctgacgggcgggcccgcccgccaccctcgatgacgggtgggcccacccgtcatccccttcctcctgccgctcccgccgcctcccccgcgccctagcgccgccgccgccgcggattccgccgcatcccgccgtccccgcgtgcaataaagtgggggaaatcattccccgtgattccctctccctttccccccatttttccctctctctctcgtgttcaaacgggcggatttgccaccgcaaatctcgccggcgccattgatggtggccagacctcccgcgccggtttcctcccttccccggccaccctctctcgacccggctctatttaaaccctccccgctcctcctccgtccgtttccgcctctcgccgcccttcgtcctcgccggaatcgagctcgcgccgtcgctctctctctccgccgtcgccgtcgagctccggtccgccgccgtcgtcgccccgggccacctcccacctcggtgccgcctccttcggcttcgccgcatcctcgccgaccgccggaacgccgtcgaccccgtcgacccgagctgcgccgccgccttcctccgctccggccgcctcctccgtcgccgccgtcgccccggggtgagccgtggaccgtcgcctcctttcccctttccctcccctctctcggccgccgctccgccgcgccggtggtcgccggcggcgaccatcggggcgcgggcgcgccgcctcccgccgaccgcgtcggcgtggccgccctcgggagcgccaagtggccgccgcgtggggcccggccgtcagccgcccgcgcccttgggtgcggctgacgcgtggggcccacggcgccggccggtgcaagcccgggtgcacccggtccaccgtggaccgtgagtttgccgcgtgggccccactcccgtggacccggtccgcgcgcccctccccctcggctgacgcaataaacccttttaaaattaaaatttaaatgaagaaattcgcaaatattcatttaaagagcatataaacttcaaatggccataacttggccatttgaactcggaattggaccgttcaagtctctaatttttccttaagaagtcaagaacccattttcgtgctttgttcctgcttgttatatggagtttattagagtaaaagccttttcttttccgttggtcgtgtagacgctgcagcttcgaaagatccgctcttcgtggaggttgaagccgacgtttgggaaagcaagcaaggcaagacacatcatccttgagcatattgaatcccagtttataaaattattttgatttaaattattgcattatcgctttacttaaattcccgcgttatcactgttttatctagccatacctattttcctttgttatgaccttattattgttattgttattattaccttgttcaccctaggataaacaaaaccccaactagtgggtactctattcatggttccactagtatgaatttaggtagatgcttcgctgattaataggacaacattaggtggtttttataactttagactttgggaatattcatatctcttggatactatggaatggttggcttatggtggaattggacatacccctctcttcctctttcaaagcccctaaaacctgtttttcggtggggtttgggtgcatgccagttgtgggaagtagtaccccggccaatataaggattaagctcgggcctctgttgcaaagcactaccgtacttccacatgtctagtaggtaaggcttagtttgtggctcagtctggttataaacaaaagtacacggatggagatggacgaagtcgggggtcgatggacatctctaggacaaatgaaggctacacgagctgcggcccggtagtcgagatgtcatgacacagggccggtgtcctgctgctgggggctcagtcctgcctacctgtcccgggggttccgactgtaggtggggttgggtcggtactcttgtttatggctaggatgggttgggaactatgtcacgtcttctgtccgtataccgtggtggtatgtggcacgtggttacacgtgaggaagatgtgtcttgtgggtaaagatgtacacctctgatcagagtataatctattcgaatagccgcgccctcggttatgggcaagcctagcaatgtacccaagttaatgttttaattcttaaaatttgcgtaacaactaaaatgtggaatggttggcctgggttggcttgggacgagctaggacccagggtcgggttgctagttcggtctgaatcatcgtaggccttgggttaaggcaggttcgtgagggttcacggccttgattaataacactatgtaactctaggatcgtctttataaaatggctttgggcaactaagtgacttttaaatgctgttttctgcaaaacttaacccctatatcattaccccttgtacccccttgcattaatcatgcatctgccggtgtggcttgctgagtactgtggttgtactcattcttgctcaatctttccccccttcagtaagagaagctttggagaagaggtcttaggtggagtcctggcttataccccagttgagcgcctgtgaagatggagccgtaggcccgctagtccgctgctgtttattttttattgtcaggccttaagtgcctttgtaataatgtaaatattatcgatataataaagatgtgccttttgtatcatgtttgtgtggtgtaccccggcttttcctgggacggggattaatacactagcgttcgggaaaatgcaaaattttctcggtcgcgacattgctagagaatggaatagtagcgcagtattcaacaccgggcgaacctcgacagaatggggtagctgaaaggcgtaaccgtacccttatggatatggtgcgcagcatgatgagctactccactctaccattgggtttatggatagaggcattaaaaaccgccattcatatccttaacagagttccaagcaaatcggtgcccaaacactgtatgagctatggacgggaagagtaccctcgctagctcacctccatgtgtgggggagtcctgcagaggctaaaatatttaacccaaaccttggaaattggatcccaaaatagtcagctgtcattttattcgctatcctgaaagatcaaaaggttatcgtttctattatccaaacaattatacaaagtttgtagaaacgagacacgccgtcttcttggaagacgaaatgattagggggagctcggtagttcgagaaattgatcttgaggagaggcgggtgtttgtacccgctccgtcgactcaggagcctttcttctctctacctgctgctattgtacgtgcaatgcatgacgttgcggtaccagcacctgttgttacccctcctgtggcaacaatgaatgaaagtgaggaaccctttctacaggattcaacagaaattattgccacaccagaggaggagctgcaacagcctcaaacatataatgtgcctgaactggtgttgacgaccaaatttggtaaattatgaaccaggttcgacattgagatcgaggcgaattcgacaaagaagttgatttgaagaacatagtatgcatcggctgcaaaggcatcgactgtagtctgcatcggctgaaatggatcggacaaaggacagccgacacagctgatagaggtgatgcagccgattctgatgatgacggtttcgaagatgtttctagaatcaatcaaggtgcttcatgaagatttccacgacggagatagggctctcggataggcaactgtatctattaattaggatattttatgtaatttccttagagatatgtttgggcaaaagtctgccgcaaagaattatggtatcttagagtttgttagagataaatgtcgtgtccggcaaggacatatcttgtatctcgggtataaatagaacccgaacccatgtaatcaattaacaatcgttcaatacaatctcggcgcatcgccaccctttttactttcgtttatttcgacgagttcttgctttcgagttgagctgcatcgattcgatcttcaactagaggtaaagcttgttatggcggcttgcattatcggggttaatgcttccatcttcatgatactttaaccctgcttatgtaatccgtcgagttatcatatacatgttacaatctaggctagttgcgttatataacttgttatcgactggttcttattgtttgggaacaattggtagagttatattctgttattaatctagattgtatcatgtatctaccatcttttgtagattttcatcatcttgtttagatctcatacttgtctttatgcttaatgttgcatcggttgagttcgatctattaagtaatatttataattatgatatctagcttgttttatgatcatcgagggagatagtatcggggtttcagtcgatcttacctgacttagctttttgttttatatgcttaattgatttgttaggtctgccctttatattaagatcttatcgcaataaagtatattaggcttctgtttgatatattctatttgttttaggatcttaacatagagtggtatcggagtactagctgatacatgctagatctatctgatcggctatgctacaagtgtttataatctttatgttaatgtatacttctatctaagtgatttatactgtctcggcatggcgaccgatctatctcaatcacttggtttaaatatacatcgacagaaggattatatagcattagtatctacagccgatcgagtagatttagtcttatcttacttattcataactatcgatcgatttacatataacatcggctcaaaaataaatgatatgtcattagcgaccggccgatcggctatcgtttatggatttaaccgcggtttttcttgtttttctttctcgttgattgcaggatcaaatcaactagcacgctcacgaacctaaaagcaagattttggacctgcaacaaagttaagcagatcttccaggctagtgtgtgtttttcgcatcaacaacaggaggctcaacaagagcctcaggtacagaatgtgctaaatgaggaggcccctagaaggtctgaaagagtcagaagatcagctatccgtgatgactatgaagttcataatatagaagagtcgcatatggaggatgatcccacctcatatgaagaggccatgagaagcgctcgctcatccgaatggttggaagccatgaaagatgaaatgaagtcaatgaaaataaacgatgtctgggatttagaagaacttcctaaaggaaccaaaatagtaggctgtaaatgggtctacaaaaccaaatatgactccagagggaatacagaaaagtttaaggcgcgacttgtggcaaaaggcttcatgcaaagagaaaggattgattacaatgagacattttctccagtctcttgtaaagattctttcaggattataatggcactggtggcacattatgatttggaaatgtaaaaacgacacttctaaatgtttggaggaaaaagtatacatggcacaaccgaaaggttttgtcgtgaaaggaaacgaaaatataggatgccgttaaagagatccatttatggattaaagcaagcttcgagacaatggtacttgtagtttgatgggacaataaagaaatttgggtttcaagagaatattgaggacaactatatttatacaaagtttaagaatgggagattcattttcctaattctgtatgtagatgacattctactggctagtagtgatgtcagtctattacaggaaacaaagaaattattgtcctcaaactttgacatgaaagacctcgttgaggcttcatatgttttgggcatagagatttaccgagatagaacaaagtatacattgggactttctcaaaaggcatatatagcaaaggtgttgaaaggcatatatagcaaaggtgttgaagaaattcaacatgtacagatgcagtgcgacacttggtcctatggtcaaagggttaaagtatggggcatgacaatgtcccagaaatcagtatgagctccacgaaatgaaaacaaagccataagcgtcagctgtgggaagcgtacagtatgcgcaagtgtgcacacgccctgacttggcatttatcacagggttacttggcagatttcagagtaattcaggcccagagcactggaaattggtaaagaaagttttgcgttatttgcaaggtacaaaaggcctcatgttgtcctacagaagatcagaatcgctctagatagtggggtatttagattccgattttgcaaaagataatacaaagtcaacattgggatacatgttcacctttgcaggaggagctatttcatggaaaagcttcaaacagactatcactgcagggtctactatgtatgccgagtttatagcatgctatgaggccacggggcaggtgaactggctaaaaatgttcgtatccagtttaaaggtggttgacagtattgagaaaccactaaagttatactgcgataatgaacccgcagtaatatacgctcacaacaatcagtcaagtggtgctgccaaacacattgacatgaagtactatgttgtgaaggataaagtccgagatcaaacaatcaatctcgagcacattagaacaaaaaggatggtcgtggatccgctcacgaaaggcctaccacccaacgtgtccaaggaacatgtagccggcataggtttaagggaagccttatgaatcctagacccaaaagttaaagtatctgtttctgaatagagatgtgtatagtggctgtcaaatccgtcggcgattaaccgtgacgatgaaacatgttctatgtgcaaatctgtgatggaatagaaaaatgctaaaagaaatagtgagatcaatggggagaatgttagatagatctcttccccattgggcccaacagcacaacggggaccttgaccgcactatgattgggggcgcccagcccattggctggtgggcccccatcaccctgcgccacataaatagagggtggaggctagggcggcacacgatacgaggttcgtcgccgccgccaactccacccacaaaaaccctaaccgatcgagggggcgcagctagtgacgggaaaaccatcaccgccgcgccacgccttgccgtgaccgcctacgatcgacgttgccacgaccaccgtcgccgtcatgaccaccgtcgccgctgtctacgtcaagcgcacgacgacaacgatgatggccggcatttcctcctcctcctccaacgcgtcaaccggtgacatcccttaaccctctctgttcctctctgttcatccatccaaatcgtgcaacccgactagatctatggctaggtgaactcactaacaggttttagcgttttcggatctatatagtgccgttcttttttacgcatttatgtagcagtgctaggtaacattccgtcaacatgacccctgtttggttgaggactttaatcatcagtgcttattttatttttcagcgcaaaacgatttcataatcttcggacacgtaatcgaccgggaagtaattttagcgcggatctcacggtgaagaaataatctgcgagaaaagcgcccccagcaaatccatttccattcgtaaaatatatttagagaggcctttcgtttttgtcgtaaccagcgacgcctaaatatggagaaaacgtggagtctactacatcgtactacatgcatgcatgccctttttcctcttcaaacaaagttttctctcaaattacttatccaatatacaatccgattacaccatgtgttcgttacaattaaatcttcacaacaacaagatcttacatgattatattataacgaaaaatatttatatttgtaaattacttttatcatatatatatatacatatatatatatatatataaaagttacttttagatttaactaaattacgtcttagacatttaaaagtaaattcaataaagtctaaaagtaatttgcatctctactattataaaaattgaagatgtttttgtcggtattttggtacgtcatccgtgtatgagtcgattttcaagttcttttggaaatacatattcatatttgagttagtttttaagttcgttcgcttttgagaagtagtcatattagaaatctcttaaaaaaaactcacatgctaacttaatacgatcagactccttattgttactcataattttctaaagaaaaaatatatatccaagcgaattctcacagtgaattttatcttaactaaattgtataacaacatggttaaaatagccttcacccgttgtaacgcacggacatttttttctagtattaaaacaaaacggaagtaactttgtcacaacattagaagtaaattcgttgtaggaataaaaatatgacttcacgtccaatgaaaaaaggcattcattaaagttactttctttttgttataagttacttctataatatatgtaaattacttttacgctttattgaatttacttttatatgtctaagaagtaatttaatgaaatctaaaagtaatttagatatattataaaagcaatttatattttttatcaaaatataatcatgtaagatcttgttataaagatttaattgttacgaacataacggtacaatcagatcgtagatcggatgagtagtttaagagaaaattgtatttaaagtataggtagatagtgttttctagagtaaccaactggcactagctatgttacatccatttccattatgtaccttgtaccgaatgtctgtctccccgtcctccatggctgtagctgcacagttgattatactgtacatcaatataattcccacataacacgacttggcgtaaaacatttgattcttttcgtgacgtttcacgtgtcgatcagcagttgcccaacatcaacactgctattaattcccgcccggcccagccaaacaacgtagtaactgcttcgcccagctcgagtcgtagcaccaaaagaagcaagcacgcctagctcgttatcgatcatggcggccacgtcgccactgccacggtgggcgccgacgccaagtccgtcgcggccgctctggcgctggggctggggcggcggcgccacgccggacgcccgggcggacggaggtgtcaccggttggacctcgtcgttcttcgccgccgtcttcccgtggacgaggagacgacgtgtcgatgacagatgggcgccgtcggccggcggcggagtggggacgttcgacggcgtcgaggtgccgctgccggcggcgcaggcagtttcgcttccacgggcggcagcggacgtcgtcgacgaccccgcggtgttcctgacgtgggaggacgtgcgcgtgacggtgcccggccgcactcgcggctcgccgccggcgaggatcctcgacgggatcaccgggcacgcgcggccgggggaggttctggcgatcatggggccgtcggggtgcgggaagacgacgcttcttgacactctcgcaggttcgttttcgggctcatcactgttacacgtgcatactgtgataccgttaaataaagtagtattagtagttgtgtatttgaggctttcttcttcttttttttattttgaaattgaagtggagaattatcgggggaagcacgagtagcgtgatgatggagtcccattatgatttcaatcttgtagccaacgaatattatacatatgtaggtgggcttttaacatgatttaatttattgtgatcaagatatatcactagttttcatctctgagagtgtgttagcggacatattcataggggtatgattgtgatattacgtctgtagtggtgcgtgcatatgcgtctgttggataatctcaagaaaataatatagagaaatataacaaacttttaacattaaccaacctatcaaaattttatttgtgaaactaaattgttttcttgggacaatgaatagggtattgatttccttgggttttttttttttgcaccagtaatttcctccattgattttttgagactttcatgcgaatcaatgggcatggcatctattcctacgtattgttgcgtttctctgttttcaaaaatcttgtgttcaagggaagccttaatttgtccccaaatagaatcaaccttcaaaatattgtgtgattaacgaagacaattctctcccaacaaaacattttgtttcaaagtccaagtacatataaaaatttaagatgcgcaatttatatttatatttatgtctatctttacggaatgatatatattttgctatctccccatccttttcatgtttgtaaaaataaaacctctgggtatcgttttaaattataccatgaggataatcctcaggcacgttaattagaaaatatcaaataggtgatgcactagctatgttggttcatgtacatagaacggacgcattttccgtctttcctgagctataggggagccaaagttaagaacaggcaaatatgatacatacccactcacacgtgcatatttttcaaagtcgaatggaaacaattttagataagaatggtagaaccgacccaaatctacaactctatacttgataatcttttcatctaaggtcatttacatgttcgaatattcatttcaagatctatttgaattattggattttaaatattttcaaataccttcatgcagagacaaactcttctatgaaattctcaacgagatctacagaaataattttaatttttttctattgcctaaaaatttaaaaatatagcagtaccgttttatgtgtataacaataagggttaattggattcataccattgcaaatttgctcaattaaaaaagtagcactatatatatttatgatatacattacgtggcactaaaatattataaaattagaagcaagccattaccctcaagaattgtgtcctgttcttacccaaacctattcttttgtgttcatcctctctcttgttcatcttctatctcgatcggtagagccggcgatgcgtgcctgcgaggtggcggtggtggatggatgggatctgccaaaaatgacgatggatcgagacatcgccactaccacgacgagcttgtcattgccgcgaatttgctcgcacgcgactgctgctcgctgttgtcatgactgctgcatcatggactcttgtcctttgccgggattgaggaggcggccatctcccagtcccactccctttgcgtatggatctggccaaggggaaactggtggcttgctgcacctctggatctggtgggagggggtcagaagcattgggagagaggaggaaattaaagctctgaccacagtcgtctaatcgctgctgccgagtgtgctgccgctgctgcggggaggaggggtcgccatcgctgaggggtcaccgtcgctgccgcggggagaagagtcgccaattcgccattgccgctagcaggaaggggtcgtcggcgtctcaagagcggaggaaaagcctcggcctaatcgagctaagaggatgaacaagcgagctgggtcgatgaaagtcatatatgcagaattccattcaccaaaatttaaaacaagtatagtgtctgtctacttgttttgaattggtgttataatcactatgcccaaatgagacaaattcaaccgcgggtgtggttggggttcaattatttaggtgccgaactggtcgagggagaggtttgcgtgcacactactaagaccataattgtgaactggagtacaactaattgagtgcacacgcatccactgtacttagctgtagggtatagttcaacagtataggaaattagatctccctagttgtaatacatcgtatttggtcccgttcgagtgagctgattgatggctgatgggctggaatacatgcatgtaacagtaaacataaagataaaatgcaaagactctattcggtttgcaaactggttacgccgttgtatatatacatgtaattaaatcactaaatctttataataagatattagataattatattttgataaaataaatatctattttaacttctaaaatctgatgtgttatgtatgagaataaaaaatttcaactagtattttgttgtgttttactcccttctttccaaattgatcatcatatatgtttatgcatcaataccaaggataatttaaatcacatcaatcaagacaccatacacacattctctcagaatgcatgcatcgattaaaacaccatacaaattacatcttagcatgcacatattcttgcacaatgcattaattgtattctgataaaatccgtatccatacggttatatgatgatcaatttaagaaattttgaataccattatatgctaatcaatttaggaaggagggaatacatttcacctaaatgttctaatgactaatttttttacaacatataacttggatttgctcatggtaaaatgtaataaaatatttggaccgcctaatttttagcatggtcggatgcccgattcttagtttagccacaaaatttatttgctaagggggtgataatgctaattttggttaaaatattaagctagatgggaggggtgctaaggccatccccaaccctccatctcatctagtgtccatagcattgaatacattgtaacataagcaaaaatatgatgtggcaagagagttaatgagcaaagaggtaaaaagatgaagaaaccatttctcatgcaagaaaccatctctacacaataatcaagaataaaaataatgggataggtggataaaaggagagagaagaaagatgattggatggtaatttaatttgaaaacaccatccattggatgtatagtttctacacatagtgtctatatgacatgacaagtatgaaaactactcgatagattctgggttaggggtgacctaatcaatttaggaaggagggaaaacatttcacccaaatgttttaatgactaatttttttacaacatataacttgaatttgctgatggtaaaatgtaataaaatatttggactgcctgatttttagcaaggtcggatgcccaattcttactttagccacaaaatttatttgctaagggggtgataatgctaattttggttaaaatattaagctagatgggagggaggctaagccctctcctcccctcgtcttaggaactgctttaatgttgtaaataaaaatatttctgaagtgttctcgtacaaagttttagttatatagtagtttaattatagatggaccttttatacttgatctcctgtaaattaacatatgtcagatatacgaattcatatagttggtaacttgatgtatatagtagtaataactatcgtgttggcctaagtacatagtaataataataataaagtaatagttcacaaatgacaagtgatgatgggctgtatcagattaatttgtggagttaatattcggatagaataatccatgttcgttgcctacaatcttacctataacttttgatgcttttcactagtaacaattactatattctaaaactcaagatataaatatgtcacatcattacccactagctagtgcatcttaaatctcctgaaaaataacccgctatatacaatttattatattctaaagctcaaaatacaagtcactacttcaaaacaacggataggtgccggtggagaaatctgtcacctaaagccggttcccaaccaacacctatcctcttctttgttgtagtagtgacttattccctaccagcacccaacaagcggcatctttgaggagagctaaaaggtgccgattcaggaacctgcacctctttacccaaccaaattccatagaacatttaattcatagaatgaacatttaatccaagaagaccaaacactaagaacacaaagaatgggccgatgtcgaggagcggagggtgccacgcctgtcgccacctccctcccaccggatctggtagagggggcactgtatgtagcggaggggagtgcgtagccaccgtcgcttgggtagctcgctgcctcccctcccgtcgaatccggtggaggagatagcgtcgccactaggtggggatggtcgcctccgcagctggatgggcggagtcgcacgtgagaagagagagaagtatgcaagaggaagattgagagagaaaggcgtgtaagaaagggacaccggggagagggaccatgtcctgctcttcttatcagctcgagcgaataaggacgagtggtcggctcggctcgatttttcgtacgctggtttctaaaaaaactggtatctataatatattattgatgtcggctttttaattcactagcacctataataaaataaagatgtcagtttttttttaaaaaaaaagagatcatgttggttttttatagaactgacacatataaccgtttaaaggtaccaattttttattagcccatggaggtgggaaaaatactataagtgccagttttagctattccactatctatagtgtcaatctatttatgtgcctttcgatagtagcgagtatgtcgaaacatcaccccaaacatcactttcttaatattgcaacatatatccatatctagcatttctataatatataatattcatgtaaagtgcccgatatcacatagttttgtacaataattattactacatactagtgcacgctatctatgaaatgtgggtccagtattattatagtaaaggttaatgtttgcagcgtcattattgcaaatctcccctttcaaagagatctagtactaatatttttgatccgtacatgccgtctaacaaacattaattggccaagttggggtaagattattcatgcaaactaatgctattggtattgagtaatacatacagttcattcttaactaatcgatctcataatttgttgatctaattaacccatatcaagtttgagttgatggtaacatcaacaggataagcagcgcgcctaatcgggtaacaaaaaaatcattgcgtaattgttttataaccacagcctgctggtttgaccgcaaggtaaatcaaaaacttaaactaatactaactctctataaccttggactcgcggaaaaataatgaataataatggtcgcaatccaaggcgctggagctggacacatgcatacgcctactgctgctttgcccttctgacgctaactagaaaattaattaagtcattgattattagttaactaattaattaaaagcaatcaatcgaagattcttctggctgcctatcattaagacgtacagagaaagtatgtattgtgttacagtggcttgttgctacaatatattgtctccgttctattaaaaaataaataaaagatatgacgcattttaatagaatctaggcagcagagttgcattcagatttatattactaagatatgttacatcatgtattaaattattactaagatatattacatcatgtattaaatttgttttctatgagatgaaaagagtatttgtcaataacgtaatcatatcatcagtaatatacaaatgaagtaaatgctaaaaaaaagacataaactagaggtgtactgtgaactagtgggtgcatagtgatcagtccaaatcaagattaaatcctgatggccacaattacaattttttttatctagagaagaatattttttacccggtttttacatccaataggatatatacatctatttttaaattagaaacttagcctatcaaatagagaatttagccctcaaataacccaatctaaaattcgcaattacatacgtgtggatatgttttcaaaacaattttactgaggtttgaggatttaattttagtgaggtttaaggttttgaagacttcttttagtattcaaggataattgggccatcattaatttatcgaagaaattaaatataacagtataaggccatttccaacccaaaacattagacatagtttctataaactccacatcaataagaaactagtttaatgctacttatctcacatgatattttggatgttgtgtataaaccatgtctcatgcaagacatggttttcttctttttcacatttatttacttgccacctcattttctattctagatgatagcttatttaatactatggtagatattattctagtcattgtgttgggaatggcctaatgttgacctaggtgggcagtcaaggaattagtttgtcgttacactcacgccgctaacgctgtgcctatgtaggccctgttcagggtgtctttagttcatgctaaaattagaagtttggttgaaattggaacgatgtgatgaaaaagttggaagtttgtgtgtgtaggaaagtttcgatgtgatggaaaagttggaagtttgaagaaaaagtttggaactaaactcggccttagattccaactttttttttaaaattctaacttt

SEQ ID NO: 10257 - DNA, 19515 bp, Oryza sativa
ttatcaaatcaagtaattgcaactactatcatgggcttcttcagaaaacagcgatctgatcaagctgcaggttcttgagcattaagaatccaacaaagaaaagaacatatctaagcaaaaaccagaccaagctgccaatctgacgatgaaaaacgaaatggctgccttactggtttctaaacaatatgagtaacaaaaaaccttcactaaaactacaactactccatctaacatggtagtacctaccaaattttttgttaaaaaaagttctcttcgttctactgcacatcgacccaacaaaaaaaactcaggttctagctgcgagacatttcaaactgaaaggactcgacgttgtatacctagattcaaaaataaattaacaaatctgcctcactagcctaacacagcaacaattcatgcggaataaaaaggatatgaccaagcacttcccgaattctagttccatccaaataccacagagcgcacgcactctcactctcatcgtctaccccagttggtaggaatcacaagggttcaacccagcagcaaatcagacccacaccaagaaccaagatcacgcgaaagggacgtcgtcctcgagcgcgatcgatcacagggggtaaagtaaagccacgcacacgaggaagagaggggagagagggtagggtaagggagatcctcctcacctggcggcggccggagacggagagcgcgcggtggagtgcggcggcggcggcgaaggcggcttctctgctcgggcggcggcggctgagggttttgcgacgagtgcgtggtgcgcccctcttatagcgcgatcaggtctatctggaccgtccgatcgggctctcgcgtcatctgggccttacgactttacgaggagtagtttcttagtgggccgggctggaatctttcatgggccatttttttcgagaaaagaaatgaacacgcacacaaaaaacaacaaaaaaaaaaaacgatcccccgccgccgcggcgagtccccacggcggcggcggcggcgtcatctccggcgggaacggcgttaggctgggcattcaagggcagggcgacgagcggccggtgatggtgggcactgcatccagcgcgatggaagcagcggccgcccgcgtcgagtccacggcggcagcggtgaccgaggagacggcggcggcgatggcgatgagggttgcccctagcttcttccatggcgcggacagctcgctgtgcagtttgttgctccatcccccgacgagcggcaacttccattgactgggaatcaggttgcatagtagcagcagcgactgcctcctcctggatttgaccgaaccggcggttgaagaagaagaaggtggtggagctccatggtggtaaaaccattgcatatgcgttgtcctcctcgttcttccatttctcttaatttctcctccattatcaccaacagagctagacaagccggttcagcttccaatttttgatatattatatttttttgtgtggaataaacctaggaaaaataggaggatgaggagtcaagattgcagcggcaatatcactaggtggtgcacttgtttttgccccttttgtttattactatcatcttgtcttctttccaggaacaaatcttttactatacattctaatgcattgatcattcatactctaagagtgaagggggaaaaatcaactctaatttcctttctcaggtttccgaacagttgatgcttaatctggtgtttgttatgttcattttttcataatttgcttattatgccttgttaggttcattctttgaataattgaacttaatttgtttggagaaggggcggcatggtaccaatgaccaacaaagaggtaactttccagattgctatgtagatggtgattttactgtcctgtgtatgatctgcccccataatcatcatgatacagtaaagttttatatacaagtcaccatggtacaaaattaaagtgttacaaagtgctccctccgttcttttttgtttgacgtccaacgtcaaacattgagggatgtaggtagtattcattatgaaaattttgaaagcagcagtgattgctagtatgatttcctggacatgcctgtggctgtgttgctaagaacatagggaagcactttattctgaaagtggagaacctgaaggtggtgaacagccagcaaatccagatttcagtggaggattgcaccgacgtgaagatgtctcgcctgtcgatcacagcaccagaaactgccccaaacaccgatggcatccacatcacacgcagcagagatgttcaggtgacagactgcacgatcaagaccggggatgactgcatgtcgatcgaggacggaaccaagaacctgcatgtcaagaacatggtgtgtggaccgggacacggcatcagcatcggcagcttgggggatcataattctgaagctcatgtcaacaatgtcaccgtggacaatgtcaggctgtatggcacaacgaatggagctcgcatcaagacatggcagggaggaaagggttcagcgaagaacatcgtgttccaaaacatggtcatggacaatgtctggaaccccatcatcatcgaccaaaactactgtgactcttctacaccctgcaagcaacaggtatacaaagttaaacttaatttttgacataaaatcatgatgatcaagttgaatttaatttctttacctattattgaattcgtctgcacggtttagcttaactagagataattttgattgcagaaatctgcagtggaggtgagcaatttgctgttcaagaacatcaggggcacaagtgcatcagaggaggccatcgtgctgcattgcagcaacagtgtgccttgccatggcataaccttggagaatgtcaatctcactgtcaagggaggtagcagtaatgccaagagcacctgccagaatgcagaatggaagaaatctggtgtgtcagtccattgccctgtggtttcaaaaattgatctggagctggttggaacatcagattaagtggaggatgtagagtgtcagatgatctttagagaagattatatgtagagtaggaggataaatacgtagcggaaactacaactttggtgtaaacttgaaatcttaggagggatacatgatgtgtacagatagatactagatagagaggccctaaattgacagagtgtgcgaagcaactctctgggttcttgagggatacatgatgtgtacaggtatatactagatagagaggccctaaaaaattaaccgtgtgtgaagcaacactcggagttcttgtactgagttcttgttctcgaagcctcacataagtgatcaaagcccattgcgagctatttttttaattggatatttgtttggatggcttgaatcttgtgagaacataatgatgtagaacgttgtaattagttgttggctgcaagattgtctaggcaatatgtactctgtaagatatattatcactttctgatatatttagtatcattgtttggtcatcttttggtgaattgagtggaataatttatctgattttgaatgttagttgtatttcagtatgcggttgttattaaactgggagatgattttcgggtttgctaaaaacatgaattaaacattccctactatgtaaaagttcaagaacaaatgtagtggaacaacttctacacactagagaatgtgccgtgtaggcatgcggttccctactataaaaaatcatagggaacaatttcccccctacgttttctcgtgcaaaatcatagggatatttttctttgccaacgtttgtttccctacaaaacatggtagggaaagccttccctacattttttttgtctttccctagtaaaacaaagcataggtaaactagtgatttctggtactacatctgtcccataaaaattgaatttctagctttgaacttttgtccataaaaattgtatttctactaatgtgggacccagtaaattgattacatttccttgtaatcttctttccttccatctcctctaacccattgttttgacattccttttaatcaagtttatatatggaatgtgtacatgtactgtgttcattaaataggttattgtagtcatttgtctatccttctaatatgtccttaattccctagaaattcaatttttatgggacggaggtagtagtgcattattgtattatagaaccccctaagaacacaacgtatatttctttttggaataatcaagcggggccattaataaaatggaaccaagcattagttctcgaatacacatgaaaattataaggaatatcaaaatggaggaaataggaatgcagtatccaatacaaaagcttgatgcagtggctgatggacgcatgtaagcagagagactagccaccgaagggccatgcaagcttggttcccttggactttgccagcagacgaatttgcaaggccaaccagaggatgtaaagtgatgagaggactataatggggctgggacaggatggtccgaccgagcaaaacgacgcatgggggatgattcaacatgctggaagatgaagacaatggtaatttatttgatggggatggactatggagaggagatggtgtgaaggacgagatgtagagaacgcaaatgggaccccccacgaacagggattgcacctcaaagagtacactgctagcaatattgtactatgaaagtttttaatttttgagatgaaagttttcaaatttgagttgaatgtttttgaatctgagatgaaagtttttaaatctaagttgaaatttttcaaatcttgacttgaatttttttaaatctgacttgaaagttttcaaatcaagatttttgaaactttcaaaatctgagttgaatttttttaaaatctaagtggatagtatttaaatcttgacttgaaatttttaaatctgagttcaaatccgtatttgaaagtttgtttcagtcaactaaaaaaaggaagaaacagaaacgtgatgaatttttatctagaaaaaataaagaaaaaaagttagcgctaagcgctgttagttagcactaagcgctcttagcgccaaaaaaacgcgcgccgtgtctcctccaagcgctaactttggtgattttcagtcataaaactatcaaatagatccaccgagaagttctccgatgctttgcaactaggaggaacaaaagttggagctgacaagttgtagtagtgtttgcagttttggttcaaaatttccgagctccacccctcggcatgaaaatatttcatttgaaagtttcatcaatttttatgattttatcaaaatttattcgaactcgatcaaaatttcaaaattattcattctgaaatattttaatccccccagtagatttgtactcatcgaaactgtaaaccctaactggaccttcggcgcaaagcaaatagtgggagagagagagaaggggggggtgaggattggaggacaaattgaggatgatagaagaatgaaccaaaagtaaattatattatagggcttagtttggaacatgttaagttgttgagatgtgttgtttaatgcatcgacatgtgtcagaagtctgtctaccaatattattgaaaaactatagattctatatgataggatataatccagaacattcttccattcacctaataatgttactcatctttttggtagttggtttttttaaatggtgttcaacctaggctaaaatattaaatctttgttggtatagtggcattgtgttgggcggtatggttaaacagaaaatggtgcagtctttaatggctcgaaaacgaactcatttttataggtgattttcaagggggacatcttgggcgcaacattggtcgctgctgcttaaagagaatcatggcaataggctgaaagaatgctgcaagccattggaatctagagattggagttcttttctaagtttggttggaatgtgagaaagagaatagatgtgtagtttcttttctccttgagtttgttgtttaaatgattttatctagatggttgtgtaccctcttgtaaaggggagtgggtctatgtgctcatatttagacttttggccgtgtacatccttgattccttgttggtgtagagaccaggttttaatccattatgtaaaaattcagaacattctttcatggtttcagagcaattcttgtattatctcagttacgacctacagatggggttgtcaattgtttgatgccctaatataatgacatgtcattgagataccgatggcatatctcaaactttgaaaaattataatggtatggttccaaattaccctataaaataagaccaactaagacaagaattcctgtatgaaattaggaggtacttctttttgcaaggaaattagtaggctagatgaaaggatttaccaaccaattaaggatgatcaaaacatccccaattaagcttgagaatggtagttccagagctgtcagacattccatacacagtatgcatggtcctctgaacgtcgttgcatactatttccagaaatccattaaaaaaatttctgttcttccccattcttggaagcaggttgtccatctgattactccatgaattctccatactttcattaagatatctgtgagaaatctcctgaaatctgcattgttttctcttccataggctaccttggagccccatacgtttccattctcagctaagagctaaacatcttatacctgaattttatgcttctagattcatcagagacgagtgatcggaacagatcatgctgctacatctagattataccacgttgacattcccatacacatgccattttttcctgataacatgtcattagcaaagccattaggcacataatgacttgtgaaactgcaaatggaagcctgtggatcgtacatctgtcagggttcagttttcatgtaagcttaattagtgttagtggttctcaagagtgcagcactaacgaaatgtgtaggattatatttgagctgattatctgtacccatgagtgctccaagtgtccttgattttgctttcttagtgctgaactgtccataggaggattagctaagttggaagctattactgattagccatacaagtagaccacatagtgaagcaacaagagtgaggattcaggcacatttgtctcagttcccaacttcccatgctgacagaatctagtggtactaggctccaaatatctgaaccaacctagctgatcaacaacaagcaacctgagttgagaagatccaaagatttctaaccgctttcggcgcgtataaatagaccccctgattgaatccttggtctccatcgatcgccacattcagcaacacatctcacaagaccgaaactgcaaactttgcaagcatctctgcatagtggtttcgtctgaattgtagtacacattttacacctggaaagatggcttgcaatgtgctccttttctctgcatttgtcgttgtcatgtccttcttcttgtgtagtgttcatgccaaggtcaacatgaatgcatcctctttgactaatggagatgatagtctgagaggaaagtcgtctctcgagtcgaagaaggctgtgttcgatgtgcgcaaacatggctcttacggagatggacaacatgatgatacaaaggtacaatgcgacaccgtataatgtctttgttttattaacaggcgactgacgaatagcaaaactgaactactaccattgttgcaggcattgtcaaaggcatgggctgcggcttgctcctctttgcaaccttctattgttcttgttccaaagggcaagagatacctcaccaagcacattacactatctggcccatgcaaatccagcatcacgttcatggtgagaaagatgcacccgtgcacttacatttactttcatgtgaaattcaattactcgaaaatcttatgttcctgaaaattttcagatagagggtactttggtggctcctccaaagaggtcagattggagcaaggaaactattaggcactggattatgttcaatggtgtaattggtcttactgtcgctggcggtgggacggtcgatggaaatggcaagatttggtggcaaaattcttgcaaaacgaatgcgaaacttgtaagtgctctgaatttatgtagctttacagtcttccattttatttttggaactatctgatgtgaaactttttttcttttgttttctttcaggcatgcactgaatctccaacggtgagtttgatttctaatcttctagcacatcccaatgcaggaaccttgggtattttgttctgacaaaatctgaattaattttatctgacaggccttgacattctactcctgttcaaatctgaaagtggagaacttgaagctactaaacagccaacaaatccacatgtcagtggaggattgcacaaatgttaggatctctggcctgacaatcacagcaccaggcactagcccaaacaccgatggcatccatatcaccagaagtaaaaatgtacaagtgacaggctgcacaatcaagaccggggacgattgcatgtcgatcgaggatggaactgagaacctccatgtcaagaacatggtgtgcggaccaggacacggcatcagcatcgggagcctaggcgatcacaactctgaagctcatgtcaacaatgtcaccatcggcactgtcaggctatatggcacaaccaacggagctcgcatcaagacatggcagggtggtcgggggtacgcgaagtacattgttttccagaacatgatcatggaaaatgtttggaaccccgtcattatcgatcaaaactactgtgactctgcaacaccatgcaagaaacaggtacagttcttagtgatagcttttgtgttattcagttgtccatttgtgtgaataatatggaagcttataatttagtgtttttgtctcagacatctgcagttcagattagcaatgtggtcttcaagaacatcaggggcacaagtgcttccaaggaggctatcaagctggactgcagcagaaatgtaccttgccaaggcataaccttgaatgatgtcaagctcactgtcaagggaggtggtggtgatgcgaagagcacttgccgaaacgcaaaatggaagaaatcagggacagttgttccacagccttgtgcttccacaacaactgtatgaccagccaatccagccaacacgctaattctactagcacaaggaaaaaaataaattagagtgggctttgatacaatatcacttcagataccttacttcaaaatggcatttgcatatttgtatatttagctcattttttccccattaggtggttttaagcccactattatttctctaccactctttaaattccatagctatctattacgcacacaggaaatgaaccaaactaccccatccccagttcaattaaaacggctagatccaaccacacacctaaactcgtgtagcgtagccactgctgtattgtgaaagctcgaactgccgcggtcttttttttgttaccacaaaggatgacttcctttgacgtgccaattattactaatcataaacaaatgacttttgtacgaattcaaatatcaacgctctccttagaatatggtatttgtcaggttgctttgcaacaactacctgcttctttacagaacaatttcactcatgtgttcgtctaggaggcattagcatgatgcaataattttacacaagcatacgtgtgaggcaagaggacataagagactgagttggaaacatgatctaagcgttctaaaataggggaaattattttctatatatctattcctgcacccattgcatatacagaacttgactgttcatcactacaacctggatatattgatcttcccattacttgttgcatgacacacagaaatggtgctttaatttgccaccaacatgcattttctccctcgttatgcttatctgggaactgatgataagatgcatgcctgcagtcatgcatgtggcataccatctccccaacaaaggctatatattcagatccttgttggataatgccagttaaaaatatcggtttgcaaaagctagttgtgccaaaagatttgctttttgaaatatggttgatcagtttacctatttggtgaatacataggctataaatattgcatgggattgtggagaaaaccaataatatacaaaatattattattccgatacaatacaagattgttaaacaattaaatttgaatatgttggttgactatttctaacaggtaggagatggagttagaactacaaaatgggtgtaatgtatattgtattttgttgcaacagttgtaccttatatatttttgtcaatgtggcatgagaaacaataaaaacggtaagaattagtcacatatatctaattaaggacctaacttatgcatggttgttagttgaatcttgcatatagatccaaatcacttcatatagatcaaccatccaaacaaacatacccattcataacagagtttaaaggcctttagctccattttttaaaagtttcactgttacgcgattactcatttgtttattttagctacaacgggattattttatttggctccaacgggattattttattcggctccaacaattgttctatggtaattatagctacctcaaagagctatggctcatgataatgatagaacgtgcgttccaagtattaaatattccatttttctatttggtaaaatctaaatcactatatcaggatatagatagagtgccgctgctaatttattcttttgtttattgacatttgctaaataaagggccttaatttctgttttgcacctaggcctgaaattcttgtggtactgcgacacatcatccaatccgaggttagtattcacaattaatattagaaatccactataatatcatccaaaaaactagattgtaaacttaaaggtgaacatggaactgatatgtttctgaataggtgggaatgaagccattagaaataaaataaggtataatgtataatgcataatgtgttgtgttgtagcgattataacttagtatatattttgtcaatatagcaacaagcacaataagaaacaataaaattgtgttgtttttctttttcttttcaaatattttttatttattttgaggactatccacctgttgaatcagtcactgaaaataacattagtccttttaatcactcatcattaatcagccaaaaatcgctctaggatataggtattggatacacacagtggagtagcttgttgtcctacatggcgaaatagagcaaattaaattgaaaatataatgttgatttgttttttcttagaaatatatgtgatatatttttttaaacagaaatataccgtcggtctcgcacaaacaatatgtgaaaataacgtgacgtgacgacacgggcagactcacatggcgacgaaactgcgagaccgtgtggcaggccgattcaaattgcttaattaccctctctaatcaaggtaattactcactaattattattaattaatcgctaattggtgattagtcactaattaagcgagagctcaccagagaagccgttcgctctcgctcattcctcgtcggtctcgctgttttctcgcgcgagaccgcgctctgtttcagcgatatcgcccggtctcacgccttcctcgtgcatgcttcccgtatcgtcacgcccgcgccattctcgtgtaacggttgtgcaagaccgataatatatttctgccaaaaaatatcccgaatattttaaaaaaccaaatcaacagtatatttttaaatttatttcaaatacagctgcccgcgaaaacaccattaccattagcttgctagtgccatcaagccactgaaggggtggccctcccacagttaaatcactgaagctagcatgaggcagcagtatgctgacctgccaattgaaccgacatgcaaaattcaactggtacaagagataatacaatttatttgcaaatcctaaatagtcatgacattgcacgttttaaattaagttccattttctcctgtttgggggtttcaataagcccattttgatttctttaccactatcttttccacagccagtgccctccaagtgaaccaaattaaactacctacttctcccttgttagagtagactggctggatccaaggaagatgaccgagaccgcctccgacctcatgcagcagctgcagtatcgctgagctcgagtcaccaccactgccttcttcaactagcatgactttcttttagttaccactgtgatatgagttgcatatgtgccatttttcaatttctcaaggcgctatatcgttactatataaagtacttcttttgtttcatattataagattttttaggattgcccatatttatatatatgctaataaattcagacatatatatgtgcctaattcattaacatctatataaatatgggcaatactaaaaagtcttataacctgaaacagagatagcataaatattagttcaaatatcaacaccattactagaaatgacatttctcaggtttattttaagaatatggtacctcctggtaccttctaatttataaccattacttgcttcataaggaatagtttcactcgcatgtgcatcaaggagccacattttgcatgatgcaatatttttagatatacgtacatatgtattagagagaagtgcgtaaatgaccaagatggaaacaggacgatgaaaatgttctataatagttgttgtatatctattcttgcacccacaagatatcatttcttcctatataattagtacccactaaaagtttttttttttctgtagagctcaaattctctgaggccacaccatcaagatcatcttgacctttggatcatcatgcatctatgcaaatcaaccattagatcaagttcttctcgttcatatatcaggcctaaaacaactgagcaagtcatggccggcccagcccaactcacatcgcgcacactcagctaggctcttccccatcatctcatcgtcacctcatcttcttcgcgtttcccaagcacaaatttttttgcctgtattcctttgtcctggcacaataaaaagaaacaaccgtaatctatactttctatgtagttagtaccgacttacaattattaagagctaaagcacaacatgcaagtataccgcctcatcacctactagtaattagcatcttaaatttcatacaagcatgacacatcatcttctcccacataacatttttgcattctcatttgtacaatattccatccatcaattccgcagcaaagcgcttgatatcacctagtttctactatcggtcagctcagcaactgctgatggcatccaccaatgccttttgtcttcctcttaattaccccatgcacatatagatatccctttatcactaacccctaagagcatctccaatagatgactaaaattaaactcccaaaaatcctgtattggggacagccaaaaacatatttagcctaaaatacaccctcttctccaatagatgactaaaatttggttcccaaaaatttaaaatttttccacatcatcattagtgggcccttcccaactaattttctacctgctcgttaaaatcacaggcgagagcggagggggagatcgcgtcgcgcgtgagaggcgaggaggagatcgcggcgtgcggatgcggaggggaatgggcatggtcgacgcgacgcacgcggacggaaggagatggctgctcatcctagtcgcgcgcgagatcgcaactgataccgttggcgaggttatatatcagacgcagcgatatacgaaattgatcgaaggacacagtgctatagacgcacatagagctcttcctctgtcagcgccggcggcgttagcacttcactcaatcagagctcttcctctgtcagggccggcgacgttagcacttcacttaatcaggcaactgcagcaagcagcaacgattggtgacaggcacaagctcttgtgcagtgcgtgagtagcaaaattttgctagcaaccatgttttttactttgttctatttcctttttttatgtttctgatctgacaatgtcttgatggaaaaaaaaacttaatttgatatgatgaataaatatttggaaaaacggaaggccaatcacattttttttaatttgatctgacaacgtcgcaaggggaaaaacttaatttattgtgatgaataatggtttggtagttgatttgatccaagatgagtcgacctcgctcctcgtttcaacagctcgtggatgaatcatcgtctgacgatgacgatgattttttttttgccacggcacaaatcgtccatagctattggcactctgtcaatgcaccaagacatggtgggtcagtcatgggacatgaagtgattgatcgcaacagagaagcacggcacttgagattataccaagactacttttccgataatcctacctatggcccagttttattcaggcgcaggtttgtataagtaaattttatataatttatttttgttatatgcatagatatgcatgtctcattagttatgattcgcaggaatagaatgagcaggcctctgtttctccgcataatgaatgcagtagaggatcacgatgactattttgtgcagaagagaaatgcagctggtttaattgggttcagttgtcaccaaaaggtcactgcagcaatgcgtcagttggcttatggtatagcagcagatgctttggatgaatatctcggtattgcagaaagtaccgctatagagagcctgagaaggtttgtgaaagcagttgtacaagtttttgaacatgaatacttaagatcacccaatgagaacgatacaactcgattacttgaacttggggaggacagaggtttccccggtatgttaggctccatagattgcatgcattggaagtggaagaactgccctacagaattgcacggtatgtaccaagggcacgtgcacgagcctacaataattttagaagccgttgcttcaaaggatctctggatttggcacgctttttttggtatgcctgggtctcataacgatatcaatgtacttcatcgatccccgctatttgcaaagctagctgaaggcaaggctcctgaagtgaactatagtataaatggacacgattatatgatgggatattatcttgctgatggcatatatccttcttgggccacatttgtgaagaccataccagaaccacatggcaacaagaggaaatattttgccaaagcacaggaagcagtaatgaaggatgtcgaacgagcttttggggttctgcaagctcgatttgccattgttcgagggccagctcgacattgggatgaaaagactctgggatacatcatgaaagcttgtgttatcatgcataacatgattattgaagatgagggagaagttgattgggaagaacggttcccagagggaggagaaaatgtcagagtgtcccacgatgaaatacctgatcttgataattttatccagatgcacaaaaaaataagggacgacgaaactcactatcagctacgtgaagacctagtggagcacttgtggcaacattatcctgataaatattgaggttttatttatatgtttgaattccatgtaataaatagtatacatatgtgaggatttgcaaaatcattttaatttgttcttcatgtattgaataaatggtgtactgttcggtttaagaatagtacaggagaattaataaaagtgcacttcctttatgcattttgttgaatatgtcggctggcagtgataaatgtgtcatgtggtcttcctgtcaatcatgaaaagccacagatgaggtagaggccccagaagcttttcaatcatgccaggaaacaatcaaacatcaggctctcagtgagagacaatacagattaccacaggtcaatagcaacatcaggctctcataaagtctgattcattacacagactaacaccaagggcatgataagggaagtacccatctactaacaccaacttcggacaaaacaaaaagacacaattctgaatataaatagtttgcattgcagacttagtaaacctagataaatttctaacaaaccactgatctaaactgcagctacgattgccatctctttccctcccattctctgatctggtcacaatttgttcagttgcttcttcacatgtacgaaggtctcagcgaggtggcttccctgttgatagcaataagatggagttcgaattaaccataatacatgtacagagtatagagctgccaagttttctagtctattttaattagtaatgtacaatatttgaagctacctatatgtttgtactgtaaacaataattgaagctagctagtactgcaagtgatttttttgactgatcactgtcgaaaatatggattcagtaacctatcattcaaactgaaattgaatatgcactcacatggatcagttgatcatgcagcaaggtatttgatcttcggctcttcggtctctgtaggttcattatcttcatcaacatgattggtagtatcatcatttgtgggtatagcttttcccaaaccatctgtgcttgccttctgttttttggtggcacagggtttttgggatgttatttgcttcatcttatcatgccacttggattgtgacctcaagagagtccaacagtgcaggaattggaagggcttatcttccaactccttaaatacagcaatggcctgagcaatctgcacatgtcaagtcaagtgaatgtggttagcaaacatcatatcttttatttataaactaacataaaaacacaagctacataactatgtagtaccttgtcgtgtatactaaccccgctttgtcttctaccctcaatctggctcagatatccacaaaacttgttgacattctcttgtatagttttccaacgatgcataagtgaattctggctgcgatctggtgtggatttactcgttttgtataagtgctcgtatattctagtccaatatgcagcacgagtttgatttgtgcctagcactggatccaaacttacatgcaaccacgccgacacaagtatcttatcttcttgttcactaaaattcttcgatcttttttgatttggtctagccacggtagtcctctcaatagtggggaactgctgcgtgacaggctcactactcatgccattctcatcaagctggttactcatatcatcctccacaggcatcgtactcaaactatcccaatctaaggaatcgttcccctcattcatcaaattagtatagaatccttcttcttccattatcagtaggacctacaagcaattatctccatcatgtatgttaaatggaagatgattattttgtttacatgtctatctaagcaatgcaatgttgtctgtctgcctaaaaaaacaagatgatagatgctattcagatttttcgtttgatataatattttagatttgtagacagcagcctttcaggtggtgtgctgacttaagtgcacatgcaccatggcagatagcatgccacacctgaagatctaaaatatactaacattgttcaaaaaaatttcgaccttaattttgaccttaatcatgatagaagtaaaagtgggcacaagcatatgacacacaacagatggaactggtcaatggaaacatacctcagattaggcctcagtgcagtgtgatactgacttttatgaatacaacattcaaagcaaagcagttcagtgaaaaaaaaacttaactatagcagtttagggaaaaaaaaaacttatactagttcaggggaaaaaacctcaactataccagtaaagaaataaaatcttcagtagaatatgaaactagcatgtcccatttgtcttcttgaataaaatagttttagtacaattaagtggacttcaatagaactttagggtgagaagaatatggtctgttagcaacttgtgaagactattttggacatattcatctaagacttgtatcaacgaaaacaaagaaatacacataaggaccttgtcagtactaggatatcaatggggataatatcagtgagtcaacctcaattgaacacaaagagagttagatccatggagagaagcagaaaataaatgagttgttactctgaaattacctcaaacaaatccagtagcaactcacgtcgttgagaggcgaggtggacgaaggggcacagactgccgacggtccctggattgacagtcgatggtgacttggacggaggccgctagcgctctggacggaggggcggcagcgacctagatgggctgccggcgacgccctggacggaggggtggcagcgacctagatgggctgccggcggcgccctggacggagggccggcgacgccttggagaacctgcggcgtcccggacggacggacggctggcggcgccctgaacggagttggcgcgaggagaggaagctggcgcgaggaggggaagaaaggcgcggctcctcccggcgaacgaagagacggtggttgagggaaagcgcgggcgaggaaaaaaattggcgccaggaaaagaaaaaacggcgcgggcaggaacgattgcttcgattgggagcgcttctagttgcccaatatttggttcaggttggtcctggttttggaggtggctaaattttgggaccatgtttaggagtctgttggagagctgattttcaccaaattcctaaaatttatgttttagtaacctgtttagcattctcttggagatgccctaacaaatacatctcccagtcgaaacctacaccaccacctctgcatctacatcttcctcattccctttaaattgtatactggatataccaaccatatttagattgatccgatgggttttcttgggaaatctgtgcttgaaggcactcccttaatcgtctgaggaaatgccggtgatgaaatgaaatttggtttgccgctatcatagatgacattgaaaaattgttagcacagatcaccaattgaaaagacatctctaccactggcctggcgaaaaagaaaggacatctgtctcctaaggtgattggcttttggtactttatcatgctttagattattttgatatctgatttctattcatttatcaccaatcttaatatgccaatgtatcacaaattacaaatatggtaactttcaattttctggttagtttgcagcatatcaaactatcaagaggatcgagggatcgatctactctcagatttgaccatctacatctgattaaaaagttgtgccaaatctctatgtcttgtcttttagaccgccaaccactgattttttttctccacagttcctctcattcactcataggtaaacgtgtttcctgaaaaattatttccagattcatgtactcaacacttatttctaaaatcgtatatcagcatatgcatgcaacactacccgtattttctctttgttttattgccaaaaaataatttcttagttgtttaaaatatagtacatgatgaagaatagtgtcttatttgcctaccatccatggtt

SEQ ID NO: 10258 - DNA, 27201 bp, Oryza sativa
gcctcccctcccctataaaaacaatcccccggccatcctttcccttttccccaactttcccgcactccccgcgctctctcccgctctccccacacgagcccaagcgccgccgatcgccggcgaccctccagccggccgctgccgccactgtcgacgtccccgcgccgcgccgcttgcaccaccggcttcgccgtgccttgccgcacctcggccccactccgttttcccatttcatcgccggaaccacctccccaccgcgctccctctctccaccactcaccgacgagctccggccgccgctcctcgccgctccagccactgccaagccgcgccctaccaccgtcggcttcgctgcatcgcgtggtaccccggccgctcttccaccttcgttggagaccgccgaatcaccgccgtcgtcttcgccccgtggagtgctgccgcctccctctgctcgagccccatcagccgcctccttcgccgccatgcccctcggtgagctccgccgcctcccttttcgcctcctccgctcgttttcgccgctccccggccgccccctcgctcgtcgggccgacgccgccatcaccgttgtcgtcgtcgtccttcccgcgtcggtgagcatctccctcctcctcccctccctttctttttctctctttgcccgccggccgccgcatgcgtgtcgccgtcgcgccgcgccgcgccgccgccggtgtcgccgccggtggccgtccggccgcgcgccgccgtctggtcgggttggtcggcgagccaacccacccctccgccttgcacctctaccgtggactcggtccacggtgggctagatccttttgcccgctgacgcgtggggcccgctcatttggtggacccggtccaagcccgcacctccttgacccgctaacgtgttgggcccacctgtcggcgtcggcgccccttgctgacgtcagcgaatgccatttcctttgagaaaatatttaataattgcgcaataaatcgagtttaattctagaaattcatttaaatggcccaaaacttctaaaattcatgtctaattcattcgaactacgaattgagccattcaacttgcaaaattcatctaaaattgagctctacatgtttgttaagtttttatgtactgtttccttggtttttattagagtttttcctcgttttgcgtgccagcgtgtagtttccgtcgtttcggaagtctgcggtcgcaaggaaaagagttcggaagatcaaagtgaagaagcaaggcaagtcacacattccccttgagcattttgatcctaatttacaaatattttactgtttgcaaacaaatatgcatgttttgctaattacatggggtcagggttttacctatctgctcgcttgtgccatgtttacttgatatctgttctttgtcaaccttgggtaataaatcgactagctcatgttacttatgtgacctagctagaactatatgcttagccatgcttaattactactagctcagttgatgggataattacagtattagacctttttagtatcagaatgagctatgtgctcaagacatctggccatgcttcatggtcataattatccaactaaaatgcgactgaatggtgggctgtgggtgcatggttttgctagtcgcacccatggcagttaaggaccggttcgcgggatgccctggaagaacttatcgtacttaccacaagccagcgtgggcaacggctggacttgtagtgtatctttcctctagtcgacgcatccaggcaagggtgggcgtgatggagcggggcgggccctgcgacggcctctgtcgcttccggattcacctaggcacgagaggggactgcccgttgcccgctgggaacgggggtgaaacctgaggtgtggtgtgcttggctagagggggttatgcgaagggtcctgtcacggcctctttccggtatgtcgtggtggcatgtcggcgcacggaaacgtgtcgtggggctgtgtcttgtgggtacagttgtacacctctgatcagagtaaaactattcgaatagccgtgcccgcggttatgggcggtcgaccagattcaccgtgattagtcccatcttaataaatcgacccaatgcactgtagttcaggtgggttggttgggcctgttcaacgtggtgtagcgttgatcagtggagattcaatattactttaattactcaaccgtttacggttttctcaataaaatgttttacaaccgcctttatgcaaatagccacaaacccctccttgtatcccctttgcacgtctgcatcgttggtgtggcttgctgagtacggtggttgtactcagtcttgctattattcccccttttcagaagtgtagtgcttctgagctgaagacgaagttagaggaccaaggctcagaccccagttgagttttgcctgtggagtggagctgaagccccgctaggatcgtcttttccgctgccgccgcttttgtttcggtgtgaggactaagtgcctctcctgtaagtattttacgctttatttacgtttggaactgtatattacttgtcgttttgtgtaccctggctggtcctggacagggatttaatacgcaaaatagtctggaaatttgggttaaatttctgggcgtgacagcgggcaagcaggggcgaggtagcagcgcgagcagggcgcgagacggcgtgcgagcaggaagatggtggtgcctcctctcttgccggtctcttctcactcttatatcctttgttcgtagccaacaaccacagatcttgccgctgctatactaaaggtcggtgagccggacaataagccaccagaaggtttacttgacacattgaaaatccttctcggttttcaggagatccacaaatctttttactatgctcatttggtttccaatcttcacattgctagaactttcgatggacttccatttgaaaacaagctgcattgggttgctatgttcattagtgagaagtcccctagatcaatgtagggttattggaagagttgaatagttcttttggtattatgtgttgttggttgacctatgttgttattatgtaaggcttaaactgccaaaatgagaacttactattaggtgcaagacttaaatttgctatttatgcgtaagaccttaaactgctataatgtgtaagactttaatttgctattatgtttaagacttgaagttactatgtgtggcttgaattttctatgtacagattgatacaagaattggtgtatgctaattatttatgatttttttgaatggactatgtgatatgaattgcattttatttccaaatatagtgatatgaacagtattctatattccaatataaaatatagtgtgatacttatgtctaaatgttatttttgcaatgtgtatactctgatgggtaacatcaccaaactaatggagtaggtaactctatacaggaatcccaccttcatccctccatccaaacaagggttaggatcattccattccaacccataatatccctcaaaccaaacaaaaaaacatggttcgttctatcccttgaaccaaacgaaaaataggatcatcccatcccattccaaaaacagagatggaactaatccatcccacctcgtgcccaaactaaacaggatcattactttgagctttgaggacggtttaaatagatatatgggattatttcccctcatttctcttcaacttgcttgaagcatccatggtggcatggctacattgccatgagcataagcacagatcaagaagcgtattactcctatatatccaatcagccgatataaagtgcaagtgcaacatcaacacccaaaaagaggttaattaaactaatcccctatgtcaaaatcgaaacatgtcataattgtaatttgtaaatagtaatttggttgcattgtcacatccaatgctcacgaccacccatttgccaccacaaccttgctcacccagtcactatctgcttaatttgttattaggtaaatgcaaatcatatataatgtgtctgcatcaggattagattgtcactgcttgtaagcctgttattagttggcctgcagctgagggcagatctctgacgaaactgaaattcccttccacaccggtcatcacacagcaattttaaacaaaaagttcagtatgaaatggagcaggatattaaggtctgtaatggctaacatttcagatttaactgcacaaacatacagtaggacagtctaagtaattaagcattagcattatgttctataaggtcagtacaaatcactactttgcgaacactcctctgaactctgaatgtttacaatacaaaactaagcacacatttctacagaattaagtaacacatatatatacaacatatatcatgattatatagaagcaatagagctacttgatcaaccatatgcaaagaagaagatgatgtgaaattgattgatcaattaagtagaaaacaagtaataatcataattagctagctagagatgatataattgagcaaggctagctagctttggttagaactttagaaggagaagaaggagcgcttggatggcaccctgccggcggccttgcagaagttggcacggtcgagcacctctgccgtcttcctcccgcgccgcgcctccgccgacgcccgccgctcctccgccttccgccgcgccgccgccgcctcgttgcgagccttctccgtcgccttcgcccgctcctcctccagcttcctctgtcaatggattgatcgatgttatagctgatgatttctgcatgatcgagttcttggtcggatcaatggcgaattagttggttttttttacctcgatcttggcgagccaggcggtggccttgtcgacttgctggctctcccagccattgatgacgacctcctcgcgcttgaacttgttgttgatcttggccacctcctccgcctgccacgccgccaccttcgcctccacctcctccttcttcacctgctccaccggcgccggcgggccgctgcccgccgccgccggcacgatggcgagcgcgttcgcctcggccgccggctcgttctcgccgatgcgcgccagctgcagcaggttcaggtcggcggcggcgggggcgtcgccgggaacgtcggggctgggcgcggacgacgacccggccgccaccatggcggtgaactcgcggctcatggtggcgaacagctcgacgtcgccgccgccgcccgcgccggaggacgacagcgagcggtggctcgcggcgtcccacgacggctgcctgagcggcggcggcggtagatgcggaggcgacggctccgggtggatgtcccggaacgcctccacctccacgtcgtcggcgacatcgtccggctcggcgcggggagccgacggcgccgggcggtgctcgagctggtccgaacccagcatagctactggctgatcagtatcgatcggatcagagggcggtggtggccatggatggatgcggggttcttggaggtggaggagaagagtggaagcagaggaggggaaggggattgggtgggaggaggtgggaaaaggaggcgcgtgcacggctcgtgatcggcatgcagggggacacgtcgctctcggattaacatgaggttttaccgttttccctccgtcaccaaataggttaatttagtctcgtagtactaaattaacttaactattaattttcatcagtagcaatagtgtaccgatggtagatgagtcatggcttcttcaacagtgtacttcgtttggcttattaggctgtttgaatttaatgaaggtaaagatgttgttagcgtacataaaacgagaaaattattaacgtgtgattaattgaattttaattattataaattttcctatttatttgatattttaaagcaaattctatataaaaagtttttacacgaaaccctccatttaacagtttaaaaagcgtggtaacggaaaacgagaaaaaaaatatgtatcttaatgaaaaaaaaaccatttccaaaaaaaatactgactagatacataactaaaatatctatattttaaaatagaggatgcactaggggactcgatctagttttaaatgcaagcccatgaaatatcttttttttatattgagaatacactataaaagtcacattggttgcccaaataatccaaaatttaaaatttcaaacttaatttagaatttgattttcagataattttaacgtatttttttataatggcttttaagtcactaagaacacatacataaaaattatatctataaattaattttattccctaataagccattttatcttattagaaaatatgggcaatcgatgaggagctaaatttgtatcctttaagtggcgggcaattactttactgatatcaatcgttggatataattttagaaactagttcgctcttttcctgtaacaagacaaccatatatatgtagacgattctcactgtaacaagacacaagacaatcatatggagacgctttatatatgcaatagagacattctagcttgtctccacaggattgtaaagatgtactccctccgtttcgaaatgtttgacaccgttgactttttagcatatgtttgaccgttcgtcttattcaaaaacttttgtgaaatatgtaaaattatatgcttacataaaaatatatttaccaatgaatcaaaccataccaaaagaattaacaattacttaaattttttaataagacgaacggtcaaacatttgctaacagtcaacggtgtcaaatatttcgaaacggagggagtatttggaaagtgccataggaacgtctgtgttacaaagagaagagatagaaatgagatgaactcattggtcctcttctctgataatatgccaagtgactttaccagatgatgccaagcgactggcctaaagacttgggtaaaaaggtgtggttgtgtgaggtgggaaaagaaaaatagttcaccaatgtaggggtttagatgaagatcgatcatggcatcagatgcctaccgacaagaggacataattaatttggttacatgaacaattggagaaacataagataaagatgaaagagtgtaacttgctagatgtaacgacaaatctaaagggcagcaacaaagacggacgacaaaggattatgatttttttaagttgctagaagatattgaattcgagagaatgaaaatctagaaacataggacatgagagatgattcatgccaattgcaatgtgtacttattgagtgatatcattattgtttttcatgatataattcaatgatatcctaaaataatcgaatgaaccggctagaaatttaacccatgatgatgaacctctcaactagtagctatactctactatctactgttcatattatgttgattgcaatcctcaacaaagacaaaaaagcaacccccagaaatataatactaatataatacaattaccaaaaagccatgtccaattaattatttgcactggtttaattagtggagaaaatgatagatcaccggggtccctttcatgtggatgagttggaatggaacaggcatggttacaaggtgaggcatcaccctcacattgacatggaccgtctacctctaagcttgtgacagcccagggccaatacacactgattacctgtctccttgctgtgcttttctccagggccgtcggatcaggaaagtacgtcctaaattaatttggatttcttctttaaaatttctacactctcacatgtggaatacctttctgaactcatcgctaccttgtacatatactttctctatttcacattataaaatattttaagttttgaatagatttatacatagatccgtttacgtgctttatatatgtttaaattcatataaatgttaatgaatctagatgaaagattggacagatatagacatattataatatgaaatgaagagagcatatatctagaattatgatatgctgatcttaccctaggagcaatggagaagaataatataaaagaaacagtatacctctgtaattaagcatggtgatcttgattaattaagttccaaagtaatcactcctactaatgagtactgtatataagaagctggagttcgacctatgtgttgtccaaaaacattgatggtttaattttctctcagttactccagacaatgccagggcatggaatctgctgaagaacaagttcagtcacatgaggtggttagcaaaccaaccttcctctgactaatttaatagcatgttgcattgtttggttgagattttttttcccttctctttgatatgagaacaaaataacaagaagcaagtcaattatatgcacatgagtgatagatcaggtgcagccggtgagctgtaccctactgttcatattgcaatatcaattactaattagttatttgcacttggaagttgccacactgttcaggcatggccatcaattggctaactagctaggcatgccatttcagaggcattagtctatttctaggttgtattaagaatggcttattccataaagattagggttttttaatttattcaaaaagtaatggaggagatactaaaaccgacacatctttgaccactaaatgcaaaactcactatctcaacactagtaggcgacattatagttgagccttgagataaaattttctaattaagatgttttaagagagcacttgtattatatttttgtattatatgttttaagctggagtatgtggtttgtactcttgtatctgcatctgtatagtattatacgactacatgtatttacctcttctagtaatattaaaagcatatttaaacttcttaggtgcgtttgatttagattattgagcaaactatcgacttgattatataaataaattaaatattttaagagataaacttaataaatagattaaaataagtggtcttgagaacacacatttttcaaggtgtggatgaaataatttatcttaataatttaactgataatctcaaaataaattgtgtataaaatccagacgatcttcataatttcattgaagaggcaacgtactttagccctgtttaggttccaccttaaaatttttcaccctgtcacatcgaacgattaaacacctgcatggagtattaaatataagctaaaaaataactaactgcacagattgcgactaatttgcgaaacgaatcttttaagcctaattgcttcatggtttaacaatgtggtgctacaataaacatttggtaacgacgaattaattaggcttaataaatttatctcttggtttactgacggattatataattagtttttctattattgtctgaacaccccatacgatatcctttacaatactcgatgtgacacgctaaaactttacaaccctaaatctaaacaccctttaaaaatcggaacgtgaacgtaaaagagacctcaaatgataagatgaaatcgtgaaacctaagattaataaccggttttccatttctcccaatgtcgctgctgtccggacaggcagtgagacaggcacatcccttctacctcggctctgattaactgaaactgacacaaagtttcagaagcccaaggcaacacgtaacggtttcgccagaattacgtaaatggccctgggtggagagcccaacaaccgcgcggccgggctgtcggtggcatcgaagaaaaaaaaagaaatgagatccacacgcgtacacctaacatgcaaaacggaaaaaaaatgaaagaaaaggaagcatacgtcacttaccggtgggcccggctcactgttgtgtcggtcgtggatgttctgctgctgctagcagggctcacagctcgcaacagttgttgggtgtcagctcggtggcttcctccattttcacatgatttaatttctctcttgttttttttcctgttgagaatgaatttcacgtggcaaaaggaattaaatcatgtattgttgaggatgcataaggcgttgttttaaccacttcgaataatgaattgttagcgtatacttcgtctgtcccaaaaaaaaattaatctaggagggaatgtgactcctcctaaattgatgtatgtggactaggttaatttctttggacggagggagtatatatgtaattattttcaacttattccatggtgtgatattcgtcatagatagttagaagactgagtttacatatacatgatatgttctatacattattttaattaccaaacgatatgtacatgtcatggtgactacatatattagtaacaattaatgtgattatagttgaacaatatgtgaaggagccatgatggtagtacagtgcatcatatctcgttatctcccactaaatatctgctagtgacaaccactgtacaggaaacttgtttgctattccattgttccactttagttggtgtggctcaagccacaattaaagttggcatatacacttaattaaaaggcatacgtaatcatttataaattttattggcttgccataacacttgaacaagcttgctttgttacaaatatatcccttcttgaaaaatctatggttattttagcaagaaaagaaagcatatctatcactcattacaacattgtttgtacctaaacaactaaacataatgtttttatttttgttttcatagcattcctctctcaaatacacacgacataagtcccctattactattactattatcggtgcctggttccttatacaagttaatttcttagggaaaacacgttcattcagagaaccaatagatttatgttgtcgtgtatcatttgtttttcttatgttattttctttcccattggcatgcgagcacttctagtgtttagcgtactcatattcatgagggtcaagcaataatagcttcctctcatttctcatcgtcgaattgaccgtgacagacagagtattcgagataatcacaaacgatgagatgagaatattggggatttgcaaattaatcaggatacaattaataatataccagtcacatttagccatacgtgatatagaggtggatttgttatcgaagagaggtaaaaccattacttattatttgaaacgtaattgctaaaaaactgtcacgagtttttttggaaaaaaaaacttttagatataactatagtatagattgcaatgcaatagttatagtgaaaaaattatagttacattataactgcattataactacagtgtaagcacggtaactccaatgtaatttctatataagttagatataaagttacatatactattttaatacttatatataagttacattatattttatttatagtagaattatattacaattatactataagttatggttaccgttatacttgtgacagttttttttaaagatatagtcccattttgaaattcttagaagagactgtgtgggcctagcaatttccccgcaacagccgcgatccatgcccgcgcggtgatttcctctgtcggtgcccgaccgccaacgcccgctgacacgtgggccccgcttgccctccagctcacctttcgtctacctcccgcctcacactcctcccctcacctcctctcctcgattaaattaacccccgaaatccaccaccaaacgctcgcgagattaatccgattttaatcctcgagatttgtttaatggcagggctaatctcgccccaggccttgtagaaagcgacacccaaaccaactcacctccattggtgaggtgccctgtccttttctctctcctcctcctcctccatagttaagctccccaccaccactactactagtagtagtagcgctgccacctcccgctccactcccgcgtcctctgctggaagccttcttctcctcgccgggaggattccaggtaatgcccgctccgccgccgccgccggtgactctgctctggtgtgtttcttgggtatcagttcttgatctggatgttgttcgattcgtttcttggcagcgcgggatgcggcggtgctgatcccggtgtgcacggatcttgggtgtgattcggtgagctgagagctggtttgctgctgctgcagcgtgcgccatggacggcgacgcggatgccgtggtgagtgccccccgcccgaaatgccgatgggttttcggccgcatctcgtgtggatcttgtggaggagactccagattttgatttgatttggttttgatttggttttgtgggtgatctatctgttgcgcagaagtcggggaggcacgggagcgggcaggcgtgccagatctgcggcgacggcgtgggcacgacggcggagggcgacgtgttcgccgcctgcgacgtctgcggcttcccggtgtgccgcccctgctacgagtacgagcgcaaggatggcacccaggcttgcccccagtgcaagaccaagtacaagcgccacaagggtaaatgctaccatctctctcttctcctctccctcctctccatttccgccgatctcgccgccatcgactgtaaataagttcagaaacatctcagaaaaaaaaagtctggatctctagttcagaacagtcaaaacgagcattcttatagatggatcctgttgctttcttgttaggaaggtcatacaagatccaatgtttgttgattttttggaaattcagaaaaaaataatgtcgattagtaaacgatgttacagtcatgctaaggctttgctgaactgtgtatggaattattcagggagcccggcgatccgtggggaggaaggcgaggatactgatgctgatgatgtcagtgactacaactaccctgcatctggcagtgccgaccagaagcagaagattgctgataggatgcgcagttggcgcatgaatgctgggggtggtggagacgtcggccgtcccaagtatgacagtggcgagatcgggctcaccaagtatgacagtggcgagatccctcggggatacatcccttcagtcactaatagccaggtgggtgcgagtttttaacagatcgtggtatcagttgtccgggtatgctcaaatgattaatcttgaattggattttgcagatctcgggagaaatccctggagcttcccctgatcatcatatgatgtctcctaccggaaacattggcaagcgtgctccattcccctatgtgaaccattcacgtatgtttatttcttgatatgatgtcacttctcattaggtacatccgcttgagatctaagatcgtaattatcttttcttgcttctttctagcaaatccatcaagggagttctctggcagcattggaaatgttgcctggaaagaaagagttgatggctggaaactgaagcaggacaagggagcaattcccatgaccaacgggacaagcattgccccttctgaaggtcggggagttggtgatatcgatgcatccactgattacaatatggaagatgccttactgtgagttctgacatcttcccctcagggaacataatcttatacgggatcatatgcgctgacatttacaaatgtagtatgtgtggattctatctaaaacactgactaaccgaaaattattatatcgatgtttattgtttttcaacatagacatcaacatatagccaagcaagtgggtgacctaaatgtattaagagctgcacttttttccactaacacttccagctataatttttggtacatcgaattggtactaaacaaaaagaggtgtctgtcctaagttcctagtcaactcattagtgcagttgccctgaggtgaatgagggttttctgtccctgatagaaggaagcaaaaatatatctgaaagttacaaattgaaataatttagagattaaattatgtgagcatttttgatggtgcataaacaagtcttgtggcattaactttatgcatttgaattgcaggaatgatgaaactcgccagcctctctctagaaaagttccccttccttcatccagaataaatccctacagaatggtcattgttctgcgtttggttgttctaagcattttccttcactaccgtattacgaatcctgtgcgcaatgcgtatccgctctggcttttatctgttatatgtgagatttggtttgctttgtcctggatattggatcagttcccgaagtggtttccaatcaaccgtgaaacctaccttgataggctggcattgaggtgatctcctttttagttctgttgtacttaatccaaacaaacatccttattcatattgctgatgccgttaccatctcatttccattaacaggtatgacagagaaggtgagccatctcagttggctgctgttgacatttttgtcagtacagtcgaccccatgaaggaacctcctcttgttactgccaataccgtgctgtccattcttgctgttgattacccagtggacaaggtctcttgctatgtatctgacgatggtgctgcaatgctgacttttgatgcattggctgagacttcagagtttgctagaaagtgggttccattcgttaagaagtataacattgagccaagagctcctgagtggtacttctcccagaaaatcgattacttgaaagacaaagtccacccttcatttgttaaagaccgtcgtgccatgaaggtttgtttgctttataaacacattaatattaattttgctatcttctgctccaatgctaacagtcttcccaaaaaaaaaacctgttacagagagaatatgaagaattcaaagttaggataaatggccttgttgctaaggcacagaaagtcccggaggagggatggatcatgcaagatggcacaccatggccaggaaacaatactagggaccatcctggaatgattcaggttagtgtatttcaaataaaatctactatgactatggttgatgtagcttcttttacttgatgattatgattattgctttgctgattgctctttctgatttttcttaggttttccttggtcacagtggtggccttgataccgagggtaatgagcttccccgcctggtctacgtatctcgtgagaagcgtcctgggtttcagcaccacaagaaggctggtgccatgaatgctcttgtgagtagttgaatatttacaaaacttacactatctagttcattttcacttctcttctaaagttctaatggaggattaatctttttctgcaggttcgtgtctcagctgtgcttaccaatggacagtacatgttgaatcttgattgtgatcactacatcaacaacagcaaggctctgcgggaagctatgtgcttccttatggatccaaacctaggaaggagtgtctgttatgttcagttcccacaaaggttcgatggtattgataggaatgatcgatatgcgaacaggaacactgtgtttttcgatgtaagttggcaattctcctttaagattctcgctcatctgcaactactagtgatagtgtaatcatatttgattaacaaatgatgctaatattttttgatgcactaattttaaatttctaacaaattcaatattttttttggggatatttctgtcttctacagattaacttgaggggtcttgatggcatccaaggaccagtttatgtgggaactggttgtgtattcaacagaactgctctatatggttatgaacccccaattaagcagaagaagaagggaagtttcttgtcatcactatgtgggggcaggaagaaggcaagcaagtcaaagaagaagagttcggacaagaagaagtcaaacaagcacgtggacagtgctgtgccagttttcaatcttgaagatatagaggagggtgttgaaggtaccatccatatgttccagttattgcataatttaggattataagttgtaatcaacatatatgcatcctgacatatcatctatatggcaggtgctggattcgatgatgagaaatcacttcttatgtctcaaatgagcttggagaagagatttggccagtctgcagcgtttgttgcctccactctcatggaatatggtggtgttcctcaatctgcaaccccagaatctcttttgaagaagctatccatgtgataagttgtggctatgaggacaagaccgaatggggaactgaggtaacatgggctttctcacagcaacattggttacattcttttttagtaacttgtgtaaatttacaccaggctatgcaacttgcaatggtatgttaatgctgacatatgttgcagattgggtggatctacggttccgtgacagaagatattctcactggattcaagatgcatgcgcgaggctggagatcaatctactgcatgcccaagcgcccagctttcaaggggtctgctcctatcaatctttcagatcgtcttaaccaagtgcttcggtgggcacttggttctgttgaaattcttttcagtcgccattgtcccatatggtacggctatggaggacgccttaagttcttggagagatttgcctacatcaacaccactatttatccattgacatcgatcccgcttctcatatactgtgttttgcctgctatctgtttgctcactgggaagttcatcatcccagaggtaagcaatgactgcttatacatacccttctatagaaaatgtttgagacaaccaaactaactaaattaattttggaatgcagattagcaactttgctagtatttggttcatctctctcttcatttcaatttttgccactggtatccttgagatgaggtggagtggtgttggcatcgatgagtggtggaggaatgaacagttctgggttattggaggtatatctgcgcatctttttgccgtcttccagggtctcctcaaggtgcttgctggtatcgacaccaatttcactgtcacctcaaaggcttctgatgaagatggcgactttgctgagctctacatgttcaagtggacaacgcttctcatcccaccgacgaccatcttgatcattaacctggtcggtgttgttgctggtatctcatacgcgatcaacagcggctaccaatcatggggaccgctctttggcaagctcttctttgccttctgggtgattgtccacttgtaccccttcctcaagggtcttatgggtcggcaaaaccgcactccgaccatcgttgttgtttgggcaatccttctggcttcgatcttctcattgctgtgggttcgcatcgatccattcaccacccgtgtcaccggcccagatacccaaacatgtggcatcaactgctaagaaagcaggggattgtagagacagaaatactgccagttgtgttttttcagaatacaaagtgccactgccaccaattgtgttttaagttattaggaggtggctttatttacagctacgtacagaccagaaaatattgctcatcagaaagttacttgtgtcgatatgtattcttttgttgataagttatatactattttgatgagagtggctgacactgtcaacgagttttgtatcttatgaaggacacaataaactattagtttgcattctttaaatttccgttcagttttctgtctttcagccttatgcatgttggcagcttaaactaaatattctttatctgcataatactgttaattggctggttgattgctgtagaagcatagcttaaataatgtttgtgctaatgcattgtttcgggctgccgaaaagaagatgcctgacaatagtaaatgcaatttaaagaaaatctatcctttttctgggctgccgaaaagaagatgcctcacgatagtaactgcaattttaagaaaatctacccattttttctttgttctttacatcacatcaaacaactttaggtatgttggaaactttttgatgaaatatgcttgaaattatatcatattgagaagaataaattgtgacttttgtaacgagttgtatatctatttctaatttttcattactcacaatatagaattttaaaaatatcatttgtgtataccgaagatgatgacaaaattagaagattgtttccctcgcttacatgtgaaggaacaattctgatatagatgaaatcatcatcggcaagatgatatggatcgaacaattctgatttagatgggataacactaccatttgcttgtctgtcttctcactattataaaagagataatgtatgtattctcaatgttatgaaagggatgagtgatgaacttcaaatatgtcatgagtgatgaacttgaaatatgtcatgtaacctaagtgaatttaacacaagaagtgttgataattatttactcctttgcaagttttgataatatgtaccctgaaaactcactcaatccctttcattcccctgaaatttacccgatccgttctatacccctgaaatttcaacgtgtccactaccgttacattttccttcatttcactaaaacatttggttgcaaatgttgatgcttagtttgaatataagctcaattgaaaattttgtttgagtacatagtatgtgcattattttatgaaactaatgaaataattagtgcatgaaaatttgacataaattttgaaaataaaacaaatataataaattaaaatttctatttgaaattttaatatgacaatatatattttttatcgggagcattcattaaaaagttactgtgagcatcggtagtccaatctttgtatgaatgctcctcatttttatgactttttttttaaaaaaatacatatttttttatttcattatctaaaaacaaattttgtgataaataatgcatcgcataacaaactcataatgatagtctcatgtgacagacttttatatttttaataatgtagctcataaatttctatgttcatcgaaaagataaaatggtcatttttatagaaattagacggttactaatggtcaattgatgggaggagtatggaagggatctaaatcaaatttcgagggtataccagaagtaaccaaaatttaagggcataaaagtgattagctaaaataaatttgaggggtatgcaagagattttctcttctagtaactcaacaaaattggtttccttcaaagtcccaactatttggtctctccacctcagtctaacaccgtagttttatagctcttaattcttcctataaggtacaaaggaaccgatatatgttggctttatagctcttaattcttccccataaggtagaaccaatatatgttgagacaccaagcgtgtgaaatgtttcggatgtaagttgcatcatttgttgtcatgcaagaagttctttaaacatcaatttaggtggactcacgctacaagtgtttggagatgagtactgaagggtggtatggatattcacagtgaacatattattgtgcagttactaaggtggataagtttatatgataataaaatgtatcctttttctgaattccttttttttttcctttttgaaatgatacttttctgaattctgaatgaaaaatttcgaacattttgcatgatgtatgcacaatttccattcatgtaatcatgctgtctctgtggactttggctcaatatgatttggcaaactatggctacatagcaaaaaaaaaaatcattttgcttaattcgattcgaattagaattgccaaaagatgctaccagtgaaggactttggaagaaggtattcagatttctgatttacggatcacaccatttgattaatcgatttatgctttttattaactccacccacataccagattaaaagactaaattagttctcagtttctcatcttttttttggtgttgggggggggggggtggggaattgaaatttccatcgagtatcacctatactagataactccgcctgatccacatctagattgtggttaagaaaaaaaaagtccaatctgcatgaacattttcaaattaaatctcgcaaacaacattgttgaatacgcatgatctactacctcatattcagctagcatttaggtggcttttattgttaaaaaaagtccaatgttgtttggctgatcaatcaattgaccaataattctttgttttttccttagtactccctcatccgtgaatacaagagattatgatcctctagtttgtccaaaaatataaggtatttttgttgtcccaatgcaagcaaggacagaagttttgttatccggaggcaaggacaacaaggacactatcaacaacaacttttcatttacccacattcaaaaaatatagaaaaagtactactagcactactccctaccatcagcagcagtgtgtacttctacagttatttaatgtgccaatccatcatttagcaacagatccttaattagtgctaaatggggaataatcccttataatcctagacggagggaggaagagagaaccaactcacttgttttaaaatttggatctgacaaagcatggtagtggtaataagttgcaacaatccaatttcctttgaagaataaagttcaataatcctttgacttagcattaacgaacgctaagtactcacaacagatcacaaattcaagacccaatacagggatctttgcatatcgatccaacaatcatgcatatgctgctcaggtgaagaacatggatgtgctgtgcaaagctgcagctgttgtaccaacaatattacgctattttcagcgttatgattgtggatatagagggtgtgactccatgtctcgttcaaatatgaattgaaaatactttttttctttgccatgatgaccgaatgtaaaaaagttacaagaaagtttttcgtccacaattagttatcaataaagatgtgcacaagagcgcatgttctaaaaccacggaccaaccgcacaaacacaagctataaaaggaaagccgaccaacaaactgactattgctatgtgaggctagtggtcacggagccaataacaacaccatacaccatagaacggagactctaaaaacaatgtttccatgaaggttgcgacgtcaaaagacaccactatcatcgtccatccaaacaaactgtacagacacctaactttatgcgaagacataacaactacttagacatggccggtacatcagaacatgttgagtataacaattactcatatgatgatgtgaaggtttaggtgctacagattgtatttccaaatcaaatatactatctccgtcctaaaatataaagttttagctataaatctgaacaattgtctgtttagatttatacctaaaaatgttctattttgggatggagggagtgcttaatagcttaaagctcacgtatgactcaaatatatatacaaactatacacatatttttttaaaaaataagtaacataaataggaagcaaatatttacggattctttgaaatgcaaatcaactaaaaaattaaatccctaggaaaacaacaactatatgggttgaatatgaaggtgacaaattgctaagtaaacattatctaggaaggtaaaacaatgagtacagtaacaaaaatagagtgaaacttctgctctcgaaaatttatgaaactctagatataatatgcgcacaatactgtgcaatgcattgtgcctgcaacccactaacttcagttgcagaattgcagcctataataataattcaactatagtaatacaataaatttggtttcttccaaaatctcactactatctcaatcatcccaaattaaagtttttcttatatagttgagatgtcacatatatacatgcaagacatgcaacatgcaatattttcccattcaaatagatttctaaataccatacgaatttttgaaagagaaaaagttcatgtgagagaggatatttgcatttttcacctcatgcaaccagcattgatgaaaatgccatatgccttgcgagaacaccaactctgtgactcccagataaattacgcaaggttcaccgcaacagattgtggttcctaatctttttgttccatcttgtcttatctctgctttgctctcttgtgtttgactatatcaatttgctcttgatttcagccatcattaatggaatagcattaattgtactaaccaatttggagaagtgtttgccagcgttgttttgttatccaatttagtcactaactacttttataatttgaggtgaattttttaaattttggtagagatctttaatttttagtagaaagttgaaaaatttgagttgaaagtttcaaaacctgattgaagctttttaaatgtttagtgcaaattttaaaatttgaattgaaagtttcaatttctcattagaaagtttacttcaaagttcaaacttgaaacataactatttactaaaaaaaaatctgtattataaaattttacaagaaattttaaaagtattcagagatgactacaaattgatatacaaaatttaaagctgcacggccacacggccacacgggcaaagacttgcagtctgtcttggtcttgttcggtagcgtggacatgtattagcttgtttggcctatgattatttggaactaattgataaaattctagcagtgttccattgtggttcaatctaacaatatattttccaatatgtgttgacattattaacataatccaagaaacacatttaacaatcaatacattcttccccgcaaaaaaaaacaatcaatacattcggggtggagacagacctggagcaattagggcttaagcccaaggcctagctccataattctattgagaccacatcaaaccacatcaaattaacatggaaaatattttaagaagtcaaagaacagctaactcaaccctaggcgtcatctattcaccgctagaatactaatatttgcttaatgtccaagcaaaaatcctactaataaattaataaaatgcttggctagttaacctgtggccaatgggatatttatgtaatgatatataccactcagaaatagttgtaaatagccaacagggcacatttgtaaacaagtttttaaatatacttctcagaaatgcttataagtgatttgacagtgtatattagtaatcgagggttttgatataacactaaaaaatgattgcaaatcgttgatgtgcgtactttttccgaagtctaagatcgggacactcggtaacatgcaaaaattaccgagaggatacaaagtctgattgggctaattgttgtgcagtttttggatgcatttgcatctagttcaacatcatcgatcacagctcttcatttcccatccttgctagctgctatttagttttggaaacacatacaaagcaatcgtacatgttatccttgtcaagcttcactgtgatttcgaggatatcatagtgttctttgattcaaggattacttttagatatgggctttccctattcaagggagaaatgcttgtagtaaggtgtaattagcctgcatttgcttcacgggacatgagtttggaaatttactgataagtgcatagtgcagtatgggcatttatctgccttccttttattgttcatgatctttgtttggatgatcaatccattgacctattatttttttcctggtaggagaaccatactgttctgatgtgtcttgctgtttgatgcttgatttaatatttttggatttgaaaacaaaaaacatgtcatgggtctgatgtgtcttgctgtttgatgcttgatttaatatttttggatttgaaaacaaaaagcatgtcatgggtcagctacattctattcagcttgttggctgagcttatgacgtacatgcaaaacgatgcaaatcattagtgcgtgattaattaagtaggagtataaattattatgaacttaaaaaatgaattcatttgctttttgaaacaaacttctaaaagtttttgcacgaaacatactatttaaatttcggaaagcacgctcaagtaaaacaatgatgtagcccagtcaaaaagctcttacgaacatagcattaaatccaagatgcatccatgtgtttttacagagcttacggacaccaaacgatccggcacaagctgctttgttgtttcctctacgcgactctatatctttcattggaatctgaaaatattatatctaactccctatgaaaagtaacaagtcgagcaagttgatacaatcatgatgattaaggtttatgcggaccatgttgtgaaatcaaacataaattaaaaactaatagtcaatgttcagctaatacacttagaactcaaatagatatagtgctgtcaaagccaaatccttgtgatgcattgtctccatgactcatcaacttcagttgcagaattgcaatctatcctagtaatgtcttgttcaaatcaatcccgtccacaagggtattgagctggatttggccaatccctcctttttagggattaaacgataattcaattacactatataaataaatctagtttcctccagaatctcaatgctatactctatatgcaaggttccaacattaaacaatggttggtgatgtgtcccattatccaaaatcatggttggtctcaatcatactaaagtagaactgcactgctggtttacttatgagatggcatatgtatgcatgatcatgcaatattttcctatcgaaataaatttctaaagaccgtaccacattttgaaaagagacaaaaaggcatgtgagaggaaatttacagttttcatctcttgcattggtgaccgcctttcggtcagacattgcaagagcacccacacaatcacacaaactcgattccatatcaaatgaacggattatacacctccatatgttccatatatatagagacaccaacaagatttgcatgggggaaacacatggatgatctgcccataatcgatatgggcagatggagcatatatgcatgatatgtaatatttcccattcaaacaaactttaaagacctataaatgtctgagatagaaaagacatgtgtgacaggaaaaaatcgcatttctcaatctcatgcaacaagcattggtaaatgatattcaggtattgatcaacattggaagagcatcattaactagattgaggggaaaaaagttgcgaacaacaaaatgcagttttttaccatatgcaataactgctatgtggtggtgtatgctgatggaaatgatctcatgcaaaaagtattagagtacgtgtagtaattaaccaaaccttcttactacctcaattctccgattttttttcataagcccaaagcagaaataaatcaaatacataatccttctctagccatatttagaactgtactctgtcccacatctcacaataagttgtctctaggaatcccaataaaatttagtgaggttttacagtgtttgcgaggtacttagaggtattgagaggtaatgtgaaccgttgatcaagagaggggcaagtgggtgagtaggtaaggggccttgagggatgaaatttctcaatttgttaactgagggtagggtaagagagtaaaaattatttgaactatagaaatcaactttctataggacgcatagtagttttgatcgttgtgttgatgacatggttcttcacaccaccttgccatgtcttgatatgagagctccattggtggtgagtgtgccctgcggatggtggctctataaaattccaacgacttagggcttgtttgattcacaccaaattcaggtttaaaatttgtttgaaaatttaattttgctttttaaatttagcatcaattttttcccatttgattattataaattattttttcacattgatatttatacttttttaagtaggtaacacataattatgagaaagggactttataatctttttagaaaaatctaaacggtcaactaacggaataggtatagagatggtcaaaacgagaactaatgggcatataggggatgaggaaaattcaggggcacaaaatagatggagaaaaaacttagggggcgtgtggagattatgggtaccacatacccacatggctggtctatccaactggttacaggggatagatcatctatgaatatgtataagattagaactcgggtattacgtttgcttgtgtatcaagggatggcctgtagtcctggtctattaagattatagattagatataggaaacttaaaccgtatggggataagtttctatcttgtaaccctgctccctaacctatataaggcgggcagagaaccccctctaggggcatgaacacaaagattcacaaccagatcatcagttcaatactacacccagcaggttcaaatccccaaataggagtagggtattacctctcattgggagggcctgaacctgtctaaatcctttatctccgcatccatccacttttaggtctcgtgtgctacccctttatattgccaaaatcttgtttaaacagggcgctttctggacctcatcccattcaaatttctgttactcaaaattaatgatttgatttcaacttaaaaaatattacatgagtacttggacagccagtagggatggagatgaggtgaaggaaaaggtggcttaggaggaagtgcttagggaaaccgatggatgatggagatgacaaaggaaaaggtgactgcgaaggagtgcttaagatgacaagtgcaacactcctgtagatatgcacataccaacttctcaacaagttcaacacgatgaatcaatgatgcaatgaccaatacctcacaaacatgcacatcaacttaacaattaggtgaatgtgtttctaagcttacaaatgtaatcggatactatccttactccttaggaacaaatcaaggagaaaataatggagaacagcatataaagccaagtaaagaattattataggagtcatcaagtacaaatcaattcatgttcacaggttcggacctccccacaatatcaacttcaaatggacctaaacgctaatataaaaagttactcgaggcctatgatacttgttggaaagtttatggtgtctaatttcaaatggtattggtcagatatcaaaattcaatctgacatgcttgtaataaccaaaacaagtcatatatatcttttagtccgagtaagttttgctctttaattgggccttgaaattatgtcgtgatccaagggtaggagtgcacccctctttggaaacacccaaccctaggatgtcctgactggtagtcgtacatattatgtagccgatgttatttagagttgtgttttgcatagattattctgccacttatagtttcactagctagctcggtttgtggaacctgacttatgagattcatctatatttgtagtatattcagattttttttttaaattca

SEQ ID NO: 10259 - DNA, 120556 bp, Oryza sativa
  unsure (1)..(120556): unsure at all n locations
ctagagtcacagtttgttgcttcagatggagcatttacttgaagagtcttctttcgtgtattctcttccatccatccagtgctgcccaccttctggagagcaaaatagtattcctataaacatctgtacttcctacacaggcagaaagtatgttttgcttcctgcgatttgtaatgtacataattaccattgcacctttattttgtataatttttttatatgtattttaatgttcctaaattaagctatataatctctttctaaatttttatttctattgtagcatgaattactccgcattctttatccactatttttccactgcttcatggatttagtggcagagggacatacacaggaaggtaatgctagtaggtggatatgataatgaatcttctgtcagtttttttttttttttgctttctatcagtttattcggggcagttctttctttgatacactaactttgagcactgcagcttgctcatttttccacacatttcgtgaagaccatgaacactcgagggatctcaagaagctggaaagcatcctttctcctttacatttggaagttagtgactcagcttttccacattgcactaccctattttgaatgaagacttattttttgtttatttgattctatctcctcaaagtttacaaattatggcttatccttctaaatattgtaatttcagcaaatggaagtggctcgatctttaaggcagaataaattcagaattaagctatgtgaggttgtataccatttccaaatcccctttcatttcaaccctgtaccatgtactattttttggggcagcatttcatgatagccactgtaatttcttgattgctgcaaaattgcttttctggaaatataatcagctgtcccaattaaagtttctgtctttttttattgcagtattcatatgaattgcttctccagtatctccacaaaacacaagctcttgtggtgcttggaataatcaatgaacgcatagattttcaaggtaagtttccccaatctgttatgactcatgattagtgacctaaatgttcatcctgcatttgctccttgtgagttatctgaatcttctgttccaactttcctttacaatattgatagtatcccctgggcagtctccattaatcattgatgactcggatgctgttgttctgattggaactagcaaggacttgacaaaacagataaatcagaaggaggtgcattggggggtatgttctgtaccagtctggtggtttcccaattctcatcatttattttatcaatagttaaggatacagcctaaacgaattgaaattatatagatcgatcagttaatatttaatgggattctagccgtttttattatttgttcactatgctcagacattttatttttgtgatttaaattctgtaatgcagatacttgaagattcacttgaagaacgtatggagaaggcaatttcagattctgataaaactgaaatagaaagcaaggatgcagacacagaagacaacaaggcaagaaactgttttgtagtatgccagtcttttttttcattttgcttcctatgccctcggtcattgaaacacaagctttccttttttttagtgcgtgcgattctgttagcaacttgtgatttttatggttgctttattataaaaacagtactttctgatgtgcactggctgtcagctgtatatgatatcaatgtttcattgatttgttccactatgtaattctgcattctcctttgttcagtgctcccgtaaatgctagcaggcagactggttagaacctagcacctgggaaggctaggcagctgcatagggggaactatgttcctcactcaccattgatgtttcttagccttctcatttcactcttttcttatttttgctacagaaaagatcctcagaaggtggaaagcagggtggctcacataaaaagatcaaaaaggacaagtttgtaggaaccacagggaaaaacatgaaatctgaaactagcatggtttctatagcaccacgagttaaaccagagctaacgcttccaatgacgtacgtcgtacaatacatctttaatcacttcaaattttcttttgagaagtccaatttggtcatctaattttgaatattgtctggtttgtgacctaaggttaaaaagttctcctgaaatgattcaggattttaggttatgataaaattataacttcctctgcatccatttcctggtccgtggttgggaagaaggcaaccacatgttttttaaattcatgtggccattgtttcatttttcctgcagactgccccttttgaaacgcaggattaaaaaacttaggaatatggaaaacaaaggaattttgtaggttgattggaccgtaggaaaaacatagcaatgggcttggattataagagtaaattgggtttcttatctacttatacacatcttaccctcactaattgaatagacaagtggccatgagctactagatttgccttgatccaacgcgagataacaaaaacatgagcttggaatggatgttaaatttcctatgttttcctctagatttgtaggaacaggaaaatctcctgtgattttcctttcctcattcctacaaatcaaaggcatgaacaatgatcttccctataggatttcaattcctttgttttttctccaattcaaaggggcctgcatattctatgcaccaacatattgcttcctcatccacactgttcaaatgatttggttatcccatgtccacctgccaatatgttattgcttagatgttgtttaaccgtagaatatttgagctgttcaaaagcacttttgtaagacattaacaaaaccaaagattatatttcctttgccttccaaactatcatcacgacatggccattaaggctctgttcgcaaaaacaggttcccaacccaaacagtacgcacagaaaacggagcggtccattagcacgtgattaattaagtatttgctatttttttttcaaaaatggatcaatatgatttttttaagcaactttcgtatagaaactttttctaaaaaaaccaccgtttaacagtttgaaaagcgtgcgtgtggaaaacgagagtagggtgttgggaaccagctcttgcaaacagagcctaagcccactgataagattttctatagtgatgtttttttcttatattaagttgtaataatttctttgtacacatgtttacttttatttgttggacatctttgttgactcatcagccttacctttatctgtaagaatctgatagacgtttactgattattttttttcaggtctgttgaagttgagcagtcaattcttgaggacttgcgaaaccgtgcacaattgaatagcttgtcattgccatctgttagcttctatacattccttaatacacataatgggtaaacttaactatggatcaatgcctgacaatttttattttcaatttttcctccttcagtttaatcattatatgtggaactcaggttaaattgctcatcgatttcgcatgatggttcattggtcgttggtggattcgctgattcatcagtgaaggctagtccttttaggtggcatcttcttattatgtgatttctgtattaattcgtaatagtaaaaagtgtaaaatctccttggtgttcactaggtttgggatatgtcaaagattggccagccttccaaagcatgttagttgttcttcactccttatttttgattatttgttctgctttgtgttatgctgaaacacttatataaatttgcgtctggtttatgtgactaattggctattgccttcttaaaaatactataatggtacattcatttgtatcattcgaagttccagttacaagtcctaagaagtatgatgtttttcagtcatacttgctggatgtactgatgcacttgtgtcattacagtatttgactctggaacctgttcagaaccttatgatagtcttagaacattaatcctcctagcatcaaagtcaattatgcaatgatggtatttactgattgaagaaactataattttcagcttgttcacaaggcgagaatggaccctcccagattgagcgggtatcgacatcagatgaagcgcgtaaatcctgtacattattccaaggtcattctggaccagtttattctgccatgtttagcccaattggggacttcctcttgtcatcatctgcagactcaacaagtaaagccttctcattgtgcttgttttgtatcattctcttccttgttactttattaattagaattcacaatttatctatatttttttgacttgctacagttcgcttatggaacaccaagttgaatgctaatcttgtttgctacaaaggacacaactaccctgtttgggatgtccaagtatgtgattaccagttcttttagtatattattagtgtggatacaaagctgttttcaatgccaaaaagaaaaaaggaagcatgggtttctgtgtgctccttatgaactattcctaactagtatttcatcgttagtactctccatgatggagtactaggtacttatatgtcctgtgaaaagctcactgtcaaattcttttggatgcaagttatctgattctgttattgtagtccttgtgctatgatagttgttgacactgttctgttttcttttggcagtttagtccagttggacattactttgctagtgcttcgcatgacaggactgctagaatctggtccatggataaaatccagcctttgagaataatggctgggcatttatctgatgttgatgtaagtgtactcatggttttggtcattttcttatatgggatcacttaatgttggaatatttccatacatgcttattctctaatttcctatattgatgtctgcatttttttaaaaaaaatacttttgcctgacagtgtgtgcaatggcatgtcaactgcaactacattgccactggctctagtgacaaaacagtaagactatgggatgttcaaacaggtgaatgtataaggatgtttattggccataggagtatggttttatcattggcaatgtctcctgatgggcgatacatggcctctggagatgaagatggaacaatcatgatgtgggatatatcttctggtcgttgtgtttcaccgctagtgggacataactcttgtgtgtggtcgcttgcttacaggtaatcatcatttgatgctggtcggctggtaaaaatataatatctatctagccgatttctttaatatgccaatagagtagtattatggaactacggcactacgctagttataggcttatagcatggcttggcaaactggctagtgcatatgtagcaggactgagttttggaaaatcaattggtttatttgaattgagtaagcatgatctatctatatacaagaaatcagctcatcgtttcttccatcctcatctagatgtgtttaaatgatatcactcacaagggcatcagaaaccagatctggctgcgtctggtttttgccttttcagttttagagttgggctttgggatttacactgtatcagtggaagcaaattggagtatttttgtatagaacttaaatttgaaaaaagtgttattagaggggtgaacctgaggagttctaatggtagcaaaaacatccacatagatgtttccagtttcaaggccagttaccagctgttaactggtgaaatttacggccaacagtttgtcttttttctttgataatctgctttgaatttcttgaataaatcaatgagattaatacagacttcaaagtattatcattgcgttggcatgtcaaaaccttgctgttagcagcaacacaccttcttttggggagaacaatagaaacgtgcatgttgttggttacaagtgattacatatggaatgttttgtttagactatcctgtaaatgatcatttgttgttatgctttgctttatttaagcttgcgatttaaggacttctttactcgcacaatgctttccatgtatggtgcgcatgatttgtgtatataaatgctcgctgttatttctttcagagggagtcatgtttgctgttttgtgatgtctataatctgcgttctgttgtagtttaaggaaaagtatggttgatcttagttaatacattctgccattattttagctgtgaaggggcattacttgcatctggatcagccgactgcactgtaaaactatgggatgtcgcctccagcactaagactcttaagatggatgatacgtgagttgatcgaagtgtttataaagatgcttgtaccaaatcattgccttactcttgttgtaaaatgtccttgtacagcaaaggtggttcagctaaccgactgaggatgctgaaagccctccctacaaaatcaacccctgtttacactctgcaggtgagaatttttttccctcctttagtccattatgttgccttaagttatggttgttaccttatgcattgtaaacataactgctttcatcttgttgcagttttctcggaggaatcttttatttgcggctggtgctccctcacttggctcctaagcttctgtatgttctatagagtacaagtagcattctttcagtttttggttttagtaagtagtaaagttgatgtctactggggtggcaggtgtcgtagcatctacattttcccttagtgatcccagtgaacctaggggtaaattgtagcactggggcactgcaattcgttgcaatatgtgtagtgatgtagcattagccagttcaaaatatatgcaatttcccgtaatgatacatctaactttactctacgtgtgccatactgtttcaaccaatcattctttccactcaaattctaccctttgtatggatggggtcaaatctgaaccgaggtataaccgtgtaacctcattttctggatagaccatgcccgcgcgataactccttctcacagagaatgattaaagcagagtttcttatgttcggatttctgccaatttaaatttggttctaactctcttggtaccaaacagtaagctccataggcactgatccactgctcttacctgctagctgctactgttgctcactgattgctctactgatggccaagctggccaccttggcaacagtcgaccaacagcccatggcctaggtgctgggatgaacagccctggatcttcactgttaaaaaaattttagagggtgagagggcatgaggcaaactcaaatctgtcaatctaccaatggtcatgtagtgtggtatagtagagtgcagaagattcatgtatttacctgtgaaaatgatggtggatttcggcagaattgaatcggagacgttgcatgtcttgtagtttcaatgttcaaatgatttggtctcccggcacctgtgtccatgcaaacacactccatataccagtgccaccgcgtctctgtctcccagtgtacaaggttatggatctatcagcctgacatttcactctcagctgcaaacttatgatggtccacgctttcagctttctcccatcacgccactgctttcgccatccgtccaaaacgagttttttatttttttgctttttctttttcaaatataaatataccctgacaggtgaactatttttcctgtgaagttcatgtaattgttttttgtttctctcacagcttgtctcagtgagagaagtgaatgcctagatcaatgcttggtggaagtggaactagaaccttagaaactttcaactgtttgctagaatatgtgtgtgcaccatttatccaaatccttgtgttggccatactcgccagaaagactggacacaccaaaccacataaaaggtaaatttgtattcatctgcagagtttacaagcaaacaactggactgtcattgggttttggatccctcctagcatgcatgtgacttttttcttagataaatggaaagcaatgcatgtgactatctggctacctaacacatattttgctggtatcctggtgaatatttggtagaatactcaccacttcatcagaggatgtcacaggcataaaactaccatattactagcaggttgccatcaatcagatgagatccctcatgaaacaaagttaatcccttcacaattatacacagcccatcttgcaggctgtaatctttttttgagagcctaattagttgatcaacatgattggcaaaaaggctcaactttttcatatccatctaaaaaaaccagttggcattgtgtggatgaaatgtagctttcaacatcctgcatttcataatttgcattgcctgcttaagatggattagagagcaaggagggtcatcctccaacctccatgggacctatgtcccaaaggtgagcagcctacctagttggtacatggcaggatcagcttgcagcctcataagctgtgacagtgtgagggtactgaggtcccctctacctctgttcaccatgtatcatacacagtgccagcagcctttttggagtccagacattgctccattattgtgtatgtctcctaggctagagtactagacccttggcatttggcctcttcttctaaggacaactgccatgaatctcacatatatagtgacttgcatggccttttttcagctctggtgttgttattatagccaacattcaacattttggtttaactggatttgactgttagtttaactgaagatgatttcagtgcaaatattgcatttttcaaaatgacattgaggatatagatgcataggatgctgccactattagtgtggatggatagctggagtggtgatggtgaaccaaacaacccctaacatggtacgttctatccacgtacgttttgagtgatctttgcgagtgctccgtgctaagaatattgaaaggatgaagctgatctggtgataataagctggtccttgcacatctcctaccgtccacccacttgtggtagggcatgcctcttatcattttgtggacacaagtgatttggcaacttgatcacactaactattcagatcatggtgcttaattagttttttgcaatattccccttggtggttagggagcaaagatgacccttttataagttgtgtggttattgatcaatccatgatgtgagtattgatgtcttaaaaggttattggagaatgattggcatatcacagtggcagtatagcactagcaagcagcagatgcatttgagtattttgagtgtctgaaccattcaaccaaaacaataatatataactcacctgccaataaatttcaaggtattggagcagtcactgatcactgcatacatttacaattttctgtaacactatatgcatgcatcatcatgtgagaatcttcactgtgcattcctgtcatccccatgaagtaggaccatggtgccctaggtttcttccattttcaattcattccaagtttgtgttgcagccttgcaggagctaccattgctctctgaacaacacacaagaaagatgatggtaggaagatcagaaggggtcactttttttgggctcgatgacatgagtggacaaatctacccaagctaaggttagtgggagcagcccatgtgatgatgtggggtgcaattggatcattgtcatcttaccttttttttcccacccccttcttttcatcttgtgtggcaaagtgacatggcctcatgtgatgatgcatgggagaaaaggaaatttttttttagtagcaatgcaaagtgtgctctttgctgaaaatgcaagaggaaagtggcttttgtgcaaatggcataaaaccttaagatatggggggtgaatttcatgagtgccttgcattatagaaccatagatgtgtagctagcctttttgtggtgctttgttttgataattgtggcagtgcagatgcacagtggcatcaatctacctgttagtgcaataattcattttggtgaaccagtgttattatggttttgttagttgggatacgacaccacatatgttaacaacatgcctaattttatttataatgaaatagcaaatatcaatattttttaaaagaaaaagaaaaattgagagagctctaagaaagatgccttttaagttctgttgttacatgaaaagtgaacttgtgttattatggttttgttatttgagatatgacaccacatagtgttaacaaacatgcctaatttcctttatttataatgaaatatcaacagagagaaatagagacaagtctaagaagaaagatgcctttcaagttgtgttgttacttgaaaagtgagaagattgctatgccctttttcttgtgtgaatggattccatctcttgattgatatggctatatatgccttttaggaagggatccatgccgtccatcttcaacaacacgcaaatgatcaagaaaacatggccgaagttgctgcccaacaaaccctagctagcgagtttccttggatgaaagaatattagcacatcatcatcagaaagcgagctttgtcatatgccctagctacaagactatagggatatggacgcatctcacttcactttacgggtacccattgtcacacaccatatacacaataatataggataagtgaattttagttgattttgcttaactagatggatggtaagactttctagcattgtccacatacatatagatgttaatgaatctaaacacatacatatctctagatttattaatatctaaatgaatataggcaatgctagaaagtcttacattgtaaaatggaggaagtataaacttaattgtatatagttcattattaatcatagaaattaggtaaatgtagctatatgctattagttggtttgtctctgaacaatgaaaatcagtcccttcatctcgtttatggttgattattagttataacgcttattaacaataaaaatgtacatgcgttaaaacttgtgtatgtgttatatatcttagtgatttataagccgatgttaaaaataaattacgctaaaattattaaaatcaaaagtgtttgatgcagctaataggctaagggcctgtttggcacgggtctaactgcacctcccctagagcccagtaagatagtttcaactccatctaaaataggagcagagctaggtaaagcgttctcataaaataaactagagaggttcagtttggtttagactgctccacaaaattccactccaaacctaactcctagagttaaatttagaagttaaacctctaccaaacggaacctaaggctgcctttgaaagtggaggttgagaactccaattgtttgcatgcaaaacggaacgacaaataacgttgattaattacatattagctaaaataaactagaaaactgaattaatatgaatttttaaagcaactttcctatatgaactttttaaaaaaacacatcatttagcagcttgtgaaacgtgtgcacggaaaaagatgaagtagaagttgggaaaaggtgttgtcgaacagaactaagatcaagtttaataatataatcaactactagtttcaaaaattaacatattatctataactaacttgatagctcacttagagcacccgcaatggtaaagtaaggtgctatctataaaacatgtacacctcaacaatagactagattaatagtaaaccacttcaatggtatgtctacatgggtatctatagctctctaatccattgtctcgtttttctctatagactatctccatgttagtagatagctttgctctctctcttcatttaatctctttcaagtaggaaaatatgctgacatggatctcttgtagagagcttatagataaccattgtgggtgcccttataccatacttacttatagatatatactataccattaatgcatatcctatctcacataggttattggagcttgtgttgtagttgactacaaatctttaaccaacttttctctttccttcaagtaaacacaaatatagtgtggtaatatgtagaacatacttgcatcgtcatattgagttgatttggtttgtggcctaaataggccttaccaaattttgtctaattttggtaaggtaaagttgtatttggattgaagtcaaaatagcctaagtttactattgaaatggtctattttcttagacatgctaaaatttggcttcaaaccaaatagacagtaaatactattgaaattgtcaaatattggtaagtctaatttaggcctcaaaccaaaccagtccattatactcgctcgggtcaaaagaggctataggcagggtagagtgtcatttggaccttgaacattttaaagaacaaaacattcaagttaatattttactcctgatgagagagttgctgttacagagtgtgaaaaaccttaggattcctgaacatattttactccctgatgggtaaaaagaacagagtgattaattaatgtctgatgctgggcccatccaagaccaatcatggtggagctgcagtaactgttactccaatattgaccaaatgtttgtgtgtacgtactgtagtagtagaatgtatgaccagctagctagtcagattccaaagaaagatagtactagtagtaaaaataactgaaaacaggcgtactatagtagtaatacctagtactactgagtgaaagcagggggtgtactcttgtacgtgtttcacgtgctatatgtaagagcaggtacaataacaaattataaataaaaaagaaaataaagaagagagatgagcaattggctatagatttatagccagctacaatatggactcgaagacacaatttatatataacatgtaggatcagatattaatagtatattatatatttgtaggtaactattatataaattggctataaatgatttggagctattagttggctatactactattaaacttgcttggctatactattaaacttgctctaagcagaagtggtgaacaaaagccgggagtacaccctcagttcctaagtagagcaatttttggttgaaagagatacagagtactttcctaaggatgaatttggacatactccctatctaaattcataatattaggatatatcacatctgacagagcgtggggctcctcaccgggagaccgcgcaggcccccctttgccggttcggccgggggctcagggtgaaatcccaagctctctctgtatgtggaaagatcgcgacctatcgaaagagcatgagacacaggcgatgtatacaggttcgggccgcttagaagcgtaataccctactcctgtgttttggtggatctgtgtatgaaggagctacaaagtgtgagccagcctctcccttgttctgggttccgaatctggcccccccccaaatccccccttttctaaatgggcaaggtcctccttttatatttcaaggggataccacatgcacccccctctctcccaactggacttttcttctcttcataaatggacggagatttgcatggttgccctccgaatgaccttctgacgggacggcccatacctacctccacttctgccgaaggcaggcgcgtcgtgggaacgtggctgtctgctgacgacatgatcagtgtcagaccggtcacaagtcggtcattcttgtccaccatgcgtcagcttagcaacatgcatgtttgcccttcttcacacaacatattgcttgtaatggttaggatgaagcctggcatatatccgaccggggctaacgtgccatctctgggaggtaacacgctagctccagctggggacgagtgcctagaagctctcgtcttgacgggatggggcgaagcgtgcgtcagaccgcctgtcgccacctaacccgcgatctgaccggtctgtgactggtcacagaccggataaaccagtgcactgcactgcatttcgtgcggcgtgacacgtttagccgagccgcaataaatgcggttaggtgagccccgctgtgttcacctaacccatacacgcggagtagaacccgcgaggggtcggggcgcctcggccctcgggggcgaggcaggagtggtccgacccccctgggggagaccaagaggtgggcgcacacatcaccctcgggcccgacgtcccccgagggtgccaggccacgtggtgtaaagtatctcttccctcgacagtcgtctaaggtccctctatcaaatactagtctacattctcacacggattctgataatatattgttaatgtaaaatttaaaaataaaataaaatccaaaaagagaaaacactgatttttactactcatatcaccagtttttaatcggaatcctgagctatatatcaaacaatgactaagttccttttattttctttacataattctcgccttctttttatccttataggctaggttaatttgtaacacattttgctaccttaatttaattaaggaacaaatggtatatctccgatacgcagcaggaagccaccaaaataaaggcctatttaatattgactagctaacaagagtaagcatgagataagtttaagactgcttaagtttaactctagttcttttgttgaagttctcaactcaacttaactcttttgtttttcacgtacacacctttaaaactattaaacagtatgtttttttaaaaaatatatacaaaagttgctttaaaaatcatattaatccctttttaaaaaataattgatacttaactatcgtgatttaatgagtcgtttctttttacgtgcgtgagagatgagttttcaacaccgagcaccgaactcagcttgaagctttagattctaagaaacaatggatgaaaatctagcaagtaattaattaatttagagaagctaagataacaacttttatctttcagtttgttatctaagtatagtatcttaaaattttaaaaaaagctaaattatttggaaaactttagttcttaaaaaaattgtagatgctaaagtcttcgtaaacatgtcctcaaactcgggtggggatggtctaggtatgcgattgaactaattaaactatggtccagctctgctatatatcttaatttactttgacacgtgaacttgtcatgaaaaatatataatgcaaaccaaatatgtagtgaaacttgaaaactatcgttggattaaaaaaataacatttgagattgatccacgtcacgaaaagaaaaaaagttttcaggagtaaagtttttactcatgatgtggacaaatctcagccatttattttcagatctcacgatagtttccatatttgtattacatatgtggtttgtattacatattttcctaatttatcgctggccggtgaaaaaacatgttgaagtttgtgttcttgtggcaaacacatatcttagtttatgatttgttttttataatcgatggtattgcttgggaagcttaagattttgagaaatgatagttagcttttgagaatattgagaagctcagattctgacttctagtttatttgggattgtttttgactctagaagaagctatagatgtcagaagttccctaaacggactcctaatgcaaaagaatgcatttcacgaaagaaagttaactttcctctattcaaaggaaatgcttgacatcgggaaaaacacaaaggtgttcatatccaaagcatgattgttggatatttgtttgggatcatatggctatatgtcatgtttagagagcttgatatctgtaactactcgtggagtttttcactgactcaaacaatcaaattctcgcttaaattatatgaatcagtagctagctttttcttattcacctcaaaatatagttttagagcttttattcaccagttttgatgtatacaactttcgatagaattttaataagatcatggatgcaatcactggtttgtctcttaaaatgtgtgttaggggacgcattcacgggagtgcgagtgtagtgctacatatatagtggtgtgtgtccgtgtgccatgtaatcgaatggcctgtttatattgtacccaaaataaaccttataaaattttgacaatgacaaaaatttggcaatttaataatatatattgccaaaattttggtaggattttttatgtatttactaaagtttggcaagaaactaaatgaatgtgtttatttgacaactctaaaaaaaatggtatggtttgaaatgacatcgatctgaataggtccgaaaataaaaaaaatgttgtatgattttataaggtataggaatactgccgttgtgtttgtgtagcgcaactgtgcatagtacagtgtctcatgttctcatgatctcgtccctttgccatgccagacgtacctgcccgcccagtcacctcgcctgcgtaatctctgcatatgcatcgcaattcgcaagaggcgagagggaggatccaatgctgctgacacggtgggtcccacataaactgacaccgtagcacatcagcacgctttctgagcttctccctctccggtctcacggtgtcccccgccttgagcctggtgaatgacaggtgggcccgtcctgcgcgtgggaccaaccggtcagggggtcggtgcggagctctgggctttgcagctgcaggtcgcacgtgtcgcggggctccatagcggattggatgtgggccccactctccccagccgctaagagcatgtacaatagcagactattagccagctacaaacatattttaaagagataaaatatgagagagaatagcaacgggggctacagatctgtagccagctgcagcacggactccaaagacacaatgtgtgtatgacatgtgggaccatgtactaatagtatagtaagcaattattgtatgaattggctattagcttggctatatatgaattagagctagtagtgggctatactattaaacttgctctaaccacacgcgggttttggttatagacttcataattttgcacatccttttacagaaaatctatcgtacggtattctgtggagacggaatagtagtactgccttatctccttttcctctctctctgtatctcttcccctccactcgctctctctctctgtctcttcccctccactcgatctctctctctctgactaccacccatgagcacggaggcggcaacggcgacgacggtggtggcaacggcggcgacgacgatgacgacggcgatgccgtcactactagcccccgcggatgacctagacgacagtcggcggaccaccacgggcgacggccgccgtcgagaagcctcctcatcaagctcctcaagccgctcctcctcttcatcattcttgtcgctggcttcctcgccgctgccgccctcctcctcctcggctgcgctggcgcctcctacagtcggggagcgcttggcacaacatgagcgacgaggagctgctctaggtggcgtcaatggagctacgggttcggcggtttggagcgaggcacgacgacgagcgacggaatggcacaaggtaggcaccagatctatcgcctcctcttcctcttcctccgccgccgcccagctgctcgacctccccgacctgcaactcctcctcctcctcttctctcttgagatatcacgctgatacccaggtaccaaggcctgatacctaggtatcagctcgatacctagggtaccaggtatcagtcgataccagggtactagctgataccagtgtactaggtaccacctcgataccttacccaaggtactagggaggattggataaggtggaatcacaggatagcatggacctccccacgaaattgactatgcgtattaaatctctcgggattttagttatcctgtgactgctaggagcaacggaatcccgtggggtagcaaccctcatccttttattaccgatggtgtaatttccccgtactgagctggatcacgagtcatcaaatattggtcaggatgcatgcatgttaaattatacggagtacttcttgtatcctaaaataaatagtaataaacgtaacacaaccgaaatataaaccgacttaattgcatctaagcgcgaaatgttcagaattatacccctaaccaacatgtccgtgtgagcacgtaatttcggttgatcagacctccaacggagtaagggcatgttcaatgcgtagcccggcgagtggctctggctcacggtgtcgattttttcggtcggagccgtctcccagcagagggccatgacccctctgcaggggacgcgcctcctgtgttcctccgctcctttttgtcgagccacaggaccgggcttcacgttggagacaccgtggctaggggagtggctcatggacactgctctcacccacggattttccccttccacccctagccccagcagtctcgtgcttaatagatgcttcattagcgacggcgaagagggaggcgcataggagagaggcgacgaggggtggtgcgagagagagagaggcgatgacgatgactagatctggccaccagccaatgacgggcagagagggaggcgtacgcggtggtgcctcgttgtcctctgcgacgggagagagaaggagagaggcgacgatgggtggcaaaagagagaaagaggagagtggcgacggcgacgaccagatccggccattgcgcgccgtggcagccgtccgtcggccaccagccggcgaggggcgaagggcttcctcacgcggcggcagcgaccagatctggcgcaggctgtcggcgcggcggtggtggctagggagggtgaggagggaggcgacagcggtggctagggagggcgaggagggaggcagcggcgagcggcgggggagaaataggcgacgcgctcgagagagggggagagattggcgatgcatgtgcgcgagagagaggagaagtgtcggtagggaaaaaaagtcgtcggtgagctggaggatagaggagggtagtataggaaaatattcactgtgggggatttttggttggaacacccactgtgggcctgagtactttcacccaattgcctcatattttaaagagcctatctagtgtagcctttattgaaagatgagtgtctctgagaatgtcctcagttagtgagaacaatctaggggtggctttgattttacatgctctaagtgggctgccaattccctttttttcctagtaactcatggtttgtgttgcatatggggatagattaaaaaacaatctagtttgtttactaaataatatccaacatagattaatctggttggtagcattctacaaaccagattaatctattttggatatttagtaaaccatgctatttcagattaatgccatttcaaaccatgatattatttggtaaaaatgattatgtggctatatttagtaatgactatggaattttgacaatattatattgagcacatcctactaaaatttggtaatgttgtcaatttatcaaaattttggtattaccaaattttgaaaagttgtattttgatatcaatctgaacataccttaaggtcctctttgattcaaaggaaattcataagaattttaaaggattttatttctatagaaaattttcctatatagccctttgaatcaaaggaatgaatcctatgcaatcctatgaaattcctatggaatgcctcttcctatgtaattattggaggaaatttagcatgaggtagaacctcatgttaagaattctttgagtctttatatctactcaaattcctgtatttttcctacggcttaatcaaacggtcattcctatgtttttcctgtgttttgtaaccctctgttttacacttatatttctgtgagaattctatgttttttctattcctccgtttttttatttctgtaattcaaagaggccttaactcagttgtttgttagtagtagttgtttgtgtggccactgtacaaatttcatgtcactgcgcgcatataccagaccaatcaaatgagtaagcacaaagcaatcgatgcgctaacatgtacctactcctgtattacattgcgacaaacaagatatatattgcgaatcaaagcccattaatatcttggttactatttactccctccgtcaaaaaaagacaaacccggatttccgtgtccaacgtttaaccgtccgtcttatttaaaaaaattatgaaaaaaattaaaaagacaagtcacgcataaaatattaatcatgttttattatctaacaacaatgaaaatacggattataaaaaaatttatataagacggacagttaaagttggacacgaaaacccagggtttgccctgatgccctggcacaacgagctgaacttggttttttttttgacggagagatagttaaaaagacggccaatttatttcactgggcctggtgaaccgaattggcgtgctcacactagcatgttggttagaaaaataattctgaaaattacatgcttggatttgaaattacgtggttgcatgtgtgtttagattaaaaaaaagtcatgacctggtttcaataactgattataataagtactccctccgttttttaatatatgacgccattgactttttcttacatgtttgaccattcgtcttattcaaaaaatttacgtaattataatttattttgttatggattgttttatcgttcatagtactttaagtgtaatttatatcttatacatttgcataaaatttttgaataacacaaatggtcaaacatgtgagaaaaagtcaacggcgtcatctattaaaaaacggaggtagtaatgtttattagaaataaaaagataatttactagatgtttcacgagtaaaatttttattcatgatgacgtggataaacctcatagatctaattttccacatctaactacacatttctatttaatatgtgtgatttgcaccgcatactttccccgacaatagatcatcctgtgcgcgcttagagcaggtacaataatagactatatatcaactataaacacatatcgaggagatggaagaagggagagatgagcagcgggctatagatttgtagttagctacaacacagacttcaagacgtaatgtgtgtataacagataagacccgatattaatagtgtagtatattgtatatatttgtagataactatggtatgaattagctattaaatcaactataattagttggctatattattaaacttgatcttaaataattaacgaaaatcatcgaggtaggcgagggcagtttggtcagaacacacacaaaaaaaaaagttaaagctcggaaacggcaaaagctatggcgaccgaccggtcacttcccactccccagttcccagtgaacagagcaggagcagcctccactcctcctctgccactccactccccaccaccactcgcatcaccatccatccatccatctccaacccaagccgaatcacaccaatcgccatcgccatcgccatcgccgtgcgtggtcgccggtgccggcggcggagggggagggggaccaagggaaaagagagaaggtgagctgagctgagctgaggtgaagtggtgctgaggcgagtgactggggggcaatggcagcggcgtgggtgctggccgcggcggcggcgttggcgctgtgggcggcggcggcggagggggcaaggtcgccggcggcgagggtgcaccggcacctcaagaggctcaacaagccggccgtcaagagcatcgaggttgggtggccagttcttgaaaacatttgcttctttttattattatttcttttgggggttatcgctcaactttgtgttgttgatgcattgttacattgggagttcaaaatgttagtattttcatttcacattcttttttttttcacttttgtttctatgagttttggtctagcattgatttgctaagattttgagatggattgatttgcagagaagaaagtttgcccctcttttctgtgcttcttttgggctgttcttggtagtttttctcattgctgctttaaagaatttttcgaaaaagttgcaatcttttggaggtacattttggcaactcaagcaaaagaaggcagaaaagacgtgtcctgctttcaggctggctctggcaaagttgtattattctccaatgaaaaaaggggttgaatgaacaattcctttttttaaatctttctttacatttccgaacaatgatttctgcgttttccaaaaagttcaaaacctgaagcgtttgtcttcttttttttggtattattgttattattatttgtcatgaacaaatgtcctatccgtttgaaactgttttgcaaaccgatgcagagcccagatggagacatcatcgactgcgtgcatctctctcaccaaccagcatttgatcatcccctactcaagaaccatactctccaggtaaaatgcttcactttgcaatcatttcaaagtactcatcaaacctgcatttaccacagtacatctgtacatggtccaatatgttgcattcaacatttttctaaaagaaagctctgtcaaaaatctttatccttgcagatgaggccggcctaccaccctgaaggcttgtatgatgatgacaagagaagcgtggcctctgacaatgccggcgagaagccgatgctccagctatggcatcaaaaggggaggtgcccggagggcaccgtcccgatcaggagaacgaagaaggatgatctgctcagagcgagctcgttgcggcggtatggcaggaaacggcataccgccgtgaacccgctgtccattgatcccaacatgctcaatgagggtggtcaccaagtatgtccgaatacgatgtcatgttgagttgaaatcaaaatggaacatggtaatggcatcggcatgtttggtacttaaccgaaactgttttcttgttgcaaattcagcatgccatagcgtatgtggagggggataagtactatggtgccaaggccaccattaatgtgtgggagcccaagattcagcagcctaacgagttcagcctgtcccagctctggatcttggggggttcatttggtgaggatctcaacagcatcgaggccgggtggcaggtactactgggaagaaaacctgagctcatatgagcttcatcacattcatagttacgcgaattgaatgatgaccgttttcgcggtcggctgtccccctgccatgatgcatggatgcaattgcaacctgtgctgtgtgtctgatcatttgcgctaaccgccgtcctttgattcatcaggtcagcccagacctctatggagataataacactaggctgttcacatactggactgtaagtttcacaaactcaacaatccatatgcttatactattgatggtacattgttatactattaatgttctctgtactctggcaacagacattctgttgttgatgcattaacttcggtgtcccttacgtttgctttcgcattggggtcttttttgtagagtgatgcttaccaagcaacagggtgctacaacatattgtgctccggattcattcagatcaacagcgagatcgccatgggcgcgagcatcttccccatctcgaacatcgccggctcacagtatgatatcagtattctgatctggaaggtgagcaattcttaaactattaccaaggcatcatcacataatgacatgcttagtgccttgagaattagcataagaactaatggggccagagaatctttccccacttgctctaatgctccttcacacacctggttctttgaaaaccattttgtccaaatcacatgtactaggcatgcataactaacactaatgtggcatctctagtgactatattatcgaaaaaaaactctaattatatagtaatattctatgtgcttcatctgtggacaggacccaaaggaaggaaactggtggatgcagttcggcagggagtatgtcctcggctactggccgtccttcctcttctcctacctcgtcgacagtgcgtcgatggtcgagtggggcggggaggtggtgaactcggagcccgacggcacgcacacgtcgacgcagatggggagcgggcggttcccggaggaagggttcggcaaggcgagctacttcaagaacatccaggtggtggacagcagcaaccagctgaaggcccccaagggggtgggcacctacaccgagcagtccaattgctacgatgttcagaacggcaacaatggcgactggggcacctacttctactatggcggcccggggaagaactcgaattgcccatgaatttggtgatgaagaagctgatgatatatatatatttatatatatatatataatatatggtgaagtgtgcaagtgtaaccaagcattaatcatgtgtggaatacagattgatctgcatctgtttcttaatttagccctaggtagtatatgtgtatctttcctactgattttctttttcttctcttcattagttttttcttcttctttttctgatgtgccatgtaaaagtttctgaagagaagcatggcgtgaggtggtggtgcaggggtgatgatgacaattgatttgtgggtaatttgcaagtcaaacggcttgtgatcagtactacaaatttattagctgttgtgttagctgataaaatgacttggtagtagacagtagttctgtagaaacgtgagaaaatttgacagattcgaaatacaaattcaaagcaacgaggaagggagctgggctagactgtcagaaatccaatgtacacgaagagaaaataataaattcttgaggtggcctaccttctcggggaacatgtttgttctcagaagagtgttggtagctgagaaactctgaatccatggttcacctccattttatatcaaactagccaatagatcgtgcgttgcaaggaaaaacaaattaagtttatagcttattcagtcaattaaacacatatttagtctaagtagtacttttatgtttttttattgaacaagtagtttcttttttagataatagaaatgtgttacatctccgatctctgcccgtaggcacacaacaaaaagtctagaagtgaacagaaaaaagcttaagaagtacggagtagttgatttcaaaatttaggaagagccatgtataatagtatagattgtggtataataacatagatcgttagacccaaatgtcagtgataagggtggtgtgataacggccagcactactagtaacattttaagtagcataaatgcataccgatagatatatgatgacattttaatgcaatagctgtatcagggtctttgggaggaaaagcaagagtgatgaatgccaaaatttatatgaagatgtcaaattttatatgacaccgttgatttttgacgtgatatttgatcattcgtcctaattaaaaaatatatataaatgctatttatttcattgtgacatggtttctcattaaataaattttactataaattacacttaggcatatttatacaaatgttttttaaaaaagaatgatcaaacattatttttaaaagtcaacgacatcaactgttaaaaatggagggcagatcaacagtgttagcatcagtgtcaggcgacaccgacgactttcgacaaaacctaaattattatttttagatccgccactgaaacggaggtagtatcaattacagaagaagagcgagaggaaaaggagggcaagcagtggcggatccagaaaatcgattcgttagtgtcagaacgtgtctatcggtgtcatagtatgctaattacacttagatcatggtgttatagcatatgaataagcagtttcgctataggttttgccgaaagtcgtcggtgtcgcctgacaccggccctataactatagatccgcccctgagggcaagtgtgaggcaatggaggagacctaaccggcggctcaccatcaccggagctgtctgccagtcagtctgccgtggccggcggtggcatggggcatggccgaagcggagcctcctctacttaggccaaaatttggtctggtctgaggcttcagctaggtcacaccaccattcattccttcattcatcgctgcccaaattaagtttgtaatttgcacccctagtctctccaattttacaattcttaacattttagacaacacatggtctccaaaatatatctttgactatatatttctattataacatactagtcgcatacctgtgcaacgcacaggttattatcaatattttaaacattgtttacttcttggattttatatttgaggtgccagtcacttttgtcatataatagccctatggttctcatcactaccctatcactgaaaacaaaaattcctttctaggataaaatgctggaaataggctactataacatacaaaaattttcaaaactacggaacattaacttataactcataacaattttttttaaaaaaaatcaaaattacatataaataaagcaaacaacaaaatgcagttaaaatgatctaaaatcccacactgcatagtgcagttttgaggactaaaaagttacagatttttaggcgccttaatcaccttgtttcttattcataattatatatgagtaaaatatatggctggtccctaaacttgtgtggtggtgtcacttaggtccgtgaacttggtttaatgtaccatcccggtccaaatgtcctttaactgcgtttgaccgcatgccacgtaggtaacacttttgctctcagccccctccacatcacaatacatcgcatatatcttcttatagctatatatagtaacactagaatccaaaaaaaaaaatctcaaatcgttctcccatctcattcttctcctttcatgtatagaaaatgcggttccgattagcaattgctattgctccatgctccaaaataaacttattcttacacaacgggcacttgatcaacaacacattcttcccgtgacttcaagatgggggtgagcttgtagaatccatggggatgcctagcgtgcaagccgcattgcgctgcctcctatcgcaaatctggccgcactgtgccaccgctaatcctgctataccctgtattggcgctgtctcctgccgctaatctcactgccaagaccgccacaaccactacctttcggtctccttccgctaacctcaccgtcgaaaccctagatgatttagggatatttttggggatttgggttgaaatgcatttgtcagggcaagttatgtgcgaagatatatgtgaagggggctgaacacaaaagtgttgcttacgtggcatgacacattggcggtcaaacgtggtcaaaggacgattgaacgggggtggtacattaaaccaagttcacggacttaaatgtgcaatttttaagtttatggatctaagtgacaccacctcacaagtttaaggaccggccatatatttcgctcattatatattgttctcatattcacaaatatcttgatcagaaattgctgacaaccttctgtagaaaaattgtcattcctcctatttggaaatgttaaagcattcctcttacaacaaaacccaataaagcatcaagcacgtggatatcccttcaacaaaacataaatcatcgaaaggatatcagacgacttaacgaagcataaaagcggattggaaatggacgactatttgaagaatgcctaaagatcacatattgataagtccgcattaagtcgtcaactttggatccgactggggatttttgaagaatgtttcatgaaaaaattggaaagcaatgatgttgatgcttgcttatgaaaggacatggggggcaactaaggtcttgttcgtttctccaacaagatggagatgaaattttggttattcgtggcacgcttattaaactgctaaacggtgtgtttcgtgcgaaaactctctatatgaaagttgctctaaaatatcagagtaatttatttttcaagtttgtaataattaaaactcaagtaatcacacgttattaccacctcattttgcgtgaaacacttaatctttatcttcaggagatacctaagcattgaacatcaggaccatgaatatacctgataaactcccaccgaagaacagatccagaggtacttctctgttgctctgcgatatggtcaagaaagcgcgcatagatcaccagattatttacatccattatatatgacatggcaggcactaaaaaacaatttatattaattattatgattaaagagtcataagctaggtaatcgatcaatcaatgttgtttaagatgagaaacatgtgaagaaagaattaaattttgaaaaagggttcaaatcaaatcttgcatcagttgagaaaatagcatgcaatagtagctgcataggattgatccatcgattatgaaaccggagggagcaacttctcttgactttgagtgaaacccccagcccaacttgcatttgcgttggtgagtgaccatgtacattttacacgttgggtggatgttgcatacaaggaattcactccactagtgtaacttaatcatattcagcacatagaattttattccatgaatatcaaacaatgtggatatttcttttttttttgtggtcctgtactcttgttcgtttctccaacaaggaggagatgaaattttggatactcatggcacgttttttaaactgctaaatggtgtgttttgtgcgaaaactttctatatgaaagttactctaaaatgttagattaatctatttttcaagttagtaataattaaaactcaattgatcacatattattaccacctcgttttacgtgaaacacttaatctttatcttcacctttatctttagaagattcaaacaccaccttaactgtacggggaattgtgtccttgcaaagtctaggtttgaagagctactgcagcagtgtgttttgtatctccaagtccaaccgtttaattggaacaagtgcaagttctatctatcgactattagcgcaatttgcaatatggtttttcaaatggtgtcctgcgctattccaccgttgctaaggttttatcctcatccgccatagcaaatgttttattctggttttgcgatagttaaggttttattctgcatcggtcattgaagaagccatacatagtaagccataattgtcttttatctttttttggtgtgttaataaaattaaacaataggatcagaggcattgatggtagggaattttccgaacaaaacgatatatatatttactggttttttttctctttctatacttcttctatctataaatatcaaactcggacctaatgtctcatacacacatcaattacaatacaatctggcatatagcacatattagctcatcagtaagaaatggtgaaccacagctgccaaggacttttgttacttcttctagtgtgttctgccatgcctgcacttatcgagggtaactaatgaatcttctattttacttttgtaggaagggggctctaatttgcttttcatttatatgtcgttttgatggcaccacacttaaaatttcatcttgaatagattaatcgaatttacatgtacattattgcattttcattctattttgacaatatgtatgttcccttgataaacaggagctgatgttaaagattgcattcacaatcccatggaccctcatcaaatagataagaacttttgttgtgtaaaggataatgagtgctggatgtcgattcaagagtgcctggcaaattgcccatgtggcaaaaattgttcgacgtaatcatatgctcattagttagatctgacatctttagctagatactacgttaattatctctactacatccggtaatgctggcgagtgccaagtaaaccaaaggtccggcaatggtgttgtcagcggttgtgtgtgagggcgaccgatgttttcctttttctccttgtttaccgattcaacctaactaagatgatgtttttggtaaggatgatatttttttcttttgcatttattaatgtaagggtgaccaatgtaacccctgaatttatctaaaataaaatgaagaaaaaaattgaactcccatttcaaaatggtagttcaatttttttttcttcatttgattgttacctttgtttctatgaattttggtttagtggtgtagccgcatttgttaagattttgagctggattgatttgacaagttgtgcattctctaattcagaaaagtttgcccctcttttctgtgcttcttttgggctttcttggtagttttttttcttcttatagctgcttgaaagaatttttcgacaagagtaaattgcattcaagatacacgaacttgtaaaatgatcgttttggtgcatgagcttgtttggtgcgtgcaaaaaaaggtgaaaagaacattaaatggataatcttattgatttaagggctgattatgatactatataaacatatatttgagaaggttgctattagccatacacctcttcaataaaaatatagaatgggctatagtgaacgcagaaaaatatatgaaaaaatgagcaatgatataagggttagagatatatgacattcatcatttacacgatgaaggaaaaagtatagaccaaaattataaatattatatgctttatgcatactcattacacatgcacgtcacatagtcaacatcagctttgtaaaattagcattgcaagctattttggtccccgttcgcacgagctagacaagttcgtgtaccgaaacgagcattttacaagtttatgtactaaattgcacccatctaacaagtttgtgtaacaccaatgcaatttactctattcaaaatctaggataaagtggttgctgctctaagcaaacgggcgaccggtcgctttgtagtcatgtacatatagaaaatcctcaagaggatggtaggggtatagatttgtaaactttaaaacagaattatacttttgtaaatttttcaaaaagaatatataaatatgaaaattcctgatttctactttaatggatcttgatcctacatatttgggtccaatctgttcgtgtagccttttcggtttggcccgatttgggctgggaattatttatttgtttcatcctgcccaaaaaatacaaaccagatccaaatagaccgaaaaaaaacagaaggaaaaaaaaacgatacccagcccaaattgggcacgggccgaaaacttgggttagtgcaaattgacccatatataagtaaaaagaatgacaaaatagaaataaaaaaaaagagcgtgcgcgcgcacacaacaaacccacttgggcttagggcacaacgaagttacggaaaaatacgacatgtaaccatagtaatagcattgaagcataatgcaaggctataagctaaggaagcaattgtagtagtggatggagggaggcacagtttaacgccttacgagctgtctagcgaatttatttatttattgaacttagctgcctagcgaatttaacccatggtaagagaatatgtacgcagagtttaacccctctgaactgaatatcgtgccaagttgagcgaacgccaaataaatcagcttcagttgatgcagcagacagcagttctgattgccatctgtccttggcaccatctttgccactgtttgctgataatgcgatgaagagtagatagtagtcagatgttgcagttagcgatatctattgactaccacttccaatggttgctgtgttatcaccatgtcacgtattgagctcatatattcccatgagtcctacaaccaaaatagagggatctaaagaggtcttgtgttcttccggagccagtcgagagaatggccactcaacaaaggggaaacctgaaagtgaaaatgattgtggttaagcaacgcaatggttcatatgatcttggaatgatgtatacgaggaataattttgcttcccaagaaacagtcgacgattcgcatcctagtgaatactacctccgtcccgatataagtgcagatgtaggtttccgtgtccaacatgtaactgtccgtcttatttaaaaaaatatttatgattagtatttttgttgctattacatgataaaacatgaatttatgtgtgactaattttttttatttttttcataatttttttaaataagacgaacggttaaatgttgtatacggaaacccacaactgtacttatattgggacggaggtagtactgaatagtgacataatacattgggaaaaaagctagtacatgacaatcaaaaccatgcgcatgtgctgcatgcaacagtatgtcctaaatattgcgcaacaattgacatttaaaaataaaaaaagtgctctttcttatttaaatagccacacctaatgcaggcttagaaacagatttggatatcaattgttcaaaaaataattttgcctcaatgacatatgactcaccttttcccagacttcgtcatggtattcattgatccaattgatctccgaaggtgatagtaaggacaaatcaacaagcttgctctgaagttaccaaagaaacgaaaattaaatgtacaaggtggatgataataaaaagaagtgtacatatagaacagcacacaaagactcaggttaccagtccttaaaataattctgtggtaagttattaatttcataggccaacgttaaattactcagacttgattactcattagtaagaaagtaatatgtggatcaatgccattattgcaatatgtttccacaaaaaatagtatcaaatcgagttgatggtatacctgaattggaacaaaagttaatttttcaaaaccaaggtacgagacgccaccaaacgaatttggcaaattaacctctttgaccagaagaagattctgcaatattcaagaaaaaataatgagaaatggctattcaatgtactatctgcacaattgctcaatttagtcctaaaaatttaggagactgacatgagcaaagagtggggaaacctacctctatacgaatgccaaaggaattgtcttcgtaataaccaggctcattgcttacgatcatgcccttctgtaaagctgtcaaatttccatatcgatagcttatgctctgagggccctcatggacatttagtgcagctccaactccatgacctgtgcctggaacaagagaaaaattgatcatcaatttacgtagcatcacatgccataacttccagcattcagagatttttgtgtgcttagaaaatgtaccatgtctgtaatccagcccaatcttccacagagaagagcgtgcaagaacatctaatacaaagccaggagttctctctggaaataccgcctgatcgagagctatatgtccctgaaacaataaaactttatgactcgaataaagtatgaaacaaaaatcaagtgttgagtgagacaagtatcatagcacactgaaggcaagacatactaaataactgttacaattgagtaaaaaataactgttacaggtctaaacaaaattaaacattacctgcaaaacccttgtgaagcattccttttgccttggggttggctcaccaaagtgaacagtccttgttatgtcagtagttccatcaatatattgagcaccactatctaacagaaagagattgtcgcttccgacagagctgcagctctctggagttggtctgtagtgtattatagcaccatttgcaccataacctgagtggaaaatttgactacatattagaagtcaagaactgcagacatcacacggcatttgcaaacagcagtagtccaatgtcacattaaacattcccatgatgctcagcatgaaaattgagataagtctaaaccataacatgcattgtactcctaccatatatcaatactcgttttaaaagaaacaaggcagttgtggcactgaatctgccagcacaccaactctgcagtacatttgtaccaagtacttcttaagtttgttaatattgttagtatcttattccatctctaaattcatggaaaggtttatggtgacaaaaattgtcacatatatagtataaatgctaatttacaaatagagtaatgcaaaaagttgtctaagtgttcccttcaacagaagtaacaaaaacatggtgggtgagttcaatgaaaaaaatcacgcaatttattcaaacaatattagcacatgtagatccattttcattcgtagcaacacatggacatttagctagcaaaactaaataatgaaaaggcttagataaactgcttgagaatagtaacaaagttccagatcgattggttcgaggaacgtgatatgctacttgcaagaggtgtttacaaggtggtacgaaaatgtccacgtgttcccaggacattcctggtcaaggagctgccttcgacccagatcatgactaaccattaatgtatgcataattattccctaatatatacaatgaaaaaatgcagtaggctcaagctgagtgaaacatgttacacccctccctatcaaattacgctgtaataaagaggtttgagaaaggcaccataataaatacctaaagacactctaccaactacaaacaatcaatccagataatagatagcaataacaaacaaatattaacatttgaaactcaagatactggccatgtaaaacagttctcagggattttaatattgcagggaaaagttgaaatataccactgatagtgtcaaagcttgtatctataaagccatcttgcttttgacgaaattcaagaagcttttcagcaacttgcacttctgtaagtggtacactttcacgaacttgcccttctagccagcaccagaattctgctaaagcagcagcatctctgtaaatgtatttatgtgccagtatagacaatgcagtggtcagctggacccaaaggccacattaacagaaaaaggaaaaaaaaaaagaagatgcttcctttacaaaatgaaaaaaaaaaaaaaacacccagccgctgcactggtaagtgcagaaagccaaacaacaagaagatgatgaatgctgaaagtgatgatgaataaaaacccattgctaatgaaaaaaaatagtaacaatggtagtaggttaaggatctccattttctgtggagaatgacatcatctaagtacatgtctatggatggagctttgtatttgatctctactatgagttgctcactacatgagaatttggcacgtgatatccatatccatatttaggatatctatttgtgcacgatgaataggtaagcaggcactgtgtttccattgcaaattttgtgacctagtcgtatatagtgggaaactgatatgagatatattagaagcaatatcatttattgtacatcagtacactagtatcggatttgtcggagtaaggggaaagattattagacatttttccatgagtgaaattgtcatatcattagacattttttacatgtataaataattatagagcttactgggcaagtataaagaaaaagaataattgaagtgaacaatccgtacagggaaaatcacatttatattgttgctacaatgcaataaccagactatatggttgcctcaggtatggttctttcaattccaggaaatcaaggttctgtcttcactcttcaggcatttttcaactgacgaaaaaacaaagaattcaaaaacattttttaaaaacgataccttaggtgtgaactcttcataccctcaacttctgcttcattcttaactgctttggctagggtggctggtgaaactttgtatagagcatttacagttccattctgaacaccagagcttccagtagctgggtcaccttgagatgattcttttccaatttgtctccctgcttttcctctctttttcacgtatctctcacagcttgatctaaacacattaactatggcagcatttatacttgaagaatccagccaaagctttgcaccattctctgccaatctagaaaaggaaaagggaaacaatttccagactaagataatcatggaggagtttaagaggtgaacattgacaatttaaattagtctctttcatataatcacattttaagttagagctactaaaatacaattataaaatttaatagaaattggttcaagaatactgactggaacagcacacaagtactgaaccagaccaaggactggtaaagttggcacattattataatcaaataccatggctaaatgccctttacaaattttgggatctcaaaaacatgtttggtgttcaatcagtaacaagctcaagtccttttgtgaggtatacgtgcaataatgcgacataatcattatgtatttctttcaaaatcatgtacatgattttaagttcacagatgaacataaaatcaatatgtgacaggaagaacaggaaatcctaccacttccagggcagagaagaatttagataaaagctgttgaacacggaaatgacgtaatgggtcactggtttcaacaggttatcaactcacaaaatttatgatcagaattgtatatccgattggctaagactaataagcacgctcaactaccaaattaattaaaggtggttcttatctaattccaaatataaagggagatgatatgacatcaatatcagaaacaataattgcttttctgaagaattacctctcaacatcggacaaaatcgcttcatatggttttagttttactccagccttttcgaggtgctctaaaacatcttcagatactttgttgttatccacaaataatgtagcagcggtatcctccacaataaggtagctataaaatacaggtgaatttggaacatcacttcctctctgcataccaaaatgtgacaaactgactagcttaaccataataaaccaaagtgcaagcatgctcaacatagtagaaaaaaaaacaaactctgaacacgaattatcaagtgtgaaaagtgctaatatatcatgccacctcccaattatggattaatgaccttcataatttgcacaataagacaatagtacagaaatgtatccgataagcagaaaacaagtttacaaccataaaagcacaaaacataaaacatccttcaaattatgaaaagaaagtactaagtgctaagcagaaagtttggtaaaaacaaactttggtaaatattaatcttgagctacagatagttgagaatccataaaaaaggaatatagcaataaacataggtgtcaagtcataagaaacgatataagtaactgtgagagccaaaatattagtaccatgtttaacaaccatgcaacttcatcaagcaacgaaatgaccacagcattacacccattttcagcaagctgtgatctaacaaaggacaattttgatggcacgtcaacgccagcatatttgattccatgcactctagtttgttcttttgggggctctggccttgattctccccatatttcatcaactagattcaaatccttgatcaaaactaactcatggttcttctcggaaatagcatcttttagttcttcagctgcatcaaatgagaaaagaaactgcatccttcaaacaaagtaagaaataaagtattaggacaagaataaaatgaaacaaaaatatcaaaacataaacaatttttcagaatgcacatttatctgaaacttagtaggaagactaaatggaataaagttcttggtcagaatgtaacatttacaaagtaaacacaagaaggtttcaaatgactgtaaattttaccaacagtacacattcataaaacggttaacttcttgtgagggagatataaaatttagataaaaaaataagatctcaaattttaagatgcatgtgtgccacaaagcagtttcaggatacgattttgcaatttaatttaaacatcaatctattctttacttctaacatccatacactagtttgtcatttcatgggcatgtaagaatttgaagtacaaaaactgcatgaaaagaagcccaactaaaagaaaagataattatttatcacatgataatggcatgagaaaaggcatattagcaaaataatccatttttagtttggttgatgataaaacaagatctcaccgggtcaatgccaactcggcaaccagatggtaacacctcgttcaaccattcgctagtggtaggaacaccttgatttccactgcgcatgagtgtccaatcatggctcagttctttctcagcctactcaacagaagaacagatgaatgattagccaatagccacataaaaccatggttgctaagaaattaatttgccgtgtgggaattgagtacctggagaaagtaccggccatcagtccagagagcagctttatcttttgtgaccacagccgtaccagcactaccagtgaacccagtcaggtaagcacgcctcatgaagcattctgcgatgaactcgctctgagaataagatattaacaaaagcaggtaagtgggagaggggcatgtagtttcatgagatcaagaatgcattgaggtttttctacttcctagtatcatggagcatcaatagcttcacaaacaaacagtgtagacactatatatcatgtgctcccatgcatacatgaatccttgtttcagatagctagctaacgatggtttactgaaaggccctgacatcaaaatcaggccatagaacatgactacttgccagatacaaaaagcatacatacgcatcagtagttgtttccactaatatcaacgcacgatcgaaacagtcaatctgcaactgcaccataatcaccattgctcaccatttctgcactactttctgttgtctccattagtgtatcatcgattctccgtacggaatgatcgaataattgggagcaaggcagggtgtactaatagacctggtgggcgtcctgggaggggacgatgtaggcgtcgatggcgacgtcgggccgcgcgaggaggcggcggagcgagcggagcttctcgtcctcaccaccaccaggagcagcggaggaggaggatgatgcgccgccccggcgcttgcggagctccgacgaggggagggcgacggcgcggccgtccccgcccgcggcggcgaggaagcagaggcggcggcggcgcggggggagcaggagcgggagggcgcggcggagggggagggcggcgggaggagcgccgcggcggccgaggatggcggcggcggcgagggacggggagaggcgcgcggcttcgatcgccattggagcggaaagtggggacgacgacgatgatatgataagggagggagggattggaggctagagagtagagagagaaccccggcttgctttgtgatgtgatgtggcacaactgggccgccactcgtcattgacgggccggcccgggctggactgggccaggcttgggcccaaacgataagcggttgttgttattataacatctataaaataaatttggcatctataaactaaaccacggtatcccgtggggacgggatagcgctcatcgacccgagccccatctatttgtcgctctcttttcagataattttgaggcctcgtcaactcagctccccaccgacatggccagcggcggcgacgacgactctgtctccgcgctccgacgacgccccgcacgagctgttcatcttctccacgtctcgtcggcagacgacgacttcgcctcggtgctccgacgacgccttgacggtggagctggagcgggaggcggtgggtggggtcggggagcacgagcggctcggcaagcgatgcgcgcaacgcgtccaccagcgacgccgccgccacgagcggggaggtgtgccgacgcgagctttctcgaaggtgtggtccaggtgccgcgctaccgtcgtcttgcctccatgctccaccacgcgtctgccttatcctctctctcctcctcctcgtcctccagactaccaggtatcaggtatcacgagtacctaggtaccatacttggtacatgtgagtattaggcctgatacctttcgtcatcgagatggccggcggcagcggcggtgaggtatgtagtgtggttatacatgacggcagtgtattgcagtagggaagggaacatggacaaacttgatgtgggcgacgtcctcgacgagcagctcgaagtggcagccgacgcacgttaggaagagtcgtgtggctgcgcagctttgttggaagcttgcatgtgggggtgaggtgcgcgacttcggggatatatgcggcgttaggctgtcgccccgagcaatgcgaagggcatcccgttcccacggaatcccgtggggtagcagccctcaagaaagaaagataatagaaaaacttggccagattttgttaggaaagaactcactcttgttttgttgcgcagggctggtccgataaacgatgcatgggtgggtgatcgaccgacggcatgtggccggccaggctggcggagtccgactcccgaattcaatttggtgtttcttgggtttccttgcgtggacttgagatatctcgagtcttaattagtttttaaacctaatatgacgtggagagggtcttgtagcagacatgaccaactcttttataagggatatggctggttcaattgacgaactgatctacaatcaatgctattagccaattaaatcattattttaaaatcacaaataccttttacctagtttttagcctacttcgtccatcttcttgatttgccctgtaagccatctgtctttgtcgcgagaatatagatcctcctataggtttatcctaaaaacctttcattttgcccacaaggcggatttttatcttagtttatctaaaacagctccagtagccggttttgatttctaaacccatcttgatcaggagttttatcaaggtcgagttgattgacgcttcgttcaaccccgtaaggctttaggtgaatcccgatcatgtgcggtggtgtgaccgaaaatggcgtcgaaaatggcgtcaacagatggtaatctttatatttcaccatactattgtttatacccttagtggtttaaaaaccaaaactgaaaaagaaaatggtgaaaattcatgcataataatttaaaatgaagttttaaaatttaaacactcaaaatatagcattcctaggagtaaaaatgtcaaaattcaaaaactggttaggactctctttgagagagctggagattctaagtagttagaatatgaaaaggctgggattactagcttctgattctagtttatttgttaaattatacggtaacaaattctcagaatctaagttatggagtaagttataaccaagaccgtttggggaagatgggagattttaggaagttggcacaatctccctccaaaggcaccgcaagcagcaagcgccacgcgtgagttcaccaacctgctttttcaccaatcttcatgctgaggggttgtttggttcttaactaacattgtcttaactcacattaggcaagtgtggcttgccatacttttttggcctacaaattgtaagccacacttgtggcaaagtgagacaaagcctatgaaatgtagggtaaggtgttaaaaagtgtggcttaccacaactacggcaataaaccaaacacaagactaaggggatatggtaacctaaactgtggtatggcaagttaaagtattaaaccaaacaaccctttaaggaattgcactgatcagacagtacttcctccgtcccaaaatgcagatagttttgaggttagcacaagtattaagaaattagatgagaatgattgaatgaaatgcgtgattggttgaaaagagaaaataggtgaaagagaatggttgtggttggttgagagggggaggtaggtgatgttagaaatagctatattttgagatggagatagtaggtactactagacagtcgttgtcacaatccagatacacgagtaatcaacaaatcttggtatcatgtcaggtcacagtgctttacaccgtgtatgtatgtcagttgcttgtaagggggataaagggtctgttgggggagcttctagctgctgcagcttctcccataatcagaagctccccaaacagtacagcttttggtccagagtctaagaagctatagttgtagaatttagaaaatgaactaaaagctagaagctgactaccaatcagctgcttctcataattttaagctcccccaaacaggcccaaagagaccattacatgcatggacaaagatggtgctcccatttacataatgataattacatttgaagttgtcaacagggaggcttctctttctggttcaagaaagacacctctttttctcatagaccacaccaattccgtgatgatatactctccaatttgcagcatttgacacaagttacatacacacatacatgtatagctcgtgatagaggcactgctccccacagtttcttctctacacgttgcaatggcaaaaacaaacaaaaaagaattaacctatatatatgtatataccgctatacataaagaacgaatcgagtgggtgttgaatccggttgaccctctaagaccatgcacacggatatgcatatattcctctttcaaaataaacggaaaattgccacatcattcggtttattatcggcttgagatttcttttctttgctcatctatgtgaagaacttggtggcatgatagacttgctgctgcaggctcaacctctaacaaccagcagccctgcgaaaattgtcgtatggacttgatgccggcaacctcaggaaatgttgctgggcttgctcataagttggctgtggattggcttcgttcatgttcatgtactgggggtaaccatacaggttatcgtcgacgaacggattcgtgttcggcaccccaacctgctcagaatcaaattattggccttaatttattatatatatgaaaatgcagtatatgtatatgcttttgtcagtggattgacatggtaaaagaagaatggcatttagagttgaaattgtttgctgtgcgattcgatctacctgaggcggatatgggtcatggaaaagggacaaatccgtctggaacggctgattggttgccatgggatccattgtcatatcctgcgagaagctcatgaaggaggccattttctgatgtttcctgacagtgagggcttcgcattggctactcatctccttgaatggcatgtctgttgatacagacactcgttctgtatgaggtgccgggtctgtgacaacctgtgaaaatgccagaggatgaaaacataagtcaaatcggttatcatgccaagtgaaacgaacttatagatctagcattctttacttttcaaacaggtgttgttctttaattaggacgttgatgaaacaaataggttaatttgacatatggttagacaatatagcatttcaggcatggatcatttgttttctcccaatgataggaacattgactttgatgtatcacattggtgcaggtcttggttgaattttgcaaatgggaatcctcgccattctgctgagatcttgtaactttcaaactactactgtatacctgctgaaaacttggtgggtgttttcctaggtatcctagaatgcagaatatcacacacaatagtaactttattcatgccaggttacctcatcagaagagtacaacaagaacatagaaaatgagtttaagagagcaaggcatactgtttcaagaagctgatcgatactcagaagatctgttacaggcacagcatttgcagaagcagctgtactttctgaagcttccccaaagatatcgtggtcatttcccaggtcgatcagcacagcctattgaaaaaaaacacaactttagcattttaagtaggacacaaaatatatttgcgagcctcaaaatacctctggatggtgatcattatcatgagatcctggtgatgagttatcaccagttgcttcaaaaaaatgagtgcttgttggacacatgtcatcgggagagaaatcgcttagcagttgattcttcacactattcaactccgcctgcagaaacagagaagtcatcagcggttgcactttttagcgaatacagcagtttcattgagctcatgttcaaacaatgaatttaggagaccattgagaagatgaacattacctctagcatatttgttatgttgttcatgattgtggagacaatgcattctcgggattgactctctgatagttctatcgctgaaagggacttcagtgcgttagtattatcctctggtgatccgtagattttcgacggatcatccacggaatctttcacagcctgaagcttgcactcatccaccaaacggaggaatggatcaccctagacagaacaggacacacatgtcaaaataaggactatgctattcatgaagtcaagatgccgcaaaaatgcctctaataacaataagatgattaattgtggtttgcttatctccagactaagggttcctttcaaatgcaagatagagaaaacagaggaataagaaaatcataggattttgacaggaacgtaagtacaaaacaaatgatcgtttgaatagaccgtaggaaaaatatagaaatcagatgagagatagactcaaaaggaagttttctaagaggttagagctcttgcaaactttactaaaaaatctgcatgcattgaaccattccttaggaatttcataggatttagaaagcttcaaccctacgtttcaaagggccaaataggaaaaatttcctacaaaattcctacacagatcctttgattcaaaggggggctaaatatagatgcaattgaaacccaactttgatatatgcattacacaaatttggggatatgattttaaatcgtggtttcaagcccgctgtgatattattatcaatgtactcttaccatacttacaaagaaaagtatatatagcataacaaggataacataaaaaaagggatggataaaaagattaaactaatgcaacataacaagcttaatactaaagagtaaattaggtccatcaacttgatactaacatgtattcttaccacttcaaataggtaaacatctcagtttgcaaaattgtctttgtttaggaggttacactatagaaggaaaaaaaatgcactggacaatattttgaatatacatactgttctctcattcagcatttgtttacatattggaataagaggtaacacgttgaaagttcttgaagagaaaatgatcatagctgtagcaagagtaaacaaggaacggcgccgacatggtggtaatgaatctgcaagacttacaaaaagaaaagttaggcatcctcattcatttacaacatgggaccaagttttcatgacgcatggaacactgcatttcaatttactattagtgctacttcaaggcaacttggctacctggttcagtcagtgaatagcccctcagtgaaaatgcaacctgaaaactctgagtaagagcctcaaaaactgatgcctggaagagcaaaagaagggagaataagaaaataggaaatcatgatagatatccttaagcttggcaaaaattaatcaatactagcccctgatagtagggtttagttaggatgatcatcaataacgcgtatgatagatcatagatgtaataataaggaggattaccttggctccagagaacaatagaagcaaactataagtgtgagcaatggcttcatagtttgctggagtattttcaggagatgttgcttgagcccaaatggatgaaagcaaaagtgtgatctggcgactgctcagcttcagcaaaactgattcctgagtgcattcaagataatgcagaaacaattatgtgattttagttaatacatatagagtttaagaacaagccatatttgattaaggtaccatttcatcttctggatggcttgaggaaccatggtctgcctttatagacatggaaggtgctctcaaagacatcgaagtaactctgagagatatggaaggggctctcagggctactgaaggagctctcatagccattgaaggacccctcttcatggaaaaattaggaattttcatgctacgtcggcgactttgagacacaggtaggttcgaacgtttggcattactagactcttcactgatactatgcaagccactgctatcaccttgtgagttgtctgagtgcttgtcctttttcaacttgtcaaagatggcagctgaagatgaaaacaccgagacagccctagagagtgtcctctgcatgtcatgtttcttagcctgacctgatacacttgcttgaatcgagggggcaacggaagaggggaccaagacaatagcgaaaatgcggtgcgcagctactcgagcttcatgatcagggtggatcatcgttaagagcaactgatgaaacagagcttctggaaacacctgacatcatacacaagaagataagtcttcaaaacagaagaaagtactgcagcaaggagatagtcttctatcttctagttttgacagtataccttattctgataggtaatatttggaacagaagcaattatttgagctgtacgataaacagcagctgcagttgatctagctacaacaggagtgctagcaatattttctagcatcacggccatcatgtccagaactggtccagcatcagttacctgttcaacaaaatacccttgataaaccttctgtgcattgtggatagatcttctgaaactaatcatagcattgcacagaacagaaaacaggttgctgaggggcatcaattgaatcaatcacatttatataaacaatatgatggtgatgtaacaggtataggaaaacatagaagttcgcagagggagagaaaaagaacataccttctttgccagctgtcctagacaatcatctatagcctttcggaacttttcattccattttactagctccgaatctttgctgccgagagtaatatgaaatgtccttttcaaatgcctgacaagatcacttatggcacctatagttgctgctgaagcctgagcgatggattgttctgctagggtggctgctacctccacgatactaagctgcatctcctgttgcttcaccatggtcttgtgttcaatatgctttatcagtagagacaacattaagtgcatgttttgtcctgtaggaagtattttatcaaaaataaatatctaggttctttgcatatgataatgttagtatctgtgtggaaaagatgcaaatgaagcacctgcgttttccactaacagttgcatgtccaacaatacacacagagcaagtccattttcaggtgaccatgaactgttgttgccgaagtaccgaaacaaagactccaggatacgacggaatgttgttgcctccctggaaagcctagccatattgtgcacacatattctggaccaaaacttaggatcctttgcttcctccctgcacatcacacaagtatgttcagaaaccacctactgaaaaagaagaattgacaaaccaaatcaacagagtagaaagagataatattacacagtaaggttaactccacccttaacattaactatgttctcccacaaggggacagcagagatgacaaagggggaagagtcctccgttttggagtcctctgctttggagtcctccgttttgggggcttcttgctccaactggtcgcttgaatccttggtaacttgaccatcattttgcatcttctgaggtcggtagttttcaagtactacttgaaccacctaagaatgaaaataacaaagaaaaaaccatgatggaacatttggaactgtaatatgcttgtgctagcaacctactacctgaaattagccaaaatggagagcagaaagaaaactgtatgcatcacccagttacataattatttcaataatatttctgatcatcttatgagcaacaactagttgatgtttggctaaatatgcataaataaataagatttaaaaaaccatagtagctggtgtaggatttagatagtccacctcaaggggacagtcctaactattatggcagtccaagtccacagattatccagatccagctatctaaaaggtttaattacatatattccatttttgagtcgtatgcaatttaaagtaagatgctatctgatgattatgaaatacataagcacaaaactaaggaaatgaactactaatcagatataacttacattatcgaattccgatgaaatatgtgagagctctcccatgaaccaaatctgcacagcataagaaactaaatgatataatcactgtcaaaaatatttggttcgctaagttataaatgtttagaatagttggtgcatacatttgaagcgaaataaagtagacaaaaaagagaacaaagcatccatttacatcattattgtgaaagataatttacagtaaagcaataaagcactatactgttgcagattagttttacgaaaaaaaaaatatggtgggaacaaaatgtatcaatctagaagttatgttgcaaaatagttcctggaagtaagttgatagtaataatatatgtagttagtacttaatgcttaatgattatgagctcccattcgtcacgtaggaatgcaagaaacctcagatgcaaactaatgtgttttgcagcatacgtgttagtgtttgcttagaagtgaagtgtaatttgaatctcttctgacacagtagttggacattttttaccttcctagtcacttcttcaccatttttgcaatcagtgctagacatgttatatgtgaagtatgatttgaatctcttctggtaacagtattcccatacttttgttttccttcctactcattcgttcttcattttaacaataggttgaagcatatgacgaaagtttgatatggcttaacagtaaagtttaccatagctgaaagggcttgcagggctgcagcgcgtagggcaatggtctgctcatcctctcctacttcttgagatagctcacatagtcttgggactagcccttccaaattgaactgatatgtaccatccacctaaaatagacggaaataaaagcatgaaccagatacatcatgtctttcaaaagaattctgctggtgaggaatggtatcactgatcaccaggcaacggaaatacctgattaactgcaaagtcaaacaaggtttcacatcctatgatgcgcatatcatcctgcctcttttgatctaaaagagtgtgtacaatacttaataagctacttgcaaatagtggcctgcattgagcaaaccaaatgatagtattaacatctgatgaatagaaccagcatgttacaactcgttaaaggaaaagggcaaaacaaggggaaaaagaagactctcacatctgctctttacaagaaaccaacaatctacggtatattagcatcaccacttttgcaaagccatactgttcacttctcaattccttgtagatcctttgctccaaggaaaccgtgatctgctcatacatcaatttggaaaaaaaaatggagtcaactgagcttgaaattttcttgagaaaagattgaggtgaatttgtgtcaatcaatacatgactaacaacaacaagagcatgacaggaacaatctgactattgacagaaacatttttagctccacaagaaggtagagggcgtgaaccttgggcactcggagagggttcctcgagcaatactcgcacaacttcccgatccttctctcattcggttcttcatcctacatcatgataacatacgagcagcaacaacaagtaaattagctaagctgcggagcatcgattagtccgataatgcggcttccacacatgaacagaacaaacaaacaagacagagatgggggatgcagcaaggggcccaacctacctgcgttttggggaagatctcagcaaggatcgacttgtacctcttaacaggctgccttgatcttgccctcaacccggggcagaaatagcagaggctcccgcacgccggcaggaccttccgagatatcacgcccatcccctactactgtaagcagaattgatttagcagagcaaaaaacaaaaaaaaaagctaattagaataattgcaaacacaacaatggcgatcaaatcaagggattccacctccaatatgcactatctagctacgaattttctccaaagcaagatacattaataattgttgttggcaagttaaaaccgagcaggcgaaattcataaattttggggggaatgccatttctaacggaaatcaaatcaaaacgaaaacaaaaaaaattctagcggcgttcgatctcgcttagcggcggctggcttggtgctagaccttctcctaggttgcgtgtttgtttgtttttctttcatggttacagccttccatggctgcaatcttgtaaaaattatttttcatattatatcaatataaaacttagcaaatgtataatgcaggcactttaagaaaagaaaaacaaaaaaaaatcgagcggcaacctgcaacaacagaagcaatggttcgaaccccaatctctcgaccaatcaaacataatttaattaaaacgctatggaaggagatcgatagatcgatcgatggaggagggcaaaggaggttacgttgctaggagaggccgccgcccggcgggcgggctgggcgccgggggggaagaaaccgcggggacggcgtacgtgcgtacggccgcgctctcctgccgatccggccgatggagagatgcggggcgggtggggaggagaggagacgcgggggtgggagggagggagagaggagggaggctgtggcacggcgggcgcgcatggccttgggcgaggaatggggggtggccgccattggtgcgggcgaagtgggcgccggaactcgaggcgcctgcacctgcatgacctccgttgcgccagcaaatgccaggtgggtgcatgccggtgtttgtacaatcatagtgatctcggaatacggcaggtactatagccatccaagtacgagccacaagatgctactggctccgtcctaatttgtatagcaccttctttttaagaaaaattaaacctgataacttttgactaataaatattatgtatattatatcactagatttatatttatgttttaaagtactttcacgtgatactaattttatatttatcggaaacataacatgggataaattgatggtcaaagtatgtcattgaagaatgtataaaatatataggccttataatttgggacggaggaaatacatagtagtactaaatgatgaggtggaggagataagaaagataagagcgaaatattcacttctcagagcaagtataatagcaggctataagcgagctataaccacatatcgagaagaaaagagaagagagagagaagaaagtgggctacagatttgtagccaggtgcaacacagactctaagttgttgtgtgcgtatgagaggtgagaccgggtattaatggtgtagtatgtttttataggtaactattatatgaatggattattagattagctatagataatttggagctaacatttggctatactattaaacttgctcttatgcaaggagcaacccctacacaaactttaataaatatgtgagagtgttagagatattggagattgtgtggtagaggcaacctattacacatgttacctcttaattaatttaatagtatatgtcatgtatgaaattagatgtggtagtaacttctaccatgaagatatgtatattgttctccccactcattcccctatagaaggccaccgaagctccggattgttggtactagaatctaagagcaggtacaataacatgctataagctagatataagaatattttgtgaagataaaaagatgagagagagagaacagcggactatagatttatagccagccgcagtacggactccaagacacaatatgtgtatgataagtgtgaccagatattaatagtaatatagtatatgtttataggtagctattgtatgaattggctgttaaatcgattatagatgacttgaagctagccgttggctgtactattaaacttgcttattcgtaccatgcatgattaacaactaaaaatagcctacatgggtaacagatagataaataaactgtaagggagaatcctctataatattttttataagggttcacaattttaacaaaaaccagtcgaattccacgaaaaaccgaggttttgacgtagcccgaaagtagaagccgtttagaattttgatgggtttcatccaaatttaaatttgaattgataaaaaggaaaaaaaataaaaccctataaatagtatgatatttatagaacctatttgggtataaatttttcaaaaaattggtgtattcggtgtatttcttaaactttatagtaggaaagaaaaagaataacaatttaaaaaaaaggaaaacactttcctgggccgaattccatgcagtaagcccacttagtatttagcccagataatagaatagagaggggatgtagttctacacctgatttcgctcggaatttcgctaaagctgactggtttttgcgagcatactggtaaacttagggaatttgtattcaaattttagtttatgaaatttgttcaaaatctaccggttttcaacctgattttgcgaaaactatcataccgccaaagcccggaatagaaggtcatctcggaatcgtaaaccctatgcagatacatgatagtcctatagcttataattcagtgaaaatgcagcagttatatgatcatgccaacgctgatcagctacctgaccatgtaagatatatatctaaagttcatacaaatacttgtatccctgcatttttttcgaacgtgcaaaaatgattacatgtcagtatattagaaaaaaaaatcttttatactcttatacagcgcaaccggccagacggctattgcttggggacaaggaaaaaaaaagagaaagaaacagaaagaaagactgctagagtaaaaaagtacgaaagagacacgttgctcctatagaaaggagggtgccggcggagccccactacgctcccaacattaacattaacagttttgtatccctgcattaacagttagctgatcatctgaaacaaattaaggatgaaagaaccctgtgcagatacatgatagtcctaatccatcatctgttctggatttcataaattgatttcacatagccctgagaaaagttaccgacaagggattggaaacacacgcactcactatataactttgattaacaaaatgttctcgtctagatttacaaatagaaaacaagatcatttatcacctatggatgtacataaataattaaaagcatccctgaaacttgatgcaaggaaacagttccccttatccacctatctcccattcagcaatttacagtgtgaaccaagaaaattctgtttgaagaagcaactttatttcattttcccacttttgggaacatagcaagcaacattaaccagcaatctcgccggaattttaactgaatcctgtgaaacgcaagtaatttccgtgaaacacattcgcatgcgatgcatttgggaagtgatggcattcatccacttcaaccaattgattgttgaatggtgatattgacggtgaaactcactttatatttcagttccccataattgtcacaagtaagctaggaacaaatccctgatgatgagatcgatccttttatgcatttgtaacatgttcttgtaaaataaatagactttgatttgtgatgccggagtactatgcacatgcctagtagaggtcctagaggacatgtttttttccccaatacttgtttttatttttcttgcctaacctctatgcctttgtttaatatgcatgatctgcccaaaattaatgaaatttataatggttcattactacgaactgtaaatacttgtttttttacttgcaaagtacacgaatctctatctgtcgtgaatatgaatatcgtccaagaaaaaaaattagtaacatccacgacactaaatttgtttcactaaatttaatattgaatatatttcgataatatgtttgttttgggttacaaatattactgtatttttctacgaatatgatcaaatttaaagaagtttaactaataaaaaaaatcaaacgacttataatatgaattggagggagtatactactgccactgagttaatcatagttgaacgatttacaactgacagggttttaaatgatgaagttgtaggccgtccaagtttgctgaggagcagagccaatgcttaatctgtcaagaaaactatgatgggtaactaccattcccttggtagaatcaccacaagctcttcgcctcttcctactagtcttatactctagatgtaatccatgaaatcccatgaaagcttgtactaacaatgatcaggattaattaaaacaatgaataaaaaagtagtgagtaagaggtattaattattgactcatttggttcatttgtttcataagagaaattatgcttgagccatttgaacctaaagtctggccagtctataaatttggttgatgttaaacctattttgttttaaaataactccggttactgctctatagatttctacggatttgatgatgtaccgtagtataaggtgaaatttgattttgcacgctctgttgcgaagtgaaaatgtgtgctaaataaggtgcaaaaatatatattaaaaaaagtgcactgtacatggcgtaaaatgcagtacactcataaatgtcagcgatggatggaattcacaacatcaatttctttcacgaggtacagtgacagtgctacaatttcactgcatcccctgttaaaaattgctggagtgagggctctcattagtcattactatccattcacattaggaagaccttaattgctggcattcggtagtgtgaagtctcaacaccatacctgcattttgtaccctctcactagagagccacagtacaactggcagcagtgaatgacaattgacagtataaagctgcatttactagcaacagtggaaggcaatgtgcagcttataaggtgtatacatggatcatctctaaaaccacaactatcaaatcaattgcttttcccctctcacagcagcacatatttttaccacgatcttgtgatctaggcatgggatgcatcaggagaagatacatcggttgttctctcattggatgccgctctagagtccaaagaagctttggcatgcatgctgctctgacgatccagttaagttagtaccttgcatgattgaacatgctccattgctaacacatcaacgaacataaggtgaaggtgtctatctataacctttctgtcccttgagctcaacaacacccttgacctcaacaatatgaaaaatctgtgcatcgtttgcatgggatgaatgatatctaaaagtctacattaaccaacagcctcctgcacaagaatggagatgactgaatatcttgatcaagtaatattccatcttgctttaattaataatggctatatcgagagaaataaaatgatttggaagcttaagataccgcttaagattaagatcttcatgtggtacttacttaaaggggttgtgttaaccaaagacaatttagcaagacagaattagaatggtagtttaagatgttgtttttatatgaaaaatgagaatattcaacatcttttcatggattgccattatgcaaggtttatatggagagcaatacaatattcttttggtctatgccctcctagtagtatatcatatattttttatggttagcttttggtggtggacaagaaaatgagtaagcttatatggagtaagcttatacttgtgggggtctctgcaatatgttgggctctgtggttgagtaggaatgatttggtttttgacaaatcaccatctattacatatatacatgtaattttcaaggcaacaaattggcttcggtgttgggctcagctacaaagttatgatgaagatgacgagtttatgaaggttgcatgccgtaggcttgagacaatagttatgcaactttttgccaattatggttggagattcacaaatagatttcaataatgtgttctccttatcttagatggattattttttattttaagtgcgtgttctcaatgttttgttgaactacactcttttttgagtgtaactttataataattggttgtaactcgttttgagtaaaggctgggatattctattccattatcttaaaaataagtaatatttgcatgtatgcatctgggaagaaattaggggacagccacatgcctccacttgaaccaactgattactcaacattttctctctgtacttgaaccacatgccagttccatcaatgcctggattggatggaacttctgcattttctttttctgtactgaaagatatactgatggtattatgacttgggcagatataggagtagggcagctactcctaggcccaaatatcgattgaaattacacttcaaaatttgaaaaagaaagtagaatatagaagacaggtttttgtaggttatactagttcgtccatactcttagagcaaattcctccatgactgctccaagctcctacgaacttactccctccatcccattttaagcgctgctatgagttttttttttcaactttcatcatccgtcttatttgaatttttttatgattagtattttatgcgtgacttatgtttttcaatattttcatttttttaaataagatggacaattaaagttactcatggccgtgcttaaaatgggacggagggagtatatattagacccaagagtagataaccagcaaactccagtgatccagactgccatctatttcttcccttacatattcagtagttcaacagaaaacctgaggcttgaagttttagttaagcagtgcatcagcttacagcaaaggtgatgtggctccaggagatgtgaaactgtgaaaagtaaacatgaataccatagtgtaggaatgagaaacatcgagaaggattagaggagactcagggcttattcgtttcaaaggaattgcaaaggaaaagcatagggataaaaatgggttttaaactaccattcgtttcataggaatgaaccataggaaaactataggaaagttttccattcctccatttttgaaggaaaagcataggaaaaaacaatccactctaacctaatatttgcattcctttggttggcttgctcaacaacataggaaaaattcttgtattttttaatccataggtctgcacatgtattcatatagtatttctacgtttattctatttctacgttttgaaaatgctgtgaaccaaataagccctcaatgtggcaaatagcatagcgttgggcattaatatcccacatgtagagttgagtttagataggttgaggaccagcgtataaactttttgcagtaatgccagttctagctagttcatctgggttaactttaaaaaaaagggatggatgggatttactacaccattttaaaggcacatatatagtatatatgctttgatttcacctacacccccttcccagaaaactagcatgaaggccactcatcagtctgtaggatcgaatcacaagaactaagccaaccagaggggggtgaatggttggtatacccaagaaccgaaaacttttagcggaaataaaagttaccctcgaattcgacagaagtcggtctgaccgagattgatctgccagtctgaccgagtggatgccgccggtctgaccggtatagatcacccggtctgaccgccgatgtcgcctgctgcgcctgttgccgccgccggtctgactgccgtgctcccgccggtctgaccgccgcttgccgccggtctgaccgccggtgagttgccagttagactgccgaaacccggtgaaacataaatcgaagaactcttaaagtagatgacgactttattgattctctatgtgttcacaaagtgcatcaacatcactccttacaaaaatttcgactaaactcgaaaccctaactaaactagcaactcaattgctctccaaagtgataccaaaaagcgatactgggaagcctcacgctccccctctatttatacatgaggtaggcagcctaaaaccacgaaccaaactcatactaagagtcctaaacaccttaggaaaccctctagtacaagacacaaacttaacataaccaatcgtaccaaatttggactccttccaaattcgactccgcatcccatacacacacaatacttccaccgtatgccatatggaatcttcaccaaccacgtgcatcaactctagccttagtatcccgcatgatatctgaccaccacggacatcgttttaccaccaagccgactcccggtccatcaccgcaaatactctgccgaggcatcgagtcacctacacatgaaacaaacaaagaaaccatattccgagaccaagctatcctcaacttgactcattgttagcaaacaacagtattacatacgtatagtatccatctagaagccataaccatgaaacaatcatggatatccaaagaaccaatccgaaaccgaaaccgactcagcgttagccggtcagaccgcgggcctggccggtctgaccgcacacatagcgccggtctgaccggcaacctccgcccggtcggaccggacacataaaataacagaatccgatcatcacctgaaaattgattatctccaaaaccacttcgacgataatctccaaatatcaaaaccaataatcacagatgccaattgttcatcacagaataaggaacaaaacacactttgatcttacacaatcatcactactccatccatcccataatgtaagggataatgggtagatgtgacacatnatagngcnatgnntnngnnnnannnngngtcacattcacccattattccttatattatgggacggagggagtaccattcacattagcatgaacttatggacactcagtagtgaacaagtctctcatgaacaccacacctccattttctaccctctcactagagagccacaagtacaactagcagtagtgcatattaaatggcatagccgcatttaattactaacaaagtggaaggcaatgcaagcttataatgagtacatggatctctgaaaccacaattacccaatcagtttcctttcccctctttctaccacaatatctcattatctcggaatgggatgcatttggagaagataaaagggtagttctccccattcatgctgctcaagaggtcgtagaagctcgggattgttggtatagggatctaagtgagcaccatgcatgattaacaactaaaaatagcctccaccggtaatagataaacaaacatgaagggaggaccctctataagattatgtccctacgtagcagttatatacttatatgatcattgaaatgttgttgcctacctgatcatgtaagatatctaaagttcagtatcctagaattaacaggaagctgatcagatgaaacaaatcaaagaagaaagaaccttctgcacatacacatggtaacccatcacatattctggattaaatagattaattcacgtagacctgagaaaagttgccaacatgggactggagattggacatgcatgctcgttatatcacttttattcacaagttcttatctagatttacaaatagaaaaaaaagatcattttacaaaataattattagcatccctgaaacttgatgcaaggaaaggaactgctcctatccacctgtatgaaccaataactctgtttgaagtacagtcataatgctgcaatttcaccacgtcccctgccaatagaagttctggagtgaaggctctcattagtcatcactatccatttacatttggaagaccataattattggcacttggtggtgtggagtctccgttgatactcaaatttggtactagtttggatttatagcaacttgccaaatttggaaactatcgagtctttcccgcgaaggccggtctgacttccattgttttttttaggaaaacgacggcaggagctctgctggaatttgattaagaaggaaaacagagtgcaaacagatcggtctgacttccgttgtgtggccggtcaaaccggacaatgaactgcagtcagaccttaggtgtccgcgtggtcagaccttcaacacaaagtccgagtccaattaagtatttctcgtgtttccttttttgagactaggatttctcgaatcttagttgatttctaagccgaattggacatgaaaatgaccctgagaaacaagtccacccctcctacaaatataaggggtcaaaaccgattgaaacaacaataaattaattatcaaaatcaatttattacccaaaccctctatattctacatcttcctccttcttgctacctatcccaaagtctattctactcaaattccccaattgcttgtcatcctcgtctctacggcttagaggacgtcctaactggcctgccggagtctaggacaaactggcgcgtgttcaccctaacggggtccctcctgggtgttcttttgagcatccaccgctccttgaggcggctcgtctccgggtgtgccactgcgggttgcacataatgtgctcaatgtgtgaaggcgcgattcgacgtcaacagtctctaacaccgtacctccattttctaccctctcactagagggccactccacaccacgtgacaatacaaccgacttagtgaatgttaattgaaagtatagctgcattcactagcaaagtggaaggcaaaatgtgcagcttataaggtgtacatggatctctggaaccacaactatatatccagtcaagtgcttatcccctctctttgcatgacaaattttaccacaatcttgtgaccttggaattgaacgcactgggagaagatacatgcatgggttgttccctctattcttgcctctctagaggccaacgaagatttggctggcttgctggtccaaggatccaagttagtaccttgcatggttgaacaagatccacttctaagatatcaaagaacctaacgtgatggttgttgagttgtgatccaaattcatttgcacttaataaaagccagcttctgccctagtgaagcggaggctgaagttggcccattgggttgtgcacctggggacgcccgggggtgcgggggcggaggccccgcggtacagatcgtaataccttttagggttccacctcatatatatacctctcgtaagccgccgtgcggcgttgtaacctcaccctcgatatagtaaagatttttttgctggctggcatccgtggttttttctctcctggtttgggagggttttccacgttaaatctcatgtcttctgtgattgatctattgttctttatcgtttgtttgcctatcgcttcctaacaatggtgtgtgtctgtaacttttccgtccttgagctcaacaacatggaaagtctgtgcatcatttgcatgggatgaatgacatctaaaagtcaacatcaaccagcaacgtcctgacaagaatggagggacataatttgttctaccgatgattttattattctagaggaggtaccatactcttttatatcaatttgcattacctctttagacatctcctgaacaattagaaacatcaccactgcactccttcaaccttttcacttgctgtttctacatgaacagatgaaattcatgaaacagagggagagtgttgatttaaggaaatacagatatcaacaatgatatgttatagcccgtattggaatgtatgcatgcatagggaaacggggtagccaaatgacgatgatctttactagggagcaggggcatttagtagacatggaatgtattccacttaatataaactttggttcagatcgaagattacaatcatttccaggagcaacgaccccagagaataggtgtgctagcaagtatttggcatgaacatgttaaccacaatgatgatgttgtgccatgggaatggaatgatacacatatgttgaggaaaagagagaaaccaaagagaaaaacagcacgagcaattcagcatcagaagcagtcgtagtataaactagatagcactggctacgttgtatatatagacatccaactgaggagaaacatgaacactgttgctcactgcttaggtgaagtatgagccttaattaataattttgagtaagaaaatgctgacagcatgttgattaattttgaagtatcaaaatttttcggtatgttggcattcaaaattctaatattatggtagactagtggtccaatggagggcacctatatacctatatataccttccacacatccagattccagcactatttaatcaaatactcatatctaaagtcacaagtccatctatatctgatggttattccgactctatctagggtgtatatataccaatttatttacaagctagtagcaactcacacaaacatggatcagatcgagctcaaactacctaaagatgatgcagatcaactgccagtggcatcacaaatataggcgtaggatgcatttgggaaggagaaaaaggacgtgaaacaaagactgcatcgatcactcgcaatccatagagcgtagtggcattgactgacctcacacaaccttttatgcagtaagacaccagaaagagtagcaacgacctgtatgttcatagttgcaatttctcatatactccatggatttatcagtaactagattaaattgtaccaagtgatattgtggcaccagctagctagtttaataaaaatgttggaatagttgtatgatcaatgtcataatgaaaataaattctatgaattgaaattgaaaaatgtacaaagaataggtaaaacaatagtaagaatgcttgatggaatgatggtattataatgactaccatattattatagctacctatgctatttaaatttgaatagcagaagtagcttttgaatagaggtagctgtgtattatgggatggaggtagtagtaaactttcattagtacaattattagttacgtcttcagtttcttaagggagattactaccattggatgatataccaagtgtaatattatattatactaatgaattttcattaacgatctttagtaatttcattgtcagatccatcaatgcctagactggatggaccatatgctttttttttattttttctgtactgaaatatttcggtattatgacttgaaatatgtcgacagaaatgaacttcacacaatgctccttacctcctaccaacatatatataagatccaagagtagataactagaaaactactgnnnnnnnnnnnnnnnnnnnnntctttcatgagcatcttttctatccttgaggagataccacgaggtactatgaggtacgaggcaccataaggtaccaatctaatctaaccgttggtttaacaggggtatgatcgggcaaacaaaaataagctctcctctcttccttctgctgtatcaggtcgtccatgccggctgtctgcgccgtgccatcgtcgcatcgaggccgtcgcgccgccgtcacccatcaagatcgtcgcgccgccgtcgcccatcgtggtcgtcgcgctgccgtcacatcgaggttgtcgcgccgccgcccatcgaggccatcgtgccgccgtcgcatcgaggccgtcgcgccgccgtcgcatcgaggttgtcgcgccgccgccgtccaccggggccgtcgcgcatcgagcctgccgccgcggtcgcgcgaagatgcttgagcagtaggaattctgaaggttgccgtcgcgcatcgagcccgccgccgccgtctccgccgccgtcgcgcgaagttggttgagcagtaggaattctgaaggaagctgaaggttgtccaatcgaagatgcttgagcagtaggaattctgcaagagatggcagtttcttccaatttttacaacctcccaaatctaggctgataagattattcactgaggcttttgcaatccagtatgggattttagcaccaacataacctgaaatctttaggttcttcagaatagaatttggctcaaggttatcaagaatgattgaacaatcttctctgctgttggtgccatcatcctctgaccattctagagataatgagccgagatgccgtttttcctccagcttcgcattcttggcttcttcttcattctcaatattctctaggtccttgataactagtttacagaggcacttactgtgtaaccttttgcttgtcggacctgatagtcttctaacatctctcctagtttgatgtatcgaaggtgctttaactttgccagtttgcccataaaatcagatgtatggaacaataccgttttaaacagaccataaaataaatgcatgcaagcagcccatgctgcataggaatttaatactgaatagaaggagataatcagttcatatcggtgtttcttaggtaagaaagatcatcgatcaacgcttatgttagttaacgttggtcctaatatgatcggttaaaagctgtcaaattttaattaaaaaatttggcagaacctcgccagtacttgtgaacattcacgacaggtagtttataagcaatcagtcataaagtcataatcacatccagacacaaaataacacaaccaactccaagactaaacaacacgacaagtacagatcaattatgtactgagattacatagtttcaaattacataatgttacatactgacaggcctaagcctcagataagcatacaaaagagagttactggccacatgcaaatattcttcaattttgatcatctaggatcagctgtgagcctgtgccacaatggattgtctgcatgcctttccttttctgctgaacagagagagaaaaaaactgcacaagtcagaaataaaacttctcatgcctaaacatagctgaaacatttttattgagagaacagaaactaatctagaatttgagaggccagcatgtcgtttctgacaatgccaagaaacgatgagaccgttaattatatacctataagacagtcagtaattataccatgggcattccgtcgaacgccttgagtgcaaaataaacaagagaagttctattcaactaagatacaatttccatgcacacacatgaattgacaaatagtgtgcagttcatctgcaaacatgcaaatgaatagctagcaattcgtaattcatatctatacacaggatatatattagcagctggaaaaatcttaactaattaagtgtagtgccaaattgcttacctgttttcaggtcctataatagtcccctaactgaagatatgcaaatgaaattctaactgaagatatatcaagattatatctaacccacattttccatttactcttgtgatatgataaatacaactacaatccatatatctcttcatgttttgtgagtatgcgacatgcaactataatgcacatacgtttaacacataaaacatttactatcaagaattattacacattcaatttgaaatgtccccatatagaatcgacccaatggttcagtcttgtctacagctgtggtattgggataattttactgacctagtgaccttaacaggaagaggaagggaaaacgtagatgatgaactcggccgtggagagtctatgaccagaggaagaaactcggtgggtcagggcctcatgggggcaccgcaaccatcctaggaaggcgagggggcggacaatcggatcgcacagtcccggtagcgctgaggatatggttggtgaggagcagcatcaccgaaccgaggccaacacaaccccttaccctccccccggtcctccctgcggagctcgtcggcatctggcgcccttgaccacgggggcggccggatctggcgacgaggtggcaggagtggaggcgctagggatggggagggggagggtgccataggatgcggaggagcggaggagacggcagccaacggcatcggcgtccgcgctcgaacgcgaaaggaggagatggaagccggcgcccggcagcatctgttcttaggcggttgtcggtgagagagaaggggaaatcggcgttcgagagaggcgaggagccggggagatcgctgggttgggtgttattgcgaaattaccaccttacccttccacccatgaaatgcattcggtaccgccctcggggagacgcgggtaccgataccatccaggccgttggatcgcacgaaattgacggtcaggatatggtacctccttccctcaaggaccgtaaaaaatctcttattccattacatgctcgatcagtagtgaaagaaatcagaggttagaagtttatacagtagtgcatcagcttaccacaaaggtggaatggctctaggagatgtgaaaatgtgaatagtgaacatgaatgccataatgtaggaatgaggtacatcgaggaggattagaggagactcaatgtaacaacccagccgagcaataatagtcccacatgtagagtttagattggttgagcaccagcacataaacccgtgcgttctaactctgtatggattaactcttttacatatagccagaatagtagaagtatataaattcctcgaaagagctgaggtgtgggcttttcagaaactaagatagcagcaccgacactaactttagtagagaggtgaagagcctgtaagttctgtcatttgtgatgaagaagaaatgatcagattctctgtgagctcacaaaaccaaaatgagcaagtacttccggacagtatgctcatgcacctacagcacttcatttgaacttgttccacaccttgtttaatagagtttcttattctactagaaagagaaaccattgtaaaacatctatattttctcacataggatcccccaaggaagagactaatattagaacagaacaatcatgaaagtcttcctcttcaaaaaatataaggggaggggggtgtcattaggatgtgacaaaatttggggaaaaaatacgatgccatgataacagaaaagaggaataatgtttttattttgacggaaaaagaggaataatgttggtaatacatgataatcatttcagaaaaaaagggaatgtgtgcaatacatgtgcatatgtgattatcattgaccccttgaactagtcaaatctaacaccaacttttatatatgaatttgaacataacctatgtctagatttgtatacaaaagttaatttattttgggatggacgaagtatatcaatattgcgaatgttttcaatcagagaagtggacagatatgaacattttggtttacacataagaacaacttatcatgtcgtggtcaattcatgtttgatgtctaggtcttttgtcttctggaacaaatttttattcctggtacgaaatagtatcaaataattataatcttgaaaccatcgaatcgtgtgaataaaaaaaaaccagaactgcagaaacacacaacggacatgtctcaaatttcataagttattgaacagaggagtaaattataaatatgattgatgatttctcaaaccaacaggtggtgaatgtaaaaggtgaccataactctcagggaaaaaaaagcattcaccaacctaccacttattcatatcagttataaataactaaacacctgcctttcatttttatcagtgccacttcgttgttttcttcctttctacagttacaagaactaaacttgaagcagttgccacacatcagttaaagagcgaggagtaatctctaccacaaaatgcatgggtatgcaactgtgagcttaattcattggttcacaccctcatttatctgatctgttgtagggatgggatgcattgaggaagataagaaaaggcacaacgataataccgggagtgtttcagcatcgatcggtcctgattcctgaccttctttcagcatgaagtgcgacacttgcatctcacactaggacagatgtcatgacctcagaccatgacggaataactacagccgggaagatagccgggcagcgtcggctcctggagaagggatgtagattcaggctaaggagaagaacattgctgggagagagagattagattaattgatattcattgcttaattgataatagatacaatcccatccttatatagatggtacaaacttgatccctaagtaagaacttaatcttatcctatcttatctctaactactaactaactaataatcttatctctaacttgattggtttgggctgcctataaaccttgacctacggcccaatgcccataacattgtgtgaggttcaactcatgagctcgtcaaccaaagaggtagctaacatagctcactctaggttaatgagaaagacgaatttggagcagcatatgtttcttttccggtttctttgcatgggaaatgtgaaagaaggttctggctgatttttttttattggcaatgacacaactgttcaaatcactgatgagatctagatatcactaacggcaagaaacattaaagatttgcccttcaaatcactgatgagactagatatatcactgtttcaacatttaaagatcgacagggtttcacaagagagtaaataaatattgtgtcgttagccgctactatcctacattgggtggtatattttggatcatgtgtaatgccgtgttacaggttttggtaaaaataaataaatgtttgacagcaatgtgaaaaggattaaaaaatattagtaagttgaaaaatgtatattaacatggaacttcacatcgtagaaaaaatatgtttccaaatattaatctcattgtttttaaagtatcacactattaatttatggagttgatgtttgacaattcgtcttattaaaaataattttagtacatatatgtaaaaatataagttatatttaagtaactttagtgattaaacaagttacaacattacttacctaattttttaataagataaataatcaaatgtcatgtccaaaagttaatattatacatttcaaaatgaaggtagtactagcttgtacaagtgcacacacatctaggttggcaattaatatccttagtgctggccatggcctctttatttaggtttaggcttattgacttaaccttttaaatcagttttttggcttatataatttataagctggtggatttaaagtcctaattttaagagtggagtcatacttctttctcttgtaagtaaaaaaaaacttcttcaacctagctagcttttagcttaatagtataaaagtggcttatggttttaggaaagacaaacaaaaaattattatttatttaggcttagatattttaactcataaactgacttgtaagtctaaaaaaagaccaatgccaagatatgcttaggatttagaaccaacgtggccaacatccacgtggtgttgcatgcacatttctgcttttcattgtggagggttgccgatatatgatatgtcacccttcttgtcaagcaaacccaagtaagacactaattaagaaatctggaattttccctaatgacaaaaccaaaagaaataacaatataataataataataataataataataataataataataataataatatacttttaggtagcaccagcacacacagaataaaatagcgacacatacccataaaaactcccgctgcatctcatgttctatcctgatcctcaatccaacaccactttactaagcaaaagttatatgcgcgaaaattgttgtgtttacgatacacaaaattgcaaaacaaagtgctgctgaattctataagaatgggaagcattcagaaagcaagagtttttccaagagaggcagtactgcagtagaacaagagcatagcagcttggctccaagggtagacccatggccgagcagccgaggacacggcagaattgtggccatgtcgcatgaacagcattatttgatgactccataggttagcccgctgtaatagtattttcatgggctctagatgacttcctcgacgagccactaaaagataactagcctcgtttctagttcaaacgaaatgaaggtgtataccgtcttagttatgagagggcgtgcattctcgtggttacagtgataatctgagtagatcggataaaaataaccattctaaaaaaaataaaaaaagaagatgccgtcttagttcgccaaggagcagagacaatgtttaattatcaataaaattgtgatgtgtgatttggaaagggaactacgtaccagcctcttggtagaatcaccacaagttctcctttctagtcttgtagatctgaaaatagaaactaaggtactcttgacgtaatccatcaaatactaccaaagtttgtattaacagtgaccagggttaattgtaactatataaggatgggaacggttggaatcgtaacatctctttggaaaggacgcttggccgatcgatgatttttagtatttatcaatttaacttgttgatatcaaaacaatgctaaaagaaattagagaaatcaaatctcatgtattgcaaaaaatggaaacggtacaacttacaaggaaagaacgctcggtctgtcaggaatttccatagcaattttcatcgttaattaaaactatgaagtaaaaggcatagtgattaagaggtattgttgactcatttggtataattgtatcataacagaaattatgcttgagctctttgaaccaaaagtttggtgggtccataaatttggttgatgttacacctactttaaacaaaaagtgcgctggctgcaattgagatttctataggcaattgttgatgtacgctagaataaactgaatttggcatactctgctgcagagtgaaattaaatctgctaaatatggtgcaaagcagtgtacaatgtgtaaaatgcagtttactcatcatatattcaatattttaacacaatggtataggagtagttccttaatttgtttttatcaagcgatggatggaattcaatacatccatttgaggtacagtgatagtgctacaatttcactgcataccttgccaaaaaatgctggagttatagcccactatggtgtagtagaaagcaatctgaatcactgatctcatttgatcgaagggtttgcatctatttttactaccatcctagttagcgttagtagaaacatggagagacatatattttccaaaataataggtgctgaggggcataatcgtcattagcagtaactaaacatttgttttcctacttttttggcttttttgatggatatatgagtgatgccagcataatgaatgaccacaaatcaatctagccggaaaaaaaaagacaaagttagtcattttaatatcgatctagcttcattgtattagtaaattactaatttacccttaatatcaaatagtttacatcatttctacttgtactaccagtagagagtattggaggatcgcttctggagttaaggctctcatatgccaaaaatacctccatttccagatttcttaccctctcactggtgagcctcggtacaaaaagcaggagtgcatatttggcagtattgactaacacagtgcaagataatgtaagcttataaggtgcacatggatctcaaaaaccacaactatcaaatcaatttcttttcccctcacgctgcaggctgcagcacaaatgttaccacaatctcgtgatcttaattagaatgggatgcattaggagaagatataggggtttttctcaacgcagaagctttggctttctgctacgaggatccaagtgactaagtgagcataatgcatggttgatcaaactcacctgatgatagatcaacaaaccgaatgcggcggtgtgtataggatatctgtccgttgtgctgaacaagctacagagaaatcaggaaatgtatgcaacatttgcatgggatgaacatcattttaaaatcagcaaaaatctctacacccaacattttaaccccagcagcctcctcatatgatttggagaaactaacaggactgatgaatcctgggagatgcagataatttttgtgatccagtaatatttgcatggatgcatttgggaggaaattaggggatcagacagccccatgatcattctgcaggttagatggatccaactaccaatctaccatgcatgctgggtatgttcatacttgcaattccttgcatttgccatggattatcagcaatgtgaataaattgtccagcagatattgttgtacactaatcctagctagttgaacaaaaatgttggaatagttgtatgatcaatgctacagcgaaagtaagttttacaaaatttaaaaatgtatgataattggttaaaaaaatagtgaaagtgattgatatgataacaagtttgtactatcatatactccctcctttccaaaatataagaatttcttggttgtttagcaagtactatggttaggccaaaagattactctttagttactttaattgttattttttgaattttgaatggattagattccctttcaaagcatttggttggctctggattcatccattgaagttatttgaatagtgggaatcagtgtagggatctccttacatcgtggtacaaaatttaaatcctagaaatccttacattttgaaacagagaaagtatatattagctagaaatctttcatcaatatggtcagtaataatgccttcggtttcataaggcatatacagtgctccaattagatgatatacgtacggagtgcgctgttatactagtgagctttcatcaacggctttagtgattacattgtcaatttcatcgatgcatgcttgggttggttggaaatctgtcaatagaaactttgcacaatgctccaagactccaaccaacatatatatcatataaaggagtagatcgctagcaaactcctatggtctaaaccactatgtattccttcccatgcatcattaatagtgcaaccagaagctagaggtggtagcacaccattgcatcagcttaaagcacatgaggatagaagttaacgtgaatgtcgtagtgtaggaatgagatgcatcgagaaggataagaggagactcaatttaacaccacggcctaatgagtattgatggattagtctcctcagatgcagtgattgcatagatagcttgagactgcatattaaccaatgcattttaactatacaactctttccggttgatccttttgtataaagtcagaatgaaagcgcaagggttcaatgatcatcaccatttagttcagtgtaattcaaaagaagacacacaaccacagaaacacacaagggatgcacctaattttcataagttttgaacagagctgtaagttttaaataattttctatttgcatgaaaactgcaaactaatattatagctcttttatatcaaaggaacaggtgccataagggtttccacttatatgaatataatgtagaaggtgaccacatgactctttctttacaaaaaatatgatagcttatgcctagcaattagggaacgtatcatatgcacacaagtcttttcatgtatacactatgcatagtaactagaaaatatcaacaaaaattctataaaaattatacatgtacttttaatagtattaaatttatatcttaagtcccatcttcaaatttattataacagatttatactctcaaaactcagaattcttatctttttttatgactaaaatataatgaatttgagattaagacttcacataagtgtattattattggaagtacttgtacaaatttttctagatttttttggtaaaatttgttagttggtgtgcatagtatgtacatgaaaagactttgtgcacatgatatgttccctagcatttatatatgtattgaaagggaagtagttacaggggggaaaaagtttttcatcagttataaataaccaaacacttcgctttgatttttaccacaaccacttgttttcttcctttttctacacctgcaagcaccaaagttgaagcagataccatgcagaaattgaactgttgaaccattacaaaagaatgggagaggaatcaagacataaggagtagataatgtggatacagcttcaactgagcttcattggggttcaatcttgttttgttttgtgagaatgggatgcatggaggaaaagaagacaaaccagcaccgcattacctggaggatcttaggagaaattggtacggcatttcaaacaggaacatcaagctcgaacgacaagtggtaagtgagatatacaattctcagcatggctggagggacaagtgcaatgtgctggagggatcgatgagaggagaacagaattgaagttgtcaactgaaatcatcaccaagtttggttgctggctggttcttgttttattttcgttgctagcaaaatgcatgtacgttgttacagaatttagaaaatcacatcgccacattgcaaaaaaagaaatctattttcagtttagagcctaatttagaattaaattatatgtttttttttcatctttttatatctcagctataaaagatttgaaatggactcaactaaatcattaatgcataacttcctcccttaaaaagtatttggtttcgagagggatggacatgtgagttccacgtgttatagtttgagggagttggtggtggcagaccgaccaacttgaaactcaaacaagatcatcattagttttatgtgtagctgctctgagcctccgttctccatgtctctctttttgcttttgcctagttgcttacttgcttcctatttacaaaatggctttcaccactctttctcaaactaaaagaaagaaatcaactaggaacggttgtactaaggttgaactgtgacatcctggctcaattaggatgaggcatttgtggcccatgagagctatgtgctcatgtttaataccacctcactagtttagcaagaatggaaccaacttataacgacttgttcctccaaacatatcactcccggataatcccttttacatgaagcgatggtgaaagtgtaaatgggtagtatgtataagtaggcccacccgtcagatgggctggctacgttgttctagagggtggactgttacaaactgagctcaaccaccaattataccgttcccaatgtgggaccaccaaagaggtagctagcaaagtacactacctaggcagcaagagatcaccagcggcacaagaacaggcctctagctcatggcttgaatgtgtgagaatcatagattatttatttctaatctataacatgatggctttagtctaaaatgatcaccctaattctaatgcggaattggataatggacggtgttttgttgacagacatggagatgttgttgatgctatgaatagtcgatagttttaagttggttatttaatttggatatagactgacaaatgattatattcttctaattgattaaattctacttttggatggttgataggattatttacaagttattggaagaacttgcagcatgtggggtatatggttatactacgtgacatatattcatgagtggagttcagagttttggcttgtctccaggcatacatatacctaggcacaagtccagcgcaaaagcatacaaggaagatcataacaacatgtttcccttctctggaaaattttgttggcaacagatgccttctccttctttcagcttctgcttctttagtcagtttggaggaagcagcaaatagttgatgatatgagaattccttctacatcggcttaggtgtagcaacacgactttattattattattattattattattattattttacaaaaatataaaatagatcagtccctcaccacaagtagagcaagttggtgagttattgtaaagttctacaaagctaatttaaaagttattgcattaacttatttcatattacaaacaagagtgtcaatggaacaatgaaaaccatatgacatactataattttgtttttattattgaaattatataattcaaagagaataaatccacatagccgtaaagttctacatgtggtgcattaccaaaatatatatagcttacaaaacatgacaagcttagtttgaaaaattgcaatccttatcacattgacacataaagtgagtgatgagtcataatattatttttcttgctacccatcatgtatatatgatagccacaaagttactttgatgatgatatcaaagaacatttttaggtgcacctaacagaatatccaaataatatgactcacttagatcataatagagcatcaagtaaaactaacactctaaagcaaccgatgggaaagcatctataaatagacaagcacaatgaaaatcctcatcatccttcaccacaattcaaatattatagttgaagcatagtagtagaatccaacaacaatgaagatcattttcgtatttgctctccttgctattgttgcatgcaatgcctctgcgcggtttgatcctcttagtcaaagttataggcaatatcaactacagtcgcatctcctactacagcaacaagtgctcagcccatgcagtgagttcgtaaggcaacagtatagcatagtggcaacccccttctggcaaccagctacgtttcaattgataaacaaccaagtcatgcagcagcagtgttgccaacagctcaggctggtagcacaacaatctcactaccaggccattagtattgttcaagcgattgtgcaacagctacaactgcagcaatttagtggtgtctactttgatcagactcaagctcaagcccaaactctgttgaccttcaacttgccatccatatgtggtatctaccctaactactatagtgctcccaggagcattgccactgttggtggtgtctggtactgaattgtaacaatataatagttcgtatgttaaaaataaagtcatacatcatcatgtgtgactgttgaaacttagggtcatataaatctaaataaaatcatcttacctatttaaatagcattcctctatgaggataaatcctattacattatcgtagctaattaccatcacagggactttacaattttactatatgcatgcatttgatcctaagctgctttggctattagatataaatgaagtgcattaagcaagttcaacctttcattcccaataggaacgaacttgaagcacagatgtcaattactatacccctaacaattgatacactatagcagcggttgtagccgcagctggaggattcgctgtcgagcagaccatatacctgaatttaaaccatgtcaaatatccgtaatgaataacaaataattttatattgtgcatatccaatgaataatcaaacatttgcctttcgactgtaatgcttgcatggcctgctattgtattgctctggaaacacatctttaacagatgttgtattatcacatacattacattggaggagaaggatttaagtgatcatatatagaacagaggatatgatgttttagaaaaaagaagattaataatgtcaagaatactttgtgaaacagtgcatgatgcaggcacatcacttgatacattaaaagcgctgtaaaaaatttatgctggggaactaatgcactactactagcctcactaatatcatcagttcgcggtatgtaacaagctaacattctacactgcaccaccccatccattcttgcttttttctatagaacacaagaaggaacatcagtaactggatgcatgtgtgcaccgccagctgccacagtgttggccattatctctttcttcaaggcatttcttcccatcaactcctgcttgacacaagcaggacaaaaatgtagctttggttaagtcaaggggagtcagtccagctatagatgaaccagcgcccttattattgtgattactgccctagctcacacaccggaaatggactcaaatcttaaaggcatgtgagcttctaacgagcccacattccatctaggtaacatgatatattgtaaggctctatttttttcagattattaaaatggattatttgctccatgctttaaaatatatgtttgctccatattctaagtcaagtattttatttagggtaattattttgatcctagaggagacatcctaggatttctctaaacatcatgaaaatagttatagtaaagaaatttcgtaatatttatgtggtgtacatattccaccctcacaaattaattttcaagttaagctcagtagcaaatcgacaagtaaaaaaggacaggtccagcatataaacgttcatgtgcaatgtacatacgaatttatttattttgtttctcaatgttcagatccaatttaaacttggttttttcgttgagtagtaaattgtcattgtactctatattgtcattttgttagggaatctttcattactgtgtgcactgcatcgaagagaaaaaaagggcgtgtaaatgcatatcctctattaaaatccgacttctatatattttgccccattttctctataatttctagtggttattgattgagaacagctacaaattacttactaagcacctttcatgggcactatataactcatgcaattcttaaggtttacgaatgcgaatacaaatagaaattcgctgtgccgacctgttttcaaagattaaaaaattgaaacatcaatcagaaaccattccagaatgggccaaaatttggaaaacaaattttgaattccatggagaaaattaactggctggcaattgcacatttgcactgctttgcccctataaacatcttcgagtagccatttcattattcccagtaaaatattaatactccttaatcaagaactgccatataggtcatttctcttggtacttcagttcgctcatttatttctcataatttaaatttcaaagtaataagcgatagatcaggatccatgatttgaacatgcaactttaaagtaatgcagtaagatatagatcggtgtccatgacttgaacatgcatgaacagtaaccccactcgtgagttaaaaagatagatccatgatttaaacatacattcgcagatatttgatcattatatgttgtaattatattctcataaaaaaaactaaaaatgcttcatagcatttgtatattatgccaatattgagataatttcgatatctcatatgttttagattggaacagatcacgaaagtttttcttcgaaaagttatggtcattaggacatgatggatttgaggtaacaaaatagatgagatttattaaaacccttgaaatagtccaacaatccagcgctaacatttagcacagtgtaattcaaaagaagacaaccacagaaacacacaggggatgttttaaactccaatttttatatatttggcattattcaaattgcaaacaaatatgatgactctctttctcaaagaaacatatgccgttagggtgatcccagcgcttcacttagaatggtttttcatagcattaaatgatatgccacgtaggaaaaaacatgatgtgccattttattaacttaggaaagagaagaaaattgggtcttctcaaaatgatcatcatctaacaaaatgtctctttgtttatttgtgcaaagagtaaatgtgcatcgtgcaatgtcatgcatgctgccaaccaagattaatttctatttagttgaacctgtgcaacatttaaagtgtgaagtaatttttgttggacttgaagcgacaaagcaccttggtcgattaggccatccccaacccatggtgtccatgggtggtgtctagagcagtgagagatcaataaatgcatatatggacactacctccccattgcatcgtttatataccagttttcataggcaaaaaaaaattagtagctctttgcatgtaacattaacagaggagggtcagctgtggcaagcaagcaagcagacgcgggaggggaggcgcgcagcaggcatggtgacggggtagggcgcagcggatcgagatgcgaggatttttttttgggggggtggggtggggggagagaaacgagtcatccaacccaacgcggatttagctagtttccagtgccttggaacagccgccgaaacggtgtcgcgcatgcgacctggtttctatgtttttgcttctttctcttcttttattccgttgccacatcaactttttgtctagttggcagcctaattaattctatggaaaccaggtgacatggagggttggggacatggtggaaaaaaccggaacgggccgacagttcaaccggaaaaaaccagaacccgttcagttcaaaagaaagaccggacatgcatatgacccgctttgaaccggcagaaccggtcggtttttctatgaaccggtcattaaaccgtccccggttagaccgaacaagccacaataatcttgaaatgggccttgatgtggcccaattggtctgcctagagcgttttggttggcaaaaatcaatctcctattctcggcacgtgtgatatacaatggtaagtgagatatacaattctcggcacggctacattacaaggtgtcgcattgtgtcaatgtttggttaatttgctagattcacataatacatgccaggaagttcagaacaatgtgttgcctttcaccggaaaactttgttggagcaaatgccttcttcttttttgcttctgcttcttgagtccatgtggaggaagcagtagatagctgatgatatcaggattccttctgtgtctgtgtaggtgtagcaacaccactataatttttatttagcaacacaatatcaatttggtctataaaagtatgaattaaatcaatccccaaccacaattagagtaagttggtgagttattgtaaagctctgcaaagttaatttaaaagttattgcattaacttatttcgtatcacaaacaagttttcacaagagtattaatggaacaatgaaaaccattgaacatactataattttttttcttactgaaattatataattcaaagagcataaacccacacagtcgtaaagttccacgtgtagtgcattatcaaaataatagcttacaaaacataacaaacttagtttcaaaagttgcaatccttatcacattgacacataaagtgagcgatgagtcatgtcattatttttttgctcaccatcatgtatatatgatgggcataaaagttactttgatgatgatatcaaagaacatttttaggtgcacctaacagaatatccaaataatatgactcacttagatcctaatatagcatcaagcaaaactaacactctaaagcaaccgatagggaaacatctataaatagacaagcataatgaaaaccctcctcatccttcacacaattcaaacattatagttgaagcatagtagtagaatcctacaaaaatgaagatcattttcgtatttgctctccttgctattgttgcatgcaacgcttctgcacggtttgatgctcttagtcaaagttatagacaatatcaactacaatcgcatctcctgctacagcaacaagtgctcagcccatgcagtgagttcgtaaggcaacagcatagcatagtggcaacccccttctggcaaccagctacgtttcaattgataaacaaccaagtcatgcagcaacagtgttgccaacagctcaggctggtagcgcaacaatctcactaccaggccattagtagcgttcaggcgattgtgcagcaactacagctgcagcaggtcggtgttgtctactttgatcagactcaagctcaagctcaagctttgctggccttaaacttgccatccatatgtggtatctatcctaactactacattgctccgaggagcattcccaccgttggtggtgtctggtactgaattgtaatagtataatggttcaaatgttaaaaataaagtcatgcatcatcatgcgtgacagttgaaacttgatgtcatataaatctaaataaaatcacctatttaaatagcattcatgtatgaggttgcattatcatagctaattaccatcacaaagaactttacaattactatgtgcatgcatttgatcctaagctactttggctattagatacaaatggagtgtattaagcaagtccaacttttcattctaataggaacaaacttgaagcacatatgtcaattactatatccccaacaattgatacactatagcagtggttgcaatggcagctgcaggaattgctagtgaacccaacagcccatataactgaattgaagccatgtcagacatccgtaatgaacaacaaataattccaaatagtgcataaccaataaatacttaaagatttgtctttcaacactaatgtttgcatttcatgcaattgtattgctctggaagcaccttttaacaggttgtatcatcacatgcattacattggaggataaggatataagagatcatatatagaatagaggatatggtgttttagaaaaagaagatgaagaatatacattgtgaaacagtgcatgatataggcacatcacttaatacattaaaagcactgccagaaatctatgttggtgaacaaatgctcactggttgtctcacttatatcaccattcaccaagttcaccgtatgtaacaagcacttggccccatggttccccttaccgtttttgacgcggttaccacatggttaccgcaaaaaaccgtgtggtaaccgtgagacataccgtggtttcaaaaactaaaaaggttaccgcgtgtgatagccgcgcagttttgtaaaccctgcttggccctacaccaccccagccattaattcttgtccttctctgtacaacgcaacgaggaaatacatcatgggcatagggaataattagcaagtttagcaaaaatgaatggcacaattgtatagcatgagtgatgatgcaatgaggaaacataagaacatcagccaggtgtttctccccctcaactcctgcttgtcccaagcaaaacaaaaatgtagctttggttcagtcaaggcgagtcagtccagctagagattaaccaccttattattactatttttttattattactaccctagcttacccaaaaaaatgaacatttttcatttttaattttaaaaataaatccatccaaaacttattttcaagatttgaacatttgaccacgccaactaaactggcgtgtcaaaacaataccgtcatgccactcccgctggtcacaccggcggggaccgacctcactggtaggggtggacaaaaaagcttgggctcgtgagctcggctcaagcttggcttgggctcgcatagctcggctcggctcgaaagccaaacgagccaagcccaagcctccttcctacctcgtttccgaaacgacccaagcccgagctggctcacgagccactcgtgagctcgcttggcttggtacaatagggtcatatgcaaaaaaaaattacaccttttctaactatttatttgttgaaaattataactttgattgtcatattatctatttatgtgttgtgatgacatattaaagaaaaatatcgctttattacacattctatgtggtaaaatattgctcaatttctcctagtcttgcttgagatttacttgatgccaggctcgcttggctcggtacaatagggtcatatgcaaaaaaaattacaccttttctaactatttatttgttgaaaattataactttgattgtcatattatctatttatatgttgtgatgacatattaaagaaaaatatcactttattacacattctatgtggtaaaatattgctcaatttctcttagtcctgcttgagatttacttgatgccaggctcgcgagctagctcgagctggctcgagcccataaacgagccgagccgagctgcagttttagctcgttgtttgtagcgagccaagccaagccgaggttcccttgcaccaagctttcatgattccacccctactcactggtgtggcagcgttatttggccacgcgtggcaggataaaaccgtcacgtccgctacaggtggtgtgccagtgtcatcttgtcacactagatgagctagtgtgcctaaaaggttcaaattttagaaataattttgaaagggtttgtttttaaaatttaaaattaaaaaggttcaaaaaattaaaaaaaatccctagcttacacaccggaaatgaactagaaacttaaaggcatgtgagcttctaacgagcacacgttccattaggtaatctggcatatgtgacatatagtaagggctctatttttttaattatttgctggattattaaaatagattattttcacccatcccatagctggtgaaaacattccccacgctgttccgaataacaatgccgacgctaccaatttattttcacccatcccatagctggtgcctgccacacacctgccacttgggttctttccccgcacccattcacatcactttgtcttccctccgacacaatttttcctttctcattttccagcgttgcactgccagacgggcacaaggaattccatagattcagaaggaaagatgcagagccctttaccgtcgcttgcccagaaccgaagacacagtcattacgcaggtaccaagctcgccataggacaaggagaaactgcgcccgctcgttttcgctcagcttatcgagtcccccaagaagccaccctgggcctagcttcgacagggaacgcttatccggtaacctccagctcgcccgcagagtttcacggagggcccttggccgggtacatgaaatcaccgcgtgaaactcgtcttcctccccctggccgcagatagtacaggtcgcaactgcttgcagctttcgtttacacctgttcttctgggtagccagataatttcgggctagacgccaggcgaaaatacggacctttggtggcacaggtgtactccaaattcttcgccagatggagcgatcaccgtccgtttctctactactgccttctccatccggatggaacttgttcagccacgctaaacgataagcagacctcaccgagaaaatccctgatttttcgtagtgccaagctaggaaatcctcatcctggtatggcgacaaattgattttcaggatctcttccacatcaagtgggtgacagacgtgcttgatcagatcaacgtcccagctcttttccccttgtttcagcagctgcgagacccagcgaagacggcagcgtccgctccttcccataagcatgagagaggaggctcggggaatccatttatcccgccaaatcctgaccttggtcccatccccaattcgccatataagtcctgtcttcagcaactgcaacccatgttcaatccctttccatgtcggagacgcttcagccgggaagaccgcatctactagttcacaattaggataatacttagcttttaattaggatatatatatgtatatatatatatgtatatattgtaatattccagtattccacccccccccccccccccaaccccaaaacaacaaatcagttttcaagttaagctcactagcaaatcgacaaaaaaaaaaagggcagtccagcatatatatataaacgttcatgcacaatgtacatgtacatacgaatttattagttctttttctcaatgttcagataagttttgttgagtgataaataatcactgtacactatattgttatttttttaaggaaatctttcatcattgtttgtactgcatcgaagagaaaaatgggtgtgtaaatgcacattctctcgcgagagattaaaatccatcttctattttgccttttttttctctataatttctagtggatatcgattgagaacagctagaaattacttataagcatatttttcatggattctatttaagatacaaaactactacacatgggtacatgctaaccaaggtttacaaatgcaaaagcgaatagaaatttgctgtgccgagctgtttttcaaaaagattatattcttttctcccaaagatgaagatgaagattaatttttttcgtaaaacgaggtgatattagcatatgattgattgagttttaattataacaaacttgaaaatagattaatataatattttagaacaactttcatatagaaagtttccacacgaaacgtacagtttagcagtttgaaaagcttgctacaaaaatcttaatcttcatccaacaagaagaacggaacctaaacgatagatctgaatccatgacttgaacatgcatgaacagtacggtgagttaaagagatacatttcgatccatgatttaaacatacatacataactgggtgcagatatttggtcattatttattgtatttgtaattatatacgtactcataaaaattattaagaacgcagtaaattcataaaattaagcagttttcatggcgaatctaataacattattttcacatataacattcggatattttgcctatcatgagatagttcgtatatctaaattaatccccaacgattttctagcagtgattcagatatcacaggctaatctcgtaatacataaagatgattatgttcaaaacatgatttaggttaaaaaaattccaagcgaatccgtaaactatattcatgtttcagatagccggcctttggttgattatgaaaaacgattatattattcacattttaaatagttttgtgctatagacatgtatatgaaagacaaaacgagttaaagaaaacttttttagaaaaaagaaactgtgtgaccacgatcttgatacaggaaaagtttgaattagtatgttcaattctgttcatgtacatttgctatatatattattgccttcatttgcaattatactgaatactcgctcgaggaataaatcggtacatgtacgcatgcctctcaataatttgaatgtgaatttgagagtacgtagttcatctcatcataatcatccacacccaaataaattactacattccgattactcataaataataggtaaaactaatttcaatttgacttgatttcatcaatggatcttcaaatcaaatcaaatttcaaacccatccatcagcagttaccaatcctgccatccccggcatcggtgaagaacctcttccagaaccaatggcggcgccacaccgtgtcgaccatctcgtcgatgggcacccccttcgtctccggcagcagccagaagacgaaggcggccatgataacgatccagatagcgaagaagaagaagatgaaggccttcatactgcacatcatggagaggaaggcctgcgcgatgaggaaggtgaagagcatgttggagctcacggcgaaggagaaccccgtcgtcctcgtcgccagggggaatgtctccgacgggattagccaccccaggggcccccacgaccacgcgaagctcgagacgtagacgcagatgagcaccacgatcgccaccgcccacttctcgcccggattgccgttcgccttcacgtgttcccacatgatcgcccccaccgctgtctgccatggatctttcatgttagtttgtagaactaaaggaacgcgaatgctaagaaatgacctaatatcagataattagaaggggtgaggcttcgaatacaggtcgtccccaccatcttgcggagctagccggaaaacctcttgccgttttttgggtttctcgaactgggagaggacttatgtaaaagtttatattaaaaattaatatatgtttcaaaatttaaatgtgtagtgtatttaaaaggaagttatagtaaaattatataataaaaagatatatttaagtgcatcatatatttaaaaagaaaaggtaacataaacatgtactccctccgtttttttaatagatgacgccgttgactttttctcacatgtttgaccattcgtcttatttaaaaaatttacgtaattataatttattttgttttgggttgttttatcactcacagtactttaagtgtgatttatattttatacatttgcataaaatttttgaataagacgaatggtcaaacatgtaagaaaaaattaatggcgtcatctattaaaaaacggaggtagtagaaaaaactatattttaaaagccaactgtgttatatatttagaaatagagatatatatacaaatatgtaatatgtttaaaggctaaattgcttcgtgtgtaatatatgtaatatattacctgtgcgatgagcatttggccgcaggcctggaggaggagcctgcggcggccgatcttgtcgacggcgacgatggagacgagcgtggagacgacgttgacgccgccggtgacgacggcggagagcagcgacccgttgctcttgaaccccatggtctggaatagcacgggcgcgtagaacatgatggcgttgatccccgtgaactgctggaacacctgcatcgccaccgcgatcaccagcggcggcctcgactcccgccgccgcagcctccggtacgccgactcctccgcgctcagcgccgccgccgcctcgcatgcgcgcgcgatctcgtccagctcgtcgccgacgtcgcgcgtgccgcggatcctctccagcgtggcgcgcccggcgtcgcgccgcccgcgctccacgaggctcgtcggcgtctcggtgatcaccagcgagcccaggaacagcaccgccgcgggcactccggcgccgccgagggagtacctccacccggtgctcgggtgggcgctcgaggtgaagtagttgacgacgttggcgatgaggatgccgatggtgacgtcgagctggaagaggatgttgagcgcgccgcggatgtgcgccggcgcgatctccgacaggaacagcggcgccgcctggttgccgaacccgacgccgacgccgaggcagatcctccccacgatcagcatcgccaggttcgccgcgccggcgcacagcgccgtcccgccgaggaagaacaccgacgcgagctgcatcgtgcgccgccgccccagccgcgtgcacagcctcgacgccgcgaagctggcggccagcgcggcgaggtacagcgacgaggtgaacagctgcagccgctggtcgtcgaacttgcagtagttgttctccctcgcgcggtgcttccgcgcgtacaccgacgggaagaacttgatcaggaagccgtccatggcggtcacgccgccggagatgccgacgtcgtagccgaacatgagcccgctcgtcgccgcgatgatgccgcacagccacacgtaccacgtgatcttccccttgaactcccgccgctcgccgccgccggcgaccttggcctcgacggcgaaaccacccgccattgatgacgtcaacgacgacgacgagatcaatcaaatggagatgatgaggaagaagatgaccaagaggtggtcgagtatatatagaggattttattaatggagataagatgtggataaattggagtgatctcatgcattcgcatgcagataaaataaattaaaattgaattgaatttgaattaaacttggtcaacgaacagattaactgaaggggtttaattaagcagatcggattagttactagctagaactaatcaggatagagttttccggggggtttttttgggggtttttttcacacggtgacggtgacatgcatgcagtttaggggagttggattagtccttttttaaggaatttatagttggattaatggttaggagtaattaggattaatcggatcagccgatctcaacagtgaccagttctcctgcgacaagcccgttcgttctcttgacacgtggcaccaattcattcgctctcaatctattaatggtaatttaatctccaacccaatccaaatgcaaaaattgaaagaaaaaaaaacgcgtttctcacaagatggactgttcctgtgatgactatttttgtctctacaggccgtcctaaactcgtaaatatattatctctaccgtgtattttattatttttttgaaaaaaaaaagtatgcacaaaaatggattttggccattaatttatctctattgatttttgaaaaaacctttacatgatttttatctgtcgctctgttctgcttatgccaaagatggacgttgtgcaaaattgaattgatcaagagcagcttgtgcacagtaattctctgttgtagtatgccttttgcctcgaaactgattaaaacagaacccaaaataaagagcatgagttaactaaagaaagttaacccgtaatcttgatgctatagcatgcttcaaaattataccctcgaatgctaaaaaaatagtactccctccgtttcataatgtaagtcattctagcatttcccatatttattttgataccaataaatctagacatatatatctatctagattcattagcataaatataaatgtgggaaatgctagaatgacttacattgtgaaactgagaaagtacaggtaataatcatcacttatatttgtcgaagaacaatatgaaaagaaagctatcaagcaggtgccttattgcaaagttacaatacacactggcgaatgaactgcaaacttaacttatgtgtcactaacaacttagaaacgagcaaacaaaaaccagtcagttcatcgtcttagactaaaacaggcaccctgcagacaagtgccttgatcaaacggtttttacacggcaaaccaacagacgaaaattcaccagttaaacacatttcagcatctcttcgtacgcataagaactcttcaagcttctgagcttcatcaggtgtttctttgaccgccataatgtttctttcaaactcctcgccttatctctgcgaattcacacataatatgagcttagggaaacattgcagaagatattggccatgttttaattggctggcgaaaatcgtatgctacctgaaatgtggttctgggagctcattctgagataggcttgcgaaccaaaaagaagtacatcggcgtgaagatttccttcctgtagttaatatatttgcattagaactttgcatgaagtattaaacaggagaggaaatggaaaaacagacagctgaactggaattccagaattcgtgacaattatgttgcttttctgattcctggtgctgaaatatgaatcagagacagacttacttgccaccttcgacgagaccttcagctgccttctctaaaaagttagataccctttcacttccttgtggggcaaggccgacgtattccaatgccttcacctaaaaaataacagaagaggatctcaattccatttccatgcgaatcaagagtgaatatataccatgattaaatcaggctgttatggccagttacagtggacaaagcagcctgatctttgaatattcagtgtaacaaagttttgatcgaatttaccatacaagcaatttagcacatctgctgagcagattatgtcaagtctacccgaaatttgatacttctagaaaaaaaatagtatagtacttttaaactttgctagctattagtataattgtttgttttatttattgtaaatgtccaaagaatgacttttctagctagccctggtagaacttctataggttttcatgttacataaactattacatgaaccattgttctcaaaaccacttttaaaggcagcagggaacctaaaacttcattaattattttccaccacaagattggtgtgcccccgaatgttcattggtattaggccacatgtcactgaaacaatggagtggcactaaaatgcaccctctttgggatgccaactcctcaattttaagcttttttctgttcagagggaggaatttgataagaaagaatgtctatagtacgctttactccaagggacaaatcaaacttgatttcactgtgcatcttgaacaatcaactcagaacataaggtgtagcaacaataaagaatgactacagatgtatctgttggccttaccattgtgcgagtaattgcacgccccacagtagtcagacggaagctactcaaggaaaaccggcttggatccaagggcaggtaccaaggaaccggggaatcttcagcaaggtctttatcccaaataaccttcacagaaaaaaaaattatgcccatgggaaaggaataacaaataacagaagtgttcatgaaactgtgctgctttgaaagaaaactgctgtaactggccagagtttctaaactaacaatagaggtgggctactcttccagccatgggttttcctcaggtaaacccaaacacacaatcaaacaaaagagaggtaaagcacagcgtctacattacctcaaacccagcatcttttgcagcttgaagacattgttgagtgcttcggatatctggcaggccattgccaagctcgatttcatccttgatcctcttgtgtgttgcattgttcggttcatagtgatcagtaatacaccactcatacacagcaaaacactggccaggcttcaatacacgatagatctccttatagcagccaacctttgacatgaaaaaaccaattgactttgtgtcgcaaggagggattaaagttgatgatgagttttaatatacaagcaataatttgcaatcataccggatcaggtgcgtggcatgttgcctcaatggcatagacagcatcaaaagtgttatcagaaaacggcatcttcatgaagtctgcctgtatagagaccaatatgtagaatgtaactgtttgtccttcagcttatatatattgtcaaataagtcttctctgtacagctaagcaagtgcagagagtctacgcaaggtaatttgcaatatgtgatggttgctggaaagggataaataacatttgcacagagatgcagctgcaaatagatgattgactactaaaagatgggggaaagaggcaaagagccaaaaagaatgtctattttagctaactataccttcacaaagtcgcaagttccactaactcctgctacccgattaagctcctggatattaaaacaaaaatcttatgtcaacacaggagtaatgtgatgaacagcaaacgctgaaaactgtttactaatctgaagttcttaaccatatgcagaagtagagtaaatcaaattaagtaagggaacatcaattaacctttcccctagttatctggtactcattgttgttcaatccagtgactgaagccaagctgcaggaaacagcagatcatggccacattagtcatctctagttcataatccatagtgaggggaaaaaaagagaagtttccacacttttgaggacagtattttagcagaaaatggatcatcaacactgatatttgggaaaaagaaatgccctaagtaaacaatgagctcaatgccatcttcacccaaaaaaataacatataatgaggaagtacagggttgatacttaacgacgttgtcctggcaccattatccaagatcaatttaccacacgtttaatttttaaatgtcaaatatttattatgcatattaaaatttctggcccaaacacattacaagcaagtggacagaaggcccatgaatcaaacctaaatttggcaatttctcttagtggtccgcctattccacaaccgacgtccaaaacctacagtagggaagtgaagttaacactttcattctaatgttgtagtgtagaaccagcaggaaatctttatgataggtttaaataggaaaattaaccttcattcctggtttcactccaagctgaagggcaagaaagtgctcatgtcgcttaatgctttcacgtagggattctccattccatctaaaacattcaggaacatgacaagtttctgtcactagatgtcaggtaatatgcaaaacttcaactacgttctcgtatttcattacaatgagcacagatgatctctctaaaaccctcacctgtgagcaaagtggaaggattcaccccaaccatactcatagaagctggtggcaagatcatagtatttattaacctgataaggcattaatgcattagttgctaatataaaaactgaaaaacccaaaattatctccaattagcatggggtaaatgggtgatgcagcaaacaaaaaattgtcacaaactctaaatttgaaggtttccttctttcaaacagaataaagaggggttcaattagaaatatgtgactaaaatacaattgacatatagcataaacagcagaacctagaatatgtgtactgtcttgcttcaacactcaacatgacaatttaaaaagcacaatatttgagttgtcttagatatctctttgaatcagtcgtgcttagttaaatttataatctagtcaagaagaactgaagattaacagctttttatcgtgcaaaagttgaagcaaattacagacaaacagttgaagcaaattatgcagatataatccttttaactgagcatctagaaaatgacttgagtaggaaagcaacaaatttacaaaataagatattcacaaaaatgtaataattctgtcttctgagagactaagatgatttaccatgtctgtgtagttggactttcttgcttcttcttttcctccatagtatccatggtatttctcataccttgcaaaaccaatttatttaaaataaataacagtaaaatacaggccaagttctgagcacaaaaatcctttttctgagtgtcaataaaattcttgctaagcagttgatatgttttttatacagggtaaatattgaatgtattgacaaattcttaatagaatgtgctaaaactggcatagatagagatagtttaaaagaggataagcttgttttaataattctgtaatggtgccacagtatgtactcctttccttgattaaccatagagcatagtttgaccttgcacgagaaatcaaggattaaagaggtgacaaaggtgatgaaacattagagaagatgacgtgggtgcactctcattattgattcagaaagatgagcgagcatactttgtggcagtaacaaataaaagcaaatgagaaggagtaaaagacatgggaatggtagaaaaagctcatatcttatatttattgctgggtctttggaatattaatgggaggggagtacaatacgtatggacaagttggcatggcttgaagtagcctatatagtgatggcctgatgggcgaccacaaagcatcacattcaatacacatgataaaaacctagtactattctaataagatgaaataggtgcaatgcatcaggagttttcagatgtccagaactgctaccaccaaaaaagaagaagaaaatttctgggtgcagaacgaaaagtcgagcaaacaacagtgagaaattacgaaatcagtgaatctgtgctttccttgtttaatctcagtcatacaaactgaattctgaaccctgaactctgaagagatgcattcaagtacagcacagcagacatgcaagtacagtacatcaccagaatcaaacctgcatatctaaatctaaatctaaatgccaacaaaaataaaagagagagagaaaataataatcaaccaacgcagagaaacaaagagcagaagatgctttactcatcgacagccgacttgacctcatccttggtgatcttccccccgagtccagatgcaagatccatggccccagacctcgacatcgcggcgtcgatcaccggagctccacctgcaaccaacagcagcaaagttcctcacggaaatcaggagcatccacctcctcactttcctcccaaatccgaacaaaccacacacatatatattccaaaaaaaattcaaacggtagtgcgaaagggatggatatgatttattttcttcacccttttttgcccgtccctttccccccaacctctcctcctcatcttttcacccccaaacaaagaacaaaaatactagccaatcacccaggccgcaaatgcggtgtaccaatcagccgccgatcaggccatggatggaggaggccgcacggcgagcagggccacgatcccgtgacggtagggcgctccccccccccccctcctctctctcccggggatgggtctggaactcgagatcgcgacagagccgagccgagacgatgcgtgcgataggagcaatgcatgtgcgccggcgagcggacgcgggaggaggaggacgaggaggggaggtgcttaccggacggtgagggcggcggcggcggcggtcgccggagacgagaactccggccggcgaggagggaggtggggaggatggggtggcttctctccctcgcgtgggttttatcgtggggttgcatctcggctcaatattgattatttttttctatttttattatataaaataatactccatctgtcccccatatatatatatatatatatatatatatatatatatatatatatgggggacagatggagtattattttatatatatatatatatatatataaataaataaaagaacctgatactggatgggataatccctagttaagttttttaagataatgataaaactttcagtatctaaactaactagacttgcacgctaaaatacctggatttgaacgaattattatggagtggctacttaagcccggtttcacgtattgataggagtatgaagtttgtgtgttaaattatatttgttctaaaattttggatttcatctaaataataggaaaataatgatttatttaaatgttattaatataatcgtgaatccagatctaacgatttatgaagttacgaatatcagtttcaaaaaattttggatctagagctacgtgcctatgtcgaagagggccctaatttatggtttctaattttattttcttctattatatgaaagatatatggcacatcctacttcaaatatgtcttttaacacatgttaaaaaagacaaaggctaataaaatgctctaacatcactgaaaacttttaaaagcgtgcttttatcgtagaggagatggtaataaataaagtttttgagaaaataagtccaagcatgcaaatttgtgcatcatcattcttcttcaactacgaaatacttcctctatctcataataagtttatttttagctcattttatttgttttaaaataaatttaattttagagtaaccattgcatcggagtttgtgaaagtagcgaacaattgtactccatttgaagtagataaaatcggaaatggttacattgagatttgataaattaagggtttgttaggcatagctctagctctatctctcctgaaattatagtccaatcaaacggtttcagtttcacccaaaatgcgagcggagttggttgaaatacttttacaaaatgaactagagatgtgaaactgggtttaggcagctccacctccacaactccatttcaaaccctaactcctaaagttaaatttaagatattgagccctatcaaatgagaagttaaatttataagttagaggcctaccaaatagaatgcgtgtttggtagggctccaactctcaaatttaactctatgagttggggtttagagtggagctgtctaaacctagctccacctttttagttcatttatagagcatttttgtcagcttcacttctttttgaataaagctaaaattatttggttggactctagcttcaggaaaaatggagctagagcaaaccaaatagttcatatatgttcttggcagctctttagcttacaagcttcagctatatttaaaatataaaggttggtttaaagttatttcaactttcttccgttgttttctatttttcagcatcatatcaactcaagtcgttaaaagtaaaagtataaaatcctagagccctatacaattattttcattgtttgggtcccgcatcatagcttatatagccacactaaaaatctcagcgaaggaaaaaaaaagaaagaaaagaaaaacatgcacatcgacgatgaactgtcaccgtagagcctagtagagcattatatagcttcatctaattctaataaggtgcaagatagtgtttgcgatagattaagatgaagataaagtagagctgaaaaaactagaaaattattagcgcataactaattaagtttaaatattataaatttaaaaaatagatttgttcgatatttcaaagcaacttacacatagacattatttagcaatttaaaaaacatgttaataaaaattaagttaaaatttatatgttaattcgaaaataatgtgcacggtcaagtacttagcttaaaaaaggtaaccagctagtactagcagggagaaacagtgtccagctgctgctgcggcaagagcctggaatgaggtggatcctgccaagccagcattttgaagacatcatagctaggctgtcgtgcgtccaaaaatatagcaatgttggcgaaataaaatagtcacaaaccaacaacatagcgccatagcgatatattaggcgttcaaaaatatagcttccctaccaactcattaatcccttggttctagatttaatacggatacttatatttataactaacttttttttatggtaggtaacgtacctgtcttctgaagatgattatagagatagagtgtgcttatgtacacattatgaacatctacatttatatatacttttaaaagcactttaatacactatataatagagttattttttaaccgtacgtgtagtcgaactggtgagccagcgatcgatcactattttatctagagatggtaacggggcaccaccctattcactactcgtgactcatgagcacgcatcaatcagatgaaatttttacttatcagaaattggtaaattgagttggaaaaattaatcaaacctataaataaaattcacaattaaactgcagtaaggcctgccacctttgaaacacgagaattgtttttatgcctaacggaatttaactaactaattcatctgaaaatatcgtaaaatttgcgtgaataattaaggagaccgtggcaacaaagatgtgcagctgcgtattcatttatcaaagaaggaaaaacgtaaatagctgaagttaatttggtgtaatataatataatatcaaaatataataattagtattggattgaacatataccaacactacaaatttatcataatattatagtttgaaatcgagggagtactttgttaacgacaaatggcgtataccatcagtacagtactagtactacttaattcgaccgtttgctgacaaggaattgaagcaaaaacgacatgaaatcggagagagctgactgcactaatcagattcacacatatttttcatttctatcgtatcaatccaacttgcattgattgcttttagttgaagcggtgaattcatgttttggtgtgtatgaaatcatcatgcaggtagttgggcgattttgtgaaaattacgaagatgatatacgtaccataacgcagtcggatggcagatagcgtagttcgtattcgtacagcagctctagtaaattatttgtccgattttaatagttaagggtatacaatgtctggctttcgagtttataagggtgtaattcgatcgaccgcaatagttccaagggtaaatcgtacattttcctaattataatgatggtggtatgtggtttgtccttcattagccttcatctttctctgatctcatcttcgtctctcacgtcaaattaggatcctctgattttgaagtcacaacttctttatttctgacatgtaaatccgagttttttttgccataaaaaaagtcacatgacatcaaccttagaggatcatgtgtctcttgcgccactaccgtcgtccctcttcttcctttacttaccttcacgccttctctaaaattataccgcccatcttctcattgctctttggccgaatgtgatactaacaatattctcccaataaacttggatcttcaagatcttcctagattattatagctgcatactcccttcgtataaaaaactaatctagtatatagtatcggatgtgacatatcataatactgtgaatttagatatacatatatctaaatttatagtactagtttggcttttttacgagacgaaagtagtatgtatataaagaagcagccgtatgttcctgttcaaaacgaggacaatagatatagcagaaacaatggtgacacgactacgagccacatgtgctatgagtgggtcatggatgttggcatcatggtatggtatatacttaccgcagctgtcaccagagatgataatttcctactacattcgttataatttaaaatatactaatataatattaaattagacatattataatattacgaatctaaagttcgggatagatatgatctatctaaatttataatattggaatgtgtctaatttaatattaaattactatattttaaaatggagagagtaagtagtactacggctgaggacaaatgtatcggcagatcagatcagatcgtgagtgcagagcaaagctagggtgcgacaaggaaaccaacaaaagattctgcatctgtatatctattttagaaatatataagaaaggttcgggtatttcggttagcaccataaggtatgtgtgctaacgagtctcgcttctcttttaataaatttggatatgagagatatttctctaatatccagcatatttcagaaatacatcacaaatacaatgcaatgctgtgctagctgctacagctatccagatacacaacgtacgtatgctgcatgtagcacaacctttgtcctcaggatggcaacagtaccatatgccagaaaatcagactgaattcttcggtgttgccgtcttagaacttctttgaaagctacctctgatgaacctttgtacaaataaaagttgtggcagatagggtttaaaaagcgctagtgtggtaccaaatccaatatataaggtgctaattaacatttactctctcttttcctggaactagttttttccaactactactctctcattttccacacaagtatatttccaaacggttaaacaacgatatgttcttttttaaaagaaatctataggaaagctcctttacaaaatcatattaatccattatctaagaattttataactaatttaattaattatatgttttttagataacttaaacaactttattaaccaagacagaaagcaggggatacaccccaatacatcgcagaaggatacaacttaaagcaaagcaagaagccatctctaacaaggtagaagctaaccaatctaaggaagctaacttccagatgagactaaacaacagtagagaatcagatcgacagagttctgcggcaaagccgcgacgactgaatccttgggtctccattgacatgctcaccgcttgacagactggaaggctcctacagctgtcaccacggaaacgacacaaatcggaggtttggtgctgagccgtagatcttggtgtagacgtcaccggactcagcgaattggttccacggagtctgccgttagatatgctaatggaccatttttttcgtgcgtgggaaaggagtgttcagacaagcaaacgatgctagctaatagcaatgttttctttccagaaggtagcatgggtgtccttatgggtcttattccagtatttactgttcgatggctaagtgtcctcagggatgggcagtgaaaatgcaattcctagcaaccaacaaaatatttaattagattttttttctttgtttcatgtcatttgctttttcattggaattattatttgcttgataacataccaaaaaagaaatctatctagctacccaaatgatcaaatatgcaactagcacagacatcagacctgttgatataattgtcttttagcttccctttttatatattttgttggagatctggctgcaactatcccattttctatgtccataatgttttggttctggcactgtgcgttacacgtggtatggcatatcagttcaattagaaaatgacaacagtacctctaccactgggaccgggatcctctctatcatcaaaggcagatagccaaagttttgatttgggttatttggatatattgcattataaatttgacggatttgaaatagtttgggtctatgctacagtgcttgatatcaacgggcaagtactggcaaattgtttgattacgctgccggaattggattgtttgagaggcaaccgtaacttcactaactcaaacacgtgacaactattaatttgctgatactcatagtagaaatgatttggaccttccacattttcttatctaacgaaacaaacctatttatgccatcaccataattaccattagaattcgtgggttaataatattgtttctactgacagaagagcatatgaatcaatggtttagataatctatgttgagtgttgacagtattgctggtagcagatttgcaccggtggatgatagtattgtcttgtcacaacaatttggttggcgtggtaaaaaagtttcagattcagaaataagttttgagagggtttatttttaaaactaaaaattaaatagttaaaaaggttttttaataaaaaatccaccggtagattggttgcaaaacttggctacaaaagcatagtctttgtcttgatgtggatacagtgtaaacaaacaaagggtctttcacagacagaaaaggtcaccccatgtgtgtgcttgcacgtgaatgttactctatacaccctccgtgaaaaaaaaaataacttctaacgatgaatctgaataaatgcttgtacagattcatctacagaggttagtttttcataggacgaagtgagtatactatacaagtgacccatttgggacagtcagaagggtgagagaaacaactcacatgcaagagtaggtgatgcctggctgtcacagtgtcactgggtgatccggtgaggtgtagtgcaggaaccacgtgcatggaccatcacactgatgttttttttttctctttcctgaaatacgagcagatgggggggaaaagcagactgtgtatattcaggtttttgttgtgcatgatcacaaacatttgcgtgatcgacacaacaatgggtacagaacaagataaggtccagtcagatgcacgtacctgtgcccatattgttctgcttcttccatttgaccagaaggacaggactattgcacaatcagaatgtgatgaatactcatgggtcgaaattattagtatggtgggtctaaacctccagctgcaaggaaaggttcatcaccccaacccttcttgccttctccatttgatactgacgtgcttagcacagcacacaataccaaaaaaaaaaaaaagtggcagctacaggacttccaaacttttattgagtgcagaaaaagaatatgtatacagactgttagacagactggaccagatgttgaaaccttaagcattttggagcaaacatccatggttgtcaaacttatattcaaattatgaatgtcttaaattactgagttcaaattttgcaaatcttaaattactgagttacaatcacaccatacatgtttaggtcaaatcgtacaccatgactggctgctatattggctatgttacatattcggtaaggtagtatttaccaatacagatatagcattttataaaatgctataaaaattctttagtggtggaataggttaaaacagagagtggtcaaattcgatgggatcgtataattattattcatgtctatagaataacatgctacaaactatttacatacacatactcaagcagtttcatagagcaggccgtgcaacttgataatagctgcaaaccataggtatgaattgcacgcccatcttacatcagaggcccaaatgcattgtcactggacaaaagatacaacagtataagacaatcctgatatgttactcataacctgcattaaaaactaatgcagtacaaactataagagagaagatcaaggcattacctcaatagcaatcctgacttatgattttctgagtatctgggctgacattcactgagcatgttatgagcccctggattagtaaaaatgttagcggtttaacacaaaatatatgcaaatgtataatgctacagttgtacaccaccactactaagaagttcatggtaaaacactctttgagaaaatgatgggatgacatatttttccattaagaaaagagctagctcagtcctgctgtagtgctgtagagtgtagaggattcagcatttaggttggtattctgacttatctaaccaattgagaattgaaatatgggcaatgctaagaggttattgcccattatttgacttgttatatctacactcttgcaaaacaaaaacaaaatcccgacccatccaaccatgaagattcaaaagcgaagacatctcagcacctactagtactgtatgatctatcatcaactgatacacgaaggaacaaattgtgaaggggtatgatgcactaattgtatatccaactgacagatcacagctccatctcccttcgtgtcgaacacaatactgttcaccaaacctaacaagcacaaattagatggcacacggcatcagccagaggatccggtcgctccttggccctttggcatcctagagccatccatcccatatgattcatgtttgcccacctcatctagtgcatgttggcatggtaggctagcatcagcctgccacagcactcactctcactgtgtggcactgccttagttaacaatttcagaaaaaataggaaaagctgttcatctacattagacaaagttcttaagtttaccttaattaacaaactagtgtattctttattcttgttttgagatcaacatctaatcctaattttgagtatagctgcttcaacaatacttttaagttagcagattaaccacttcatgtgatgttgaacatgaagggatacatatttgttcatgcaaaattagattccctaaacttatcaagacttgactatgcattgaaaattacacttacaataagaaagaactaaattgattggtttcttggaaaatggaggtattaatagtatggtttcttggaagatggaggtatcgatagtacctatgtgacaacaataaaacttggcccaaaaatctattttaggaattgaaaatgtgtacaagtgggtaattctcacattgtttaacaaaatatttaagtagatcaatcagaaaacaagataaataaagtatagtgaaagcattcttttatgaagcacatttttaaaacttaagttacttttgtttcagtgctaacattctgacaagttcttggccctttggtcgagttcagtctatgctgtctataccaaacattttatccacttaattcaaaatatgcagctctctgtcgtttattttctaaaaaaaataaaactaacatcatttctggcttaagtattcaaccaagggttagcgagatatttaactatttgccactcttacaagtggcgattaaggatttgccgctggaccaacatgtcataggacatgagggcccacatgtcataaactgtgagtggcaaatccttaattgccacatcttaaaagtggcaaaaagttaaatgccccgggttgaacaataaccgacaacttagtaaatgcttatgttctgcacctggaggggaaaaacctattgtgaaatgtggaactaatttgcagtattgcattttccaagcagattgaaactagggtcagtatctgcctatgctaagttatgcataaaatcctgagaagaaatttctaattatgttccttcaatgcttcaaacctgttccccttaagtatctcttcagcactgccctcatctattatgtcactcccactcctccattgcttattataccactcccactcttccattgtagggttagtctgataacaatttggtctcatgtgcttcagttaacctccactctgtatcgtccattctacaactcctcctgcccccttgctattacccctccaggggccactaactgaggctctgaaactataaaaaattctcactcaaccttgtggcaacaagtcatccagaaactcaaacatttggccattgtcctcacaattttgtcactctgtctaattcttctatagttagctttatgatattattatttcttacattttttttctcgaaaacgcaagagccatgcgtttcatttcattaagaataagaaagagtatgtacaatagggtgattcacaaggaacactctggagggaagagaaaaaaaaaggaagaaaaggtctcgccgaagcgatgtgcaacaactcccagaggagctaggttcctaagtgggaagtgaccgggtcatgagttcatggagagctcttgccccagcagtgcaccataacataatagcagtaatattttgcatgcttagtagttttttctgttcaatttatcttttgtgcttaagaaaatgtatccatgattgaaagaaaacgaaattcacttttttcctaaatgtcgttaatttgcaatttgggacaacatggttcaaggccagattcaagtagaaagccataattttctaggccttttcatctaaatctaaacttcttggttccaacaaatgctactcatataatgcagatgggcatgtcatcagcatatgcaacttatatatcattatcttagagacagcctatgaaatttgttagctcggttattgtaccactaatataagacagatattttacaatgcgctgtttgacaaatgaccacctcttatatatccttgtcttttctactaagatgctttgcattgccaccatgaaagaaaaggaggaaaaccatggccctttaacttcaccaacttcaaaatggaaatgttgacccaaaaaaaactcgaatgaaaacagagagcctcgtaacatagtagctgcaagcaaaatcctatcctatcactgatacaccaagcacaagaattctgtccatacaagtgctatagcatatcctaacaaataatggaactattccttaattaaccctaagaacatcgggagcatgtagattaaggagacaagttatcatattaatggtagcaaattttaataatttttataaactttctaaaccaatgtggaattacaggttcaagaagaatcagtttgacaaatgccctatagttacttaactatatcaactaccattcagcagccccagcccctcatatgaactgcaatttgtttaataagagaagaacagtttaactctgccgtgataaacctaataatacgatttagcctaacactctccctagctatattcaaaagccccaaacttctccaaacaatatccatcaccatgatatcaatcgatcgttggcaaatcaatgtaattcgtaaaatttatgacaagaaaatgaaaattaccttcacagggatgtcgaaacggaagaccctgacagcgccgaccacctcggtcacgatctccagcggcagggaccccgcggcgaggtccccgatgaggtcgatgacgtcatccacgaccctcccggcgtccacccacacctcggcgtcggcgtacgtcgtccctctggcaccgagctcgccggatccggggcgcgcggcggcggagccgaggaggtggccgcggtaggagacggcggcggacacggcgcggtatcggagcgggaggacgaggccggggttgcggacgcggaggcggagcgcgaggtggagatcgacggacgggagcgggggcgggttgacgcggaagcggtcgaggcggagcccctcgacgcgggcgacgggcgcggacgggtagaggaggaaggcgaggccggcgaggagcgcgaggaagaggaggagcgggagcgtgcgggcggagaacgcgcggaggcaggggacgcggcgcgggcggaggcggcggaggcggacgaggaccggggaggtgaccgggacgaacaccagcgtcggcggcggcggcggcggcggcggcggcggcggaggcgcgtatgccgccgcggggaaggcgtagtagggctgattgggcggcgggaggaggggctggccgagttgcgccgagggcttctccccgtcgccgtcgccgtacgccgccgatccgtacgacgccatcgccggagttgcggttgcgagacggtgacgagtcacaaagtggtgagatcaggaagagagagacgaggagggttgatgctcctgtcgtccaatgggagggcgccacgtgggtgacttagagtgggggagacgaagggaccaccggctacacatttgtcgacaaattttctcctaaaaatttgacaaatataattataatacaatcgttgtgtaattatactgtaacttgtatgtaattacactgtaatttgcatgtaactacagtgtaacttatatgtaagtttccgtaattttgaattgttagatctattacaagatttgttctggtgaagaagaaaaaaaatcatagcacacacatatgtaaaaggatttgttcccacgatctctattaattttaccgaaataacatgttacgaagagatttttaaaagttacatacaagttacattatagtcacagtgtaattacatgtaacttacaatgtaattacagtacgattctgttaaatttttggaggaaaatttgtcgacaaatatatagcaaaattgaagacgaaaccttagatgggccgggccgggcagacgttgacggcccatcaggcaaaaattctggctcgccgccggcgacatgcctcgtcgtcgttctgcgctccggcgatggatacggcgagagattaatgtactgttaattttttagaggaaatgtactgttaattataattatcctgctttagcaaggtatttaagctggtttgttggagcaagctactggctccaaagtggccttcagtacgtatctaacccatatatatctctcgagttaccgtgcactgctttctttttgttagtggtcagtaattttgagtggatgagtaattaattacagcaagttacttgctctaaagcagctttagccggtccaagtacacgtgtcctcagttcctcactgttgtcttctctgccatcctgtatatatacatggcagcatcagcatcactctaatcaaattatcgaactgcatttttcattataaactctaaaccttaaacctcaaaaataatggagctcatggctagagtgttcctgcttcttctcctgcctctctcctcctccgcggccaccgccgttgccgcccctccgcctcctcgatctcaagctcaaaccgccgatggtaatggtgtgttgtcgaatctctcttcttgcaataaataattaacagtctcaacttttcgcttatacttatacttacaagtgaaaatttaaatttttaatataaatttggaattgattttgatgtctttttatcatagtttatttttcagcctttgtttgtaaattgttaaatacatatatatatatatatatatatatatatatatatatatatatatatatatatatatatataaaagttttatttacaaattatttttcatttataaatatgccgaataagccaaacgatgcggctgtaaatctcatggctgtgatgtttgagaatgtaaggacaatggcattttcaggcgtgctggtgaacggcaacttcgcgatgagcccccggaagatgaacgccacggtgatcgtcgggagggactcgctgccggggtgggcgctgcgcggccgcgtcgagtacgtctccggcgggccgcagcccggcgggatgtacttcgccgccgcgccgggcgcccacgcgctccgcctgggagcgcgcgcgtcggcggcgcaggcggtggcggtgcgccccggcgcggcgtacgcgctcacgttcgcggccacgcgcgcctgcgcgcgcgacggcgagcgcgaggaggcgctgcgcgtcgccgtgtcgccgtcgttctccgctcccggcgacgtccccgtgcgcacgctctacggcgccggcgccgccgacgcctgggcgtgggggttccgcgccgccgagaggaacgcccaggtcgagttcagtaaccccgccgccgccgacgaccacgacggcgacgacggcctcaactgcggcccgctcctcgccgccgtcgccttcaaggagctcccggcgccaatgccatccaaaggtaaactaacccaacgccatggcatccatggaaggtgaccttcctcttcttggatttgacgacgccattgctggctgcagacaacctgatccggaacggcgacttcgaggccgggccggcggcgatcccgaactccaccgccggcgtgctgctgccgccgaagcggaaggacgcgacgtcgccgctgccggggtggatcgtcgagtcgctccgccccgtccgcctcgtcgacgcgccgcacttcgcggtgccgcaggggcagcgcgccgtggagctcgtcgccgggcgggagggcgcggtcgcgcaggtgatccgcaccgcaccgggccgctcgtacaacctctccttcgccgtcggcgacgccagggacggctgcgagggcgccatgctggtgcacgccgtcgtcgtcgccggcggcggcggcaacgcgacggcgaaggcggcggcggcggccgtgccctacgcgtcgcgcggcggcggcggcgccaggcaggccagcctgaggttcgtggcgagcgggcggcgcgccagggtgacgttctacagctcctactaccacaccagcgccggcgacggcgtgtcgccgtgcgggccggtgctggaccaggtgaaggtgcagccattgatgacgaaagcttagcttaagctgtcgtcagctcagctcagctcgtcgtaatcttgcatgccttgtgttggctaatgttaatctgtggtttttttttgtttttattattttttaggtaaaatttgcggttttttattgatgttgtcatgaattaaaatgagtgcaaatgtgcaacgtagcaggatgtggctactggtacgtgattagcgatctcgcgtgacatttgaaagctgttttcacgtttcatgaaatttggaagctgttttcatatttcagtatgaaatagttctgtaattcgttcaaaaaatatatacgtttgctggtaaatctatttcacgtactccatagattatactgggctagttttgggccttttttttgttggggccacatggatctgaacttgtgaaggaaattaaagaaaaaaattggccatagtagaaggtttaacaaacaaacggttcatgagaaaaatccaatctttcagtaccatatgagtgccaactggcaactgccaactgcgaacggtttaaggaggcacaaaactataaattttatcaaatttatcaccatactatatatttatggagtatcttgaaactacaaatttagcaatgaagttataaaatatatagattttagagttgagtttccttagcattgttgtcccgctggagttataaatcttgtaatattatggtaaaactagcatcaaacatgtattttctaattcgataccttaaatatgtagctgcgataaacacaacaatgaatttgttgttggatgatataacgacttatacatagttttatcataatttgttcaaaatatatatagttctatgaaatttacttatcagttcagttcctgcaaagctcctctgttccaaaggagcacgaattttggaaggatttaagcaatcttgaatacaattatctgtgctatggtttatagtctgaatttgaagttattgactccagcttatatcttctttttttttatttggtgtgttctacttgttttgaactacactcttttctagagtgatactttgtaataattggttgtagctctttttaacaaataccgggatattatattccattatctaaaaaatctaaccgaagctatggaaaataattttataataagaccttttatgtttgtactcttaaggtcgaaaggtaatgatgaatgaaaagactaaagaccaacgaaaaatccctaattttaattctaaaagtttaaaaacgattgtggccaaatcatcatgctgcatgcctactagacattcatttccaaccaaatccagatgaaatccccacatttcaaatcgaggagacgccctcaatcatcgttgccgcggaaagtcgcaatcgcttttgtcgcacccaatgggagaaggattgatcaaagataggaacccagcacgaatcattgaccgacgcgattttgacacgcagaatctgtcgttgctttcatggcccctcatcgtacactaggcaatttaggaggagtagagtggagtaccaattaggcaattaggacttcacttggttaaaaataaaactagagtttattactagttgctagtaattgttagtactaatattacagttatcaatctatgcattaagaaacatatatctgtctagtatattattagatggctttaaaaaaagacaccatgttcattttgaggctaaaaattttcatattaattgaagaaaaaaagacagtaatataatttagaaacaactaaaattcggaatataaaataaagaatattgagaatagaatccatataaaacccaacacgagattaattgagattcaaattaaaaaaataaattctaaaattggatttcaatatgagtttcaaataaacttaaattatcattaaaattatctaaattatcatccattaaaaccataaaaggagtccaatgacatcttaaactataaagcagaacaccaataacgattatggctgatttttaaaattgtaatgactataaaaaggagagatggcgggcaagccgtaaaagggttgagcggtgtcggttgacaggactttaaaaacaaacaaaagaaacctaacgatgatcaggtttaaattttaaaatttcaatgacaataaaaaggaggggtagcaggcatgttgcaaaggagtagtgtgacggcgttttatagaacttctaaaaatataaaaacggaatcggtgagacaatgaactctaaaaactaataaataaggtttgatttttgaaaggtttgaacgatagccatgacatgccgataaatcaagtaaatggacggcaaaggaataagaggtggtgactggcgtcacttttactataaatttagaaattcgatgatgatatgtttgtttttcaaaaaacttaggacaatgagatgagtatttattttaaaagaaaaccatatataaaatagttttaaatgagtgctagccacgtagttacgcgggatcaacatactagttgacctaatttcgtggctcatcagcctcccggaccaactcctgagcgatagcgtccgatcattgcctttgtaagctatctcaccaagtcaccaactatcatgccagaatgtctgcgaaacatggctgaatctcacaagtgcattgtcgtcagattttctccaatcaggcagcaacttgtccgtcattgtttcgtccaaaaggttcaagcccaagctgccacgaaagggaccattggattcagaagccgtacatacaaacacatagagatgagaccagatcactcatcaacaggtccacagccaaatgggccagggatcccctcaggcattgatagtgaagaaaaaactttacagaagaggagaccactctacactatctgtggaatgatagagagaaaagagaataggtcataggtgcacaagcacaagcacaaccacctcaaccaaaagctcagcatgtaatgggagcaacaggatgcctgaatttttcaaggtttccgaccagatttgtaatgtaccaaacattctccactctgcatgttgctagcagtacagcagccactgtgctcaaatctatgatacatactgtttggctgggacttgggataccccccccccccccctaatgaaggttatgtacaccgaagaagacggcatcgttggatttatataccaggatcgatcggtcaaccgatcgccaaaaaattaccgcacggggttgttgtttacgcttctcgtttcatgagcaatcttcacagctagaggatatgctgtccctgccctgggtcctcagctgttcttggcctcttgcagcatttccaccaccttcttcatcttgggccgcttcgctggggcgcgctcggtgcacagcatcgcgaccttgagcacagcaagcatctgcttgcgccacgcgaacgacacggtgctcagcttcggatccatgatctgctccggtgtctcacccctcgcgggggcagagtgcacccacttgacaaggtccataccctccccgaactcctcatccactggcagctttgacgttaggatctccagcagcaccaccccgaagctgtacacgttgcccggcacagtcacttgcattgtgtaggcatactctgaaatggaggaattgcaacagcaacatattgttatgtttgtgaacaaaaaggaacttgtttagtggtcagttgtggagcaaaattcagatttcagacctggaggtatgtaaccgaacgaaccggcaactgcactgatgctagcagtgcccttcaaagggtccagaagcttggagatttccacttcaccaagaagcgcattgtagtgcgagtcaaggaagacgttccccgaagagatgtccaggtgaatggtggcgacatgatggaggaatgccaacccttcggcgacatcgatggcaatcgacaacagccttggccagtcaggcttctggttgtcaccgtcagggttgtcgacattgtgcagcagctgaagcaaggttccattcggcatgtgatggtgcagcagcaacgcgacgtcctcgtagatgacatacccaatgggacgaacaaggtttgggtggttgatgtgcgaaagacactcgagctcccatatcatctttgtctggtgatggataaccgcacgatcaactgacttcagcttcttgacacagactaccataccggatggcatgacggccttgtaggttatgctgaatgtcccattgctcacaacattggcatccttgaatgttgccttgacacaactctggaagtcgatagcctgctgcaagctgtcgatgaacatgtttgaggccatgacctgcggcgctgccactacaacctcccccgcctcagccatcttcgcttcagcctccttctcctgcctctcacgccacatgaacaacgccaccaccaacgacaccacagagaagatgagcacgcaggaccccacaactgccaatgccaccctgtaagatatcttcctgtggtccattccatagctggatccataaattggcccgcagtctacaaccagcgggttgccacacagcttggtgttgccggaaaagctggacgccgcgctcttctggaatggagcaaacacggggatggcgccacttagccggttgttcgacaaattgacctcaatcaagctcagcatccctctcatatcacctggtatctccccggatatctcattgctcgacaagtccagcgcgacgagcttatcaagccgcccaagctcacggggcagcggcccgacaaggtggttgaagctaagattcagggcaatctgcaagctcttgaccctgccaatttcagccggtatctcaccagtaagattgttgtttccaagttgcagctcaagaagccggccacagccgccgatgccgaccgggatgccaccggagaactcgttgtgatcgagcaaaaggaattgcaacctcgacccgttgcagacgctctccggcaagccgccgcggaacgcgttgtagctcaggtcgagcttgctgaggttccggcacctcaggatcgacctcgggaactccccggagaggccgttgctggagacgatgagctcctggaggctcctgagctcgccgagcacgtcggggacctcgccggcgaggcggttgtaggccaggttgagcagcgtgaggttggcgcatcgcgcgagctgcgcggggatcccgccggtgagctcgttgctgtcggcctcgaagtaggtgaggctggtggcgtcgccgatggacgccgggatggcgccggcgaggcggttgttgccgatgcgcacgttggagagggcggagcagcggccgatggtgtccgggatggtgccattgaggcggttcacggtgaggatgagcacctggaggttgccgaggtcgaagaggctgctcgggatggcgccctcgagggcattggagtggaggttgagcacctggagcttggaggagaggccgaggccggaggggatcgggccggagagggagttctcgtaggcggagaggatgcggagggcggggagcgcggcgagccagggcgggatggcgccggtgaggttgttgccggaaatctggagctccgtgagagccctgagcgacctgagctcgtcggggatgccgccggagagcgcgttgttggagaggttgaggaacctgagcccgacggcgccggcgagggagggcgggacgccgccggagaggtggttcatcgacaggtcgaggaactcgaggccggggagcccgcccagcgcctcgccggggacgccgccccggagcgcgttgaacgacaggtccagccgcgccagcgcccggagccccgccaccgccgagaagtcccccctcagcccgcgccgcggcaggtcgatcgccaccaccgcgccgccgccgccgcccgcgcacgtgacgccccgccacgcgcagtagtagcttcccttgccgtcctccccagccgcgccccagtccggcggcgccagcgcgcgccgcagctcccgcattgcgtccccgtccccatccgccgccacggcggcggccacggccacggaggcgccaagaacgcaggccaagaacaagaacgcggcaggcggcggcatcaccggtggtttcttggctttcttggcgctgcagccgccgtcgacgtgctcgctccggcgaccgaccaatccgccgccgccgccgccgagctcctcgcgtctccccttctctcgtgaggaggagacaggagctgtggctgcagcacagcagctgcctcctagctagctcacacacagcctcacactgtcactcactcaggtcacacacacacacacacacactctctctctttctttcatgggagtttttagagagagaaagtaggggaggggatgggagggaaaggtggttgaaagaagnaaaaaaggaagggggggggggggggttgaattccactgtgggtcctcaaacaggggggaggggcactgttttgtgggattgaggctatgtcaacacatgggattgtacactgaaactattgaagccccaacagtgtgttacgggtaggattgtgtctatatattggttcatggggcgtggtttgaggtcgggttttatggtttgttcatgcggacggtgacgataggttaacggtggtttagagctttttttatgtatattctgatttacgtactaggtataatacggctgagtgaatgcaaatggtgtaaaatggggtggttagtccgatcaatctattgagaagagactagtactttttaaaagagggtaattcatgatacggatatttcacgtttgtctcgtgaaagttatatgcttgttgtgaaatttggaatctaagtcgtggagggatttttattcaacttatctgttgtggaatgagattccctttacacatactaaagtgatagcgacaaacatgctaagctttgttggcttagtcgataaatcacatcaatgaccatcataacaaattgattcaagttaggaggctatcacttttcattccttatgtctccattgaaaaggggattctacatgaaatttaaaagaagtgactacattctaagaaaatcttgtataaaattctcgtgtcgaaatatccttaaataaatgcctccttgaaaggtcacatcaagtctcaatgttataataatattatttaagagagtatttttttgaaagaacaatttattaatttaccttatggtattaatattattcatggaaaagaaaaaaataacctcattttatcactatgaaacttgttagctacaatagtgcagctgcagtccgctgctattttcatgctttagaaactgttcttgctagctacagctgcaccacatttcaagtagcgaaaaaaacctatgagtttaaaatactactccgtaaaaaaaaaagaccaacctaatattagataatatataatctaatataataaatttagctgtaggctggctttttattgaggaaacacttaagcttgaatctttttttcaacaatcagtaggatagattatgctgagtctgaatggtcaaaaactcaaatatctgcggtagtccggtgcacatagcattttgtggacggacatagtgaatttctcggctgttgagccggtgaatctttgtgctctgttcctttccctaccttgatttgatccaaaacagtcacagccagacaattaattactccgattaaggcgtacggattgtcttaagtctactgacattaagggtgcctttgtcctcggcactgatgaaaggcttcccctggttagcatgatgctgatgtaatcatgctggttactctcttaattaaccaattctctttccattgctctctgtgattaagtgattggtagtaactacgtcctcataagccataatttgattcctctttttttttatcaacctttctggaccatttcatcagctttgcagatgaatcgattccctgggtgactaattatcccttgtgcttctaatgacagccactaaccatcatgattacaattattttttggcaagaccaattgagcaaactggttggctgaaaacatgatggcatcttttgcatgctagctctcaatacaaggagaagaaatcattctccctttctagaggttaggcctaacaataaaaaggttccttttgtgcatggaaattattagtgatgtcaatgcattttttttagataatagtgatgtcaatgcatatgaagactctagtactcaattcacaagtcattgatggtgtatgtgctctggcatgcatcatttggtcgtaatctgttcataatttgaggctacattttgaaaaaaaaaattctggaaggccaacttacaaaaatccctacatttttttaacattgattagggactaatttttttcacgtcgcctcttctttctttatttcttttagtatatatatgccttttcaacacaacccaaacgtattgtcttttgcatgtctctaactctttttcaagagaaattttaacaaatgtctctaactctttttaacacatgtttaagataatatacatggcatgagaaatatggaaaacctacttctttaattagctaatgactgattatctacatgccactgtagtcttgtagattgttccatgtagtgtgttaatgttgcacatactttgtactgtgtcccttctgttgcacaaccttagaggcagggaagcacttgaatactacttgatgctaggtttgttaaggtgcattgaatacagataggttattaattacatgccctgctccctttaattgcttttagtttgctcccattataattgtttttagttccatggagtggtagctagctggagctgcccaagtttgtcaccccttgaaacagggaatttttgtcctgtggagaccaagcaattctaaaagttaatacaaaatattatgagaagttaggccaaagaacaaaaggcttccttttgcattggattgtttttatggtattttgtcaaggtatatatacccttatgttgaccacttgtctatatcaaaacattgtctccacaagcttaaaagaattggagtgagtgttatgtaaactattgggttgacagctcgatagtccattcgtttaaaatatgaggtgttcatgcaacctatcaccttacatattacgtctcgtttggtacacttctatactatacagaaagcatttttttttacatatagctataatagatttttgcaggcggacaacgcaaccacttaccccgtatatgtacaaaataacattttgccatgcaagcaacacgaaaaatgattttcgcaagtggtgagttatgtcgtccgcctacaaaaaggatcgaaaaaaaaagaaaatctaaaagctgaaaccctagctcaaatccaccctagccacagtcgttgtcgagaccccaccgcacccaacgttactggcggcggacatgccactcccaagatcagggtctttggatccgccaccaggcagcttgccaccatcattttcatcgtcggattcatgagaagggggaggcctgcgacggtggatccgcgcctcccgctgccatcgctgctggatctgtgagggagggagagtctggcgacggcacaaccgcacctccccatgccgccgccgccgccggacccgtgagggagggggagtctagcgacggcagccacctgcccttgtagcccttgccagattcatgagggggaaagaattcggtgacggcggatccacgcctcctcgtacccccactgccagatgcatgagggaggggaaggtcggcgaccatcgatccgcccctccccctgccgccgtcgccggatccgtgagggaggggcaggccagcgacagtggatccgcgcctccccttgcagctattgccggatttgtgagggagggggaggccgacgatggtgggttcacgcccctccttgctgccttcgccatattagctcgaggccgatggccactgtcacaccctgcagttctcctctcaagcctaaaatttaatttataaatgaccctaagaaaatgccggtgcaaatcaagagaaaaccctaagaaagtaatacaaataataatcaaatctggcatgcggaatttttcttgagttctacatgtcgaaagtcactaacaggatttttagtggaattttcagagccctagaaataattttaaccaattaaaattgagcaagca

SEQ ID NO: 10260 - DNA, 54952 bp, Oryza sativa
  unsure (1)..(54952): unsure at all n locations
aactcgacctgggcgttcctctcggcggcgcggaacccccacgcccaggcgtcggcggcgccggcgccgtagagcgtgcgcacggggacgtcgccgggagcggagaacgacggcgacacggcgacgcgcagcgcctcctcgcgctcgccgtcgcgcgcgcaggcgcgcgtggccgcgaacgtgagcgcgtacgccgcgccggggcgcaccgccaccgcctgcgccgccgacgcgcgcgctcccaggcggagcgcgtgggcgcccggcgcggcggcgaagtacatcccgccgggctgcggcccgccggagacgtactcgacgcggccgcgcagcgcccaccccggcagcgagtccctcccgacgatcaccgtggcgttcatcttccgggggctcatcgcgaagttgccgttcaccagcacgcctgaaaatgccattgtccttacattctcaaacatcacagccatgagatttacagccgcatcgtttggcttattcggcatatttataaatgaaaaataatttgtaaataaaacttttatatatatatatatatatatatatatatatatatatatatatatatatatatatatatgtatttaacaatttacaaacaaaggctgaaaaataaactatgataaaaagacatcaaaatcaattccaaatttatattaaaaatttaaattttcacttgtaagtataagtataagcgaaaagttgagactgttaattatttattgcaagaagagagattcgacaacacaccattaccatcggcggtttgagcttgagatcgaggaggcggaggggcggcaacggcggtggccgcggaggaggagagaggcaggagaagaagcaggaacactctagccatgagctccattatttttgaggtttaaggtttagagtttataatgaaaaatgcagttcgataatttgattagagtgatgctgatgctgccatgtatatatacaggatggcagagaagacaacagtgaggaactgaggacacgtgtacttggaccggctaaagctgctttagagcaagtaacttgctgtaattaattactcatccactcaaaattactgaccactaacaaaaagaaagcagtgcacggtaactcgagagatatatatgggttagatacgtactgaaggccactttggagccagtagcttgctccaacaaaccagcttaaataccttgctaaagcaggataattataattaacagtacatttcctctaaaaaattaacagtacattaatctctcgccgtatccatcgccggagcgcagaacgacgacgaggcatgtcgccggcggcgagccagaatttttgcctgatgggccgtcaacgtctgcccggcccggcccatctaaggtttcgtcttcaattttgctatatatttgtcgacaaattttcctccaaaaatttaacagaatcgtactgtaattacattgtaagttacatgtaattacactgtgactataatgtaacttgtatgtaacttttaaaaatctcttcgtaacatgttatttcggtaaaattaatagagatcgtgggaacaaatccttttacatatgtgtgtgctatgattttttttcttcttcaccagaacaaatcttgtaatagatctaacaattcaaaattacggaaacttacatataagttacactgtagttacatgcaaattacagtgtaattacatacaagttacagtataattacacaacgattgtattataattatatttgtcaaatttttaggagaaaatttgtcgacaaatgtgtagccggtggtcccttcgtctcccccactctaagtcacccacgtggcgccctcccattggacgacaggagcatcaaccctcctcgtctctctcttcctgatctcaccactttgtgactcgtcaccgtctcgcaaccgcaactccggcgatggcgtcgtacggatcggcggcgtacggcgacggcgacggggagaagccctcggcgcaactcggccagcccctcctcccgccgcccaatcagccctactacgccttccccgcgcaggcatacgcgcctccgccgccgccgccgccgccgccgccgccgcagacgctggtgttcgtcccggtcacctccccggtcctcgtccgcctccgccgcctccgcccgcgccgcgtcccctgcctccgcgcgttctccgcccgcacgctcccgctcctcctcttcctcgcgctcctcgccggcctcgccttcctcctctacccgtccgcgcccgtcgcccgcgtcgaggggctccgcctcgaccgcttccgcgtcaacccgcccccgctcccgtccgtcgatctccacctcgcgctccgcctccgcgtccgcaaccccggcctcgtcctcccgctccgataccgcgccgtgtccgccgccgtctcctaccgcggccacctcctcggctccgccgccgcgcgccccggatccggcgagctcggtgccagagggacgacgtacgccgacgccgaggtgtgggtggacgccgggagggtcgtggatgacgtcatcgacctcatcggggacctcgccgcggggtccctgccgctggagatcgtgaccgaggtggtcggcgctgtcagggtcttccgtttcgacatccctgtgaaggtaattttcattttcttgtcataaattttacgaattacattgatttgccaacgatcgattgatatcatggtgatggatattgtttggagaagtttggggcttttgaatatagctagggagagtgttaggctaaatcgtattattaggtttatcacggcagagttaaactgttcttctcttattaaacaaattgcagttcatatgaggggctggggctgctgaatggtagttgatatagttaagtaactatagggcatttgtcaaactgattcttcttgaacctgtaattccacattggtttagaaagtttataaaaattattaaaatttgctaccattaatatgataacttgtctccttaatctacatgctcccgatgttcttagggttaattaaggaatagttccattatttgttaggatatgctatagcacttgtatggacagaattcttgtgcttggtgtatcagtgataggataggattttgcttgcagctactatgttacgaggctctctgttttcattcgagttttttttgggtcaacatttccattttgaagttggtgaagttaaagggccatggttttcctccttttctttcatggtggcaatgcaaagcatcttagtagaaaagacaaggatatataagaggtggtcatttgtcaaacagcgcattgtaaaatatctgtcttatattagtggtacaataaccgagctaacaaatttcataggctgtctctaagataatgatatataagttgcatatgctgatgacatgcccatctgcattatatgagtagcatttgttggaaccaagaagtttagatttagatgaaaaggcctagaaaattatggctttctacttgaatctggccttgaaccatgttgtcccaaattgcaaattaacgacatttaggaaaaaagtgaatttcgttttctttcaatcatggatacattttcttaagcacaaaagataaattgaacagaaaaaactactaagcatgcaaaatattactgctattatgttatggtgcactgctggggcaagagctctccatgaactcatgacccggtcacttcccacttaggaacctagctcctatgggagttgttgcacatcgcttcggcgagaccttttcttcctttttttttctcttccctccagagtgttccttgtgaatcaccctattgtacatactctttcttattcttaatgaaatgaaacgcatggctcttgcgttttcgagaaaaaaaatgtaagaaataataatatcataaagctaactatagaagaattagacagagtgacaaaattgtgaggacaatggccaaatgtttgagtttctggatgacttgttgccacaaggttgagtgagaattttttatagtttcagagcctcagttagtggcccctggaggggtaatagcaagggggcaggaggagttgtagaatggacgatacagagtggaggttaactgaagcacatgagaccaaattgttatcagactaaccctacaatggaagagtgggagtggtataataagcaatggaggagtgggagtgacataatagatgagggcagtgctgaagagatacttaaggggaacaggtttgaagcattgaaggaacataattagaaatttcttctcaggattttatgcataacttagcataggcagatactgaccctagtttcaatctgcttggaaaatgcaatactgcaaattagttccacatttcacaataggtttttcccctccaggtgcagaacataagcatttactaagttgtcggttattgttcaacccggggcatttaactttttgccacttttaagatgtggcaattaaggatttgccactcacagtttatgacatgtgggccctcatgtcctatgacatgttggtccagcggcaaatccttaatcgccacttgtaagagtggcaaatagttaaatatctcgctaacccttggttgaatacttaagccagaaatgatgttagttttattttttttagaaaataaacgacagagagctgcatattttgaattaagtggataaaatgtttggtatagacagcatagactgaactcgaccaaagggccaagaacttgtcagaatgttagcactgaaacaaaagtaacttaagttttaaaaatgtgcttcataaaagaatgctttcactatactttatttatcttgttttctgattgatctacttaaatattttgttaaacaatgtgagaattacccacttgtacacattttcaattcctaaaatagatttttgggccaagttttattgttgtcacataggtactatcgatacctccatcttccaagaaaccatactattaatacctccattttccaagaaaccaatcaatttagttctttcttattgtaagtgtaattttcaatgcatagtcaagtcttgataagtttagggaatctaattttgcatgaacaaatatgtatcccttcatgttcaacatcacatgaagtggttaatctgctaacttaaaagtattgttgaagcagctatactcaaaattaggattagatgttgatctcaaaacaagaataaagaatacactagtttgttaattaaggtaaacttaagaactttgtctaatgtagatgaacagcttttcctattttttctgaaattgttaactaaggcagtgccacacagtgagagtgagtgctgtggcaggctgatgctagcctaccatgccaacatgcactagatgaggtgggcaaacatgaatcatatgggatggatggctctaggatgccaaagggccaaggagcgaccggatcctctggctgatgccgtgtgccatctaatttgtgcttgttaggtttggtgaacagtattgtgttcgacacgaagggagatggagctgtgatctgtcagttggatatacaattagtgcatcataccccttcacaatttgttccttcgtgtatcagttgatgatagatcatacagtactagtaggtgctgagatgtcttcgcttttgaatcttcatggttggatgggtcgggattttgtttttgttttgcaagagtgtagatataacaagtcaaataatgggcaataacctcttagcattgcccatatttcaattctcaattggttagataagtcagaataccaacctaaatgctgaatcctctacactctacagcactacagcaggactgagctagctcttttcttaatggaaaaatatgtcatcccatcattttctcaaagagtgttttaccatgaacttcttagtagtggtggtgtacaactgtagcattatacatttgcatatattttgtgttaaaccgctaacatttttactaatccaggggctcataacatgctcagtgaatgtcagcccagatactcagaaaatcataagtcaggattgctattgaggtaatgccttgatcttctctcttatagtttgtactgcattagtttttaatgcaggttatgagtaacatatcaggattgtcttatactgttgtatcttttgtccagtgacaatgcatttgggcctctgatgtaagatgggcgtgcaattcatacctatggtttgcagctattatcaagttgcacggcctgctctatgaaactgcttgagtatgtgtatgtaaatagtttgtagcatgttattctatagacatgaataataattatacgatcccatcgaatttgaccactctctgttttaacctattccaccactaaagaatttttatagcattttataaaatgctatatctgtattggtaaatactaccttaccgaatatgtaacatagccaatatagcagccagtcatggtgtacgatttgacctaaacatgtatggtgtgattgtaactcagtaatttaagatttgcaaaatttgaactcagtaatttaagacattcataatttgaatataagtttgacaaccatggatgtttgctccaaaatgcttaaggtttcaacatctggtccagtctgtctaacagtctgtatacatattctttttctgcactcaataaaagtttggaagtcctgtagctgccacttttttttttttttggtattgtgtgctgtgctaagcacgtcagtatcaaatggagaaggcaagaagggttggggtgatgaacctttccttgcagctggaggtttagacccaccatactaataatttcgacccatgagtattcatcacattctgattgtgcaatagtcctgtccttctggtcaaatggaagaagcagaacaatatgggcacaggtacgtgcatctgactggaccttatcttgttctgtacccattgttgtgtcgatcacgcaaatgtttgtgatcatgcacaacaaaaacctgaatatacacagtctgcttttcccccccatctgctcgtatttcaggaaagagaaaaaaaaaacatcagtgtgatggtccatgcacgtggttcctgcactacacctcaccggatcacccagtgacactgtgacagccaggcatcacctactcttgcatgtgagttgtttctctcacccttctgactgtcccaaatgggtcacttgtatagtatactcacttcgtcctatgaaaaactaacctctgtagatgaatctgtacaagcatttattcagattcatcgttagaagttattttttttttcacggagggtgtatagagtaacattcacgtgcaagcacacacatggggtgaccttttctgtctgtgaaagaccctttgtttgtttacactgtatccacatcaagacaaagactatgcttttgtagccaagttttgcaaccaatctaccggtggattttttattaaaaaacctttttaactatttaatttttagttttaaaaataaaccctctcaaaacttatttctgaatctgaaacttttttaccacgccaaccaaattgttgtgacaagacaatactatcatccaccggtgcaaatctgctaccagcaatactgtcaacactcaacatagattatctaaaccattgattcatatgctcttctgtcagtagaaacaatattattaacccacgaattctaatggtaattatggtgatggcataaataggtttgtttcgttagataagaaaatgtggaaggtccaaatcatttctactatgagtatcagcaaattaatagttgtcacgtgtttgagttagtgaagttacggttgcctctcaaacaatccaattccggcagcgtaatcaaacaatttgccagtacttgcccgttgatatcaagcactgtagcatagacccaaactatttcaaatccgtcaaatttataatgcaatatatccaaataacccaaatcaaaactttggctatctgcctttgatgatagagaggatcccggtcccagtggtagaggtactgttgtcattttctaattgaactgatatgccataccacgtgtaacgcacagtgccagaaccaaaacattatggacatagaaaatgggatagttgcagccagatctccaacaaaatatataaaaagggaagctaaaagacaattatatcaacaggtctgatgtctgtgctagttgcatatttgatcatttgggtagctagatagatttcttttttggtatgttatcaagcaaataataattccaatgaaaaagcaaatgacatgaaacaaagaaaaaaaatctaattaaatattttgttggttgctaggaattgcattttcactgcccatccctgaggacacttagccatcgaacagtaaatactggaataagacccataaggacacccatgctaccttctggaaagaaaacattgctattagctagcatcgtttgcttgtctgaacactcctttcccacgcacgaaaaaaatggtccattagcatatctaacggcagactccgtggaaccaattcgctgagtccggtgacgtctacaccaagatctacggctcagcaccaaacctccgatttgtgtcgtttccgtggtgacagctgtaggagccttccagtctgtcaagcggtgagcatgtcaatggagacccaaggattcagtcgtcgcggctttgccgcagaactctgtcgatctgattctctactgttgtttagtctcatctggaagttagcttccttagattggttagcttctaccttgttagagatggcttcttgctttgctttaagttgtatccttctgcgatgtattggggtgtatcccctgctttctgtcttggttaataaagttgtttaagttatctaaaaaacatataattaattaaattagttataaaattcttagataatggattaatatgattttgtaaaggagctttcctatagatttcttttaaaaaagaacatatcgttgtttaaccgtttggaaatatacttgtgtggaaaatgagagagtagtagttggaaaaaactagttccaggaaaagagagagtaaatgttaattagcaccttatatattggatttggtaccacactagcgctttttaaaccctatctgccacaacttttatttgtacaaaggttcatcagaggtagctttcaaagaagttctaagacggcaacaccgaagaattcagtctgattttctggcatatggtactgttgccatcctgaggacaaaggttgtgctacatgcagcatacgtacgttgtgtatctggatagctgtagcagctagcacagcattgcattgtatttgtgatgtatttctgaaatatgctggatattagagaaatatctctcatatccaaatttattaaaagagaagcgagactcgttagcacacataccttatggtgctaaccgaaatacccgaacctttcttatatatttctaaaatagatatacagatgcagaatcttttgttggtttccttgtcgcaccctagctttgctctgcactcacgatctgatctgatctgccgatacatttgtcctcagccgtagtactacttactctctccattttaaaatatagtaatttaatattaaattagacacattccaatattataaatttagatagatcatatctatcccgaactttagattcgtaatattataatatgtctaatttaatattatattagtatattttaaattataacgaatgtagtaggaaattatcatctctggtgacagctgcggtaagtatataccataccatgatgccaacatccatgacccactcatagcacatgtggctcgtagtcgtgtcaccattgtttctgctatatctattgtcctcgttttgaacaggaacatacggctgcttctttatatacatactactttcgtctcgtaaaaaagccaaactagtactataaatttagatatatgtatatctaaattcacagtattatgatatgtcacatccgatactatatactagattagttttttatacgaagggagtatgcagctataataatctaggaagatcttgaagatccaagtttattgggagaatattgttagtatcacattcggccaaagagcaatgagaagatgggcggtataattttagagaaggcgtgaaggtaagtaaaggaagaagagggacgacggtagtggcgcaagagacacatgatcctctaaggttgatgtcatgtgactttttttatggcaaaaaaaactcggatttacatgtcagaaataaagaagttgtgacttcaaaatcagaggatcctaatttgacgtgagagacgaagatgagatcagagaaagatgaaggctaatgaaggacaaaccacataccaccatcattataattaggaaaatgtacgatttacccttggaactattgcggtcgatcgaattacacccttataaactcgaaagccagacattgtatacccttaactattaaaatcggacaaataatttactagagctgctgtacgaatacgaactacgctatctgccatccgactgcgttatggtacgtatatcatcttcgtaattttcacaaaatcgcccaactacctgcatgatgatttcatacacaccaaaacatgaattcaccgcttcaactaaaagcaatcaatgcaagttggattgatacgatagaaatgaaaaatatgtgtgaatctgattagtgcagtcagctctctccgatttcatgtcgtttttgcttcaattccttgtcagcaaacggtcgaattaagtagtactagtactgtactgatggtatacgccatttgtcgttaacaaagtactccctcgatttcaaactataatattatgataaatttgtagtgttggtatatgttcaatccaatactaattattatattttgatattatattatattacaccaaattaacttcagctatttacgtttttccttctttgataaatgaatacgcagctgcacatctttgttgccacggtctccttaattattcacgcaaattttacgatattttcagatgaattagttagttaaattccgttaggcataaaaacaattctcgtgtttcaaaggtggcaggccttactgcagtttaattgtgaattttatttataggtttgattaatttttccaactcaatttaccaatttctgataagtaaaaatttcatctgattgatgcgtgctcatgagtcacgagtagtgaatagggtggtgccccgttaccatctctagataaaatagtgatcgatcgctggctcaccagttcgactacacgtacggttaaaaaataactctattatatagtgtattaaagtgcttttaaaagtatatataaatgtagatgttcataatgtgtacataagcacactctatctctataatcatcttcagaagacaggtacgttacctaccataaaaaaaagttagttataaatataagtatccgtattaaatctagaaccaagggattaatgagttggtagggaagctatatttttgaacgcctaatatatcgctatggcgctatgttgttggtttgtgactattttatttcgccaacattgctatatttttggacgcacgacagcctagctatgatgtcttcaaaatgctggcttggcaggatccacctcattccaggctcttgccgcagcagcagctggacactgtttctccctgctagtactagctggttaccttttttaagctaagtacttgaccgtgcacattattttcgaattaacatataaattttaacttaatttttattaacatgttttttaaattgctaaataatgtctatgtgtaagttgctttgaaatatcgaacaaatctattttttaaatttataatatttaaacttaattagttatgcgctaataattttctagttttttcagctctactttatcttcatcttaatctatcgcaaacactatcttgcaccttattagaattagatgaagctatataatgctctactaggctctacggtgacagttcatcgtcgatgtgcatgtttttcttttctttctttttttttccttcgctgagatttttagtgtggctatataagctatgatgcgggacccaaacaatgaaaataattgtatagggctctaggattttatacttttacttttaacgacttgagttgatatgatgctgaaaaatagaaaacaacggaagaaagttgaaataactttaaaccaacctttatattttaaatatagctgaagcttgtaagctaaagagctgccaagaacatatatgaactatttggtttgctctagctccatttttcctgaagctagagtccaaccaaataattttagctttattcaaaaagaagtgaagctgacaaaaatgctctataaatgaactaaaaaggtggagctaggtttagacagctccactctaaaccccaactcatagagttaaatttgagagttggagccctaccaaacacgcattctatttggtaggcctctaacttataaatttaacttctcatttgatagggctcaatatcttaaatttaactttaggagttagggtttgaaatggagttgtggaggtggagctgcctaaacccagtttcacatctctagttcattttgtaaaagtatttcaaccaactccgctcgcattttgggtgaaactgaaaccgtttgattggactataatttcaggagagatagagctagagctatgcctaacaaacccttaatttatcaaatctcaatgtaaccatttccgattttatctacttcaaatggagtacaattgttcgctactttcacaaactccgatgcaatggttactctaaaattaaatttattttaaaacaaataaaatgagctaaaaataaacttattatgagatagaggaagtatttcgtagttgaagaagaatgatgatgcacaaatttgcatgcttggacttattttctcaaaaactttatttattaccatctcctctacgataaaagcacgcttttaaaagttttcagtgatgttagagcattttattagcctttgtcttttttaacatgtgttaaaagacatatttgaagtaggatgtgccatatatctttcatataatagaagaaaataaaattagaaaccataaattagggccctcttcgacataggcacgtagctctagatccaaaattttttgaaactgatattcgtaacttcataaatcgttagatctggattcacgattatattaataacatttaaataaatcattattttcctattatttagatgaaatccaaaattttagaacaaatataatttaacacacaaacttcatactcctatcaatacgtgaaaccgggcttaagtagccactccataataattcgttcaaatccaggtattttagcgtgcaagtctagttagtttagatactgaaagttttatcattatcttaaaaaacttaactagggattatcccatccagtatcaggttcttttatttatttatatatatatatatatatatataaaataatactccatctgtcccccatatatatatatatatatatatatatatatatatatatatatatatgggggacagatggagtattattttatataataaaaatagaaaaaaataatcaatattgagccgagatgcaaccccacgataaaacccacgcgagggagagaagccaccccatcctccccacctccctcctcgccggccggagttctcgtctccggcgaccgccgccgccgccgccctcaccgtccggtaagcacctcccctcctcgtcctcctcctcccgcgtccgctcgccggcgcacatgcattgctcctatcgcacgcatcgtctcggctcggctctgtcgcgatctcgagttccagacccatccccgggagagagaggagggggggggggggagcgccctaccgtcacgggatcgtggccctgctcgccgtgcggcctcctccatccatggcctgatcggcggctgattggtacaccgcatttgcggcctgggtgattggctagtatttttgttctttgtttgggggtgaaaagatgaggaggagaggttggggggaaagggacgggcaaaaaagggtgaagaaaataaatcatatccatccctttcgcactaccgtttgaattttttttggaatatatatgtgtgtggtttgttcggatttgggaggaaagtgaggaggtggatgctcctgatttccgtgaggaactttgctgctgttggttgcaggtggagctccggtgatcgacgccgcgatgtcgaggtctggggccatggatcttgcatctggactcggggggaagatcaccaaggatgaggtcaagtcggctgtcgatgagtaaagcatcttctgctctttgtttctctgcgttggttgattattattttctctctctcttttatttttgttggcatttagatttagatttagatatgcaggtttgattctggtgatgtactgtacttgcatgtctgctgtgctgtacttgaatgcatctcttcagagttcagggttcagaattcagtttgtatgactgagattaaacaaggaaagcacagattcactgatttcgtaatttctcactgttgtttgctcgacttttcgttctgcacccagaaattttcttcttcttttttggtggtagcagttctggacatctgaaaactcctgatgcattgcacctatttcatcttattagaatagtactaggtttttatcatgtgtattgaatgtgatgctttgtggtcgcccatcaggccatcactatataggctacttcaagccatgccaacttgtccatacgtattgtactcccctcccattaatattccaaagacccagcaataaatataagatatgagctttttctaccattcccatgtcttttactccttctcatttgcttttatttgttactgccacaaagtatgctcgctcatctttctgaatcaataatgagagtgcacccacgtcatcttctctaatgtttcatcacctttgtcacctctttaatccttgatttctcgtgcaaggtcaaactatgctctatggttaatcaaggaaaggagtacatactgtggcaccattacagaattattaaaacaagcttatcctcttttaaactatctctatctatgccagttttagcacattctattaagaatttgtcaatacattcaatatttaccctgtataaaaaacatatcaactgcttagcaagaattttattgacactcagaaaaaggatttttgtgctcagaacttggcctgtattttactgttatttattttaaataaattggttttgcaaggtatgagaaataccatggatactatggaggaaaagaagaagcaagaaagtccaactacacagacatggtaaatcatcttagtctctcagaagacagaattattacatttttgtgaatatcttattttgtaaatttgttgctttcctactcaagtcattttctagatgctcagttaaaaggattatatctgcataatttgcttcaactgtttgtctgtaatttgcttcaacttttgcacgataaaaagctgttaatcttcagttcttcttgactagattataaatttaactaagcacgactgattcaaagagatatctaagacaactcaaatattgtgctttttaaattgtcatgttgagtgttgaagcaagacagtacacatattctaggttctgctgtttatgctatatgtcaattgtattttagtcacatatttctaattgaacccctctttattctgtttgaaagaaggaaaccttcaaatttagagtttgtgacaattttttgtttgctgcatcacccatttaccccatgctaattggagataattttgggtttttcagtttttatattagcaactaatgcattaatgccttatcaggttaataaatactatgatcttgccaccagcttctatgagtatggttggggtgaatccttccactttgctcacaggtgagggttttagagagatcatctgtgctcattgtaatgaaatacgagaacgtagttgaagttttgcatattacctgacatctagtgacagaaacttgtcatgttcctgaatgttttagatggaatggagaatccctacgtgaaagcattaagcgacatgagcactttcttgcccttcagcttggagtgaaaccaggaatgaaggttaattttcctatttaaacctatcataaagatttcctgctggttctacactacaacattagaatgaaagtgttaacttcacttccctactgtaggttttggacgtcggttgtggaataggcggaccactaagagaaattgccaaatttaggtttgattcatgggccttctgtccacttgcttgtaatgtgtttgggccagaaattttaatatgcataataaatatttgacatttaaaaattaaacgtgtggtaaattgatcttggataatggtgccaggacaacgtcgttaagtatcaaccctgtacttcctcattatatgttatttttttgggtgaagatggcattgagctcattgtttacttagggcatttctttttcccaaatatcagtgttgatgatccattttctgctaaaatactgtcctcaaaagtgtggaaacttctctttttttcccctcactatggattatgaactagagatgactaatgtggccatgatctgctgtttcctgcagcttggcttcagtcactggattgaacaacaatgagtaccagataactaggggaaaggttaattgatgttcccttacttaatttgatttactctacttctgcatatggttaagaacttcagattagtaaacagttttcagcgtttgctgttcatcacattactcctgtgttgacataagatttttgttttaatatccaggagcttaatcgggtagcaggagttagtggaacttgcgactttgtgaaggtatagttagctaaaatagacattctttttggctctttgcctctttcccccatcttttagtagtcaatcatctatttgcagctgcatctctgtgcaaatgttatttatccctttccagcaaccatcacatattgcaaattaccttgcgtagactctctgcacttgcttagctgtacagagaagacttatttgacaatatatataagctgaaggacaaacagttacattctacatattggtctctatacaggcagacttcatgaagatgccgttttctgataacacttttgatgctgtctatgccattgaggcaacatgccacgcacctgatccggtatgattgcaaattattgcttgtatattaaaactcatcatcaactttaatccctccttgcgacacaaagtcaattggttttttcatgtcaaaggttggctgctataaggagatctatcgtgtattgaagcctggccagtgttttgctgtgtatgagtggtgtattactgatcactatgaaccgaacaatgcaacacacaagaggatcaaggatgaaatcgagcttggcaatggcctgccagatatccgaagcactcaacaatgtcttcaagctgcaaaagatgctgggtttgaggtaatgtagacgctgtgctttacctctcttttgtttgattgtgtgtttgggtttacctgaggaaaacccatggctggaagagtagcccacctctattgttagtttagaaactctggccagttacagcagttttctttcaaagcagcacagtttcatgaacacttctgttatttgttattcctttcccatgggcataatttttttttctgtgaaggttatttgggataaagaccttgctgaagattccccggttccttggtacctgcccttggatccaagccggttttccttgagtagcttccgtctgactactgtggggcgtgcaattactcgcacaatggtaaggccaacagatacatctgtagtcattctttattgttgctacaccttatgttctgagttgattgttcaagatgcacagtgaaatcaagtttgatttgtcccttggagtaaagcgtactatagacattctttcttatcaaattcctccctctgaacagaaaaaagcttaaaattgaggagttggcatcccaaagagggtgcattttagtgccactccattgtttcagtgacatgtggcctaataccaatgaacattcgggggcacaccaatcttgtggtggaaaataattaatgaagttttaggttccctgctgcctttaaaagtggttttgagaacaatggttcatgtaatagtttatgtaacatgaaaacctatagaagttctaccagggctagctagaaaagtcattctttggacatttacaataaataaaacaaacaattatactaatagctagcaaagtttaaaagtactatactattttttttctagaagtatcaaatttcgggtagacttgacataatctgctcagcagatgtgctaaattgcttgtatggtaaattcgatcaaaactttgttacactgaatattcaaagatcaggctgctttgtccactgtaactggccataacagcctgatttaatcatggtatatattcactcttgattcgcatggaaatggaattgagatcctcttctgttattttttaggtgaaggcattggaatacgtcggccttgccccacaaggaagtgaaagggtatctaactttttagagaaggcagctgaaggtctcgtcgaaggtggcaagtaagtctgtctctgattcatatttcagcaccaggaatcagaaaagcaacataattgtcacgaattctggaattccagttcagctgtctgtttttccatttcctctcctgtttaatacttcatgcaaagttctaatgcaaatatattaactacaggaaggaaatcttcacgccgatgtacttctttttggttcgcaagcctatctcagaatgagctcccagaaccacatttcaggtagcatacgattttcgccagccaattaaaacatggccaatatcttctgcaatgtttccctaagctcatattatgtgtgaattcgcagagataaggcgaggagtttgaaagaaacattatggcggtcaaagaaacacctgatgaagctcagaagcttgaagagttcttatgcgtacgaagagatgctgaaatgtgtttaactggtgaattttcgtctgttggtttgccgtgtaaaaaccgtttgatcaaggcacttgtctgcagggtgcctgttttagtctaagacgatgaactgactggtttttgtttgctcgtttctaagttgttagtgacacataagttaagtttgcagttcattcgccagtgtgtattgtaactttgcaataaggcacctgcttgatagctttcttttcatattgttcttcgacaaatataagtgatgattattacctgtactttctcagtttcacaatgtaagtcattctagcatttcccacatttatatttatgctaatgaatctagatagatatatatgtctagatttattggtatcaaaataaatatgggaaatgctagaatgacttacattatgaaacggagggagtactatttttttagcattcgagggtataattttgaagcatgctatagcatcaagattacgggttaactttctttagttaactcatgctctttattttgggttctgttttaatcagtttcgaggcaaaaggcatactacaacagagaattactgtgcacaagctgctcttgatcaattcaattttgcacaacgtccatctttggcataagcagaacagagcgacagataaaaatcatgtaaaggttttttcaaaaatcaatagagataaattaatggccaaaatccatttttgtgcatacttttttttttcaaaaaaataataaaatacacggtagagataatatatttacgagtttaggacggcctgtagagacaaaaatagtcatcacaggaacagtccatcttgtgagaaacgcgtttttttttctttcaatttttgcatttggattgggttggagattaaattaccattaatagattgagagcgaatgaattggtgccacgtgtcaagagaacgaacgggcttgtcgcaggagaactggtcactgttgagatcggctgatccgattaatcctaattactcctaaccattaatccaactataaattccttaaaaaaggactaatccaactcccctaaactgcatgcatgtcaccgtcaccgtgtgaaaaaaacccccaaaaaaaccccccggaaaactctatcctgattagttctagctagtaactaatccgatctgcttaattaaaccccttcagttaatctgttcgttgaccaagtttaattcaaattcaattcaattttaatttattttatctgcatgcgaatgcatgagatcactccaatttatccacatcttatctccattaataaaatcctctatatatactcgaccacctcttggtcatcttcttcctcatcatctccatttgattgatctcgtcgtcgtcgttgacgtcatcaatggcgggtggtttcgccgtcgaggccaaggtcgccggcggcggcgagcggcgggagttcaaggggaagatcacgtggtacgtgtggctgtgcggcatcatcgcggcgacgagcgggctcatgttcggctacgacgtcggcatctccggcggcgtgaccgccatggacggcttcctgatcaagttcttcccgtcggtgtacgcgcggaagcaccgcgcgagggagaacaactactgcaagttcgacgaccagcggctgcagctgttcacctcgtcgctgtacctcgccgcgctggccgccagcttcgcggcgtcgaggctgtgcacgcggctggggcggcggcgcacgatgcagctcgcgtcggtgttcttcctcggcgggacggcgctgtgcgccggcgcggcgaacctggcgatgctgatcgtggggaggatctgcctcggcgtcggcgtcgggttcggcaaccaggcggcgccgctgttcctgtcggagatcgcgccggcgcacatccgcggcgcgctcaacatcctcttccagctcgacgtcaccatcggcatcctcatcgccaacgtcgtcaactacttcacctcgagcgcccacccgagcaccgggtggaggtactccctcggcggcgccggagtgcccgcggcggtgctgttcctgggctcgctggtgatcaccgagacgccgacgagcctcgtggagcgcgggcggcgcgacgccgggcgcgccacgctggagaggatccgcggcacgcgcgacgtcggcgacgagctggacgagatcgcgcgcgcatgcgaggcggcggcggcgctgagcgcggaggagtcggcgtaccggaggctgcggcggcgggagtcgaggccgccgctggtgatcgcggtggcgatgcaggtgttccagcagttcacggggatcaacgccatcatgttctacgcgcccgtgctattccagaccatggggttcaagagcaacgggtcgctgctctccgccgtcgtcaccggcggcgtcaacgtcgtctccacgctcgtctccatcgtcgccgtcgacaagatcggccgccgcaggctcctcctccaggcctgcggccaaatgctcatcgcacaggtaatatattacatatattacacacgaagcaatttagcctttaaacatattacatatttgtatatatatctctatttctaaatatataacacagttggcttttaaaatatagttttttctactacctccgttttttaatagatgacgccattaattttttcttacatgtttgaccattcgtcttattcaaaaattttatgcaaatgtataaaatataaatcacacttaaagtactgtgagtgataaaacaacccaaaacaaaataaattataattacgtaaattttttaaataagacgaatggtcaaacatgtgagaaaaagtcaacggcgtcatctattaaaaaaacggagggagtacatgtttatgttaccttttctttttaaatatatgatgcacttaaatatatctttttattatataattttactataacttccttttaaatacactacacatttaaattttgaaacatatattaatttttaatataaacttttacataagtcctctcccagttcgagaaacccaaaaaacggcaagaggttttccggctagctccgcaagatggtggggacgacctgtattcgaagcctcaccccttctaattatctgatattaggtcatttcttagcattcgcgttcctttagttctacaaactaacatgaaagatccatggcagacagcggtgggggcgatcatgtgggaacacgtgaaggcgaacggcaatccgggcgagaagtgggcggtggcgatcgtggtgctcatctgcgtctacgtctcgagcttcgcgtggtcgtgggggcccctggggtggctaatcccgtcggagacattccccctggcgacgaggacgacggggttctccttcgccgtgagctccaacatgctcttcaccttcctcatcgcgcaggccttcctctccatgatgtgcagtatgaaggccttcatcttcttcttcttcgctatctggatcgttatcatggccgccttcgtcttctggctgctgccggagacgaagggggtgcccatcgacgagatggtcgacacggtgtggcgccgccattggttctggaagaggttcttcaccgatgccggggatggcaggattggtaactgctgatggatgggtttgaaatttgatttgatttgaagatccattgatgaaatcaagtcaaattgaaattagttttacctattatttatgagtaatcggaatgtagtaatttatttgggtgtggatgattatgatgagatgaactacgtactctcaaattcacattcaaattattgagaggcatgcgtacatgtaccgatttattcctcgagcgagtattcagtataattgcaaatgaaggcaataatatatatagcaaatgtacatgaacagaattgaacatactaattcaaacttttcctgtatcaagatcgtggtcacacagtttcttttttctaaaaaagttttctttaactcgttttgtctttcatatacatgtctatagcacaaaactatttaaaatgtgaataatataatcgtttttcataatcaaccaaaggccggctatctgaaacatgaatatagtttacggattcgcttggaatttttttaacctaaatcatgttttgaacataatcatctttatgtattacgagattagcctgtgatatctgaatcactgctagaaaatcgttggggattaatttagatatacgaactatctcatgataggcaaaatatccgaatgttatatgtgaaaataatgttattagattcgccatgaaaactgcttaattttatgaatttactgcgttcttaataatttttatgagtacgtatataattacaaatacaataaataatgaccaaatatctgcacccagttatgtatgtatgtttaaatcatggatcgaaatgtatctctttaactcaccgtactgttcatgcatgttcaagtcatggattcagatctatcgtttaggttccgttcttcttgttggatgaagattaagatttttgtagcaagcttttcaaactgctaaactgtacgtttcgtgtggaaactttctatatgaaagttgttctaaaatattatattaatctattttcaagtttgttataattaaaactcaatcaatcatatgctaatatcacctcgttttacgaaaaaaattaatcttcatcttcatctttgggagaaaagaatataatctttttgaaaaacagctcggcacagcaaatttctattcgcttttgcatttgtaaaccttggttagcatgtacccatgtgtagtagttttgtatcttaaatagaatccatgaaaaatatgcttataagtaatttctagctgttctcaatcgatatccactagaaattatagagaaaaaaaaggcaaaatagaagatggattttaatctctcgcgagagaatgtgcatttacacacccatttttctcttcgatgcagtacaaacaatgatgaaagatttccttaaaaaaataacaatatagtgtacagtgattatttatcactcaacaaaacttatctgaacattgagaaaaagaactaataaattcgtatgtacatgtacattgtgcatgaacgtttatatatatatgctggactgccctttttttttttgtcgatttgctagtgagcttaacttgaaaactgatttgttgttttggggttgggggggggggggggggtggaatactggaatattacaatatatacatatatatatatacatatatatatcctaattaaaagctaagtattatcctaattgtgaactagtagatgcggtcttcccggctgaagcgtctccgacatggaaagggattgaacatgggttgcagttgctgaagacaggacttatatggcgaattggggatgggaccaaggtcaggatttggcgggataaatggattccccgagcctcctctctcatgcttatgggaaggagcggacgctgccgtcttcgctgggtctcgcagctgctgaaacaaggggaaaagagctgggacgttgatctgatcaagcacgtctgtcacccacttgatgtggaagagatcctgaaaatcaatttgtcgccataccaggatgaggatttcctagcttggcactacgaaaaatcagggattttctcggtgaggtctgcttatcgtttagcgtggctgaacaagttccatccggatggagaaggcagtagtagagaaacggacggtgatcgctccatctggcgaagaatttggagtacacctgtgccaccaaaggtccgtattttcgcctggcgtctagcccgaaattatctggctacccagaagaacaggtgtaaacgaaagctgcaagcagttgcgacctgtactatctgcggccagggggaggaagacgagtttcacgcggtgatttcatgtacccggccaagggccctccgtgaaactctgcgggcgagctggaggttaccggataagcgttccctgtcgaagctaggcccagggtggcttcttgggggactcgataagctgagcgaaaacgagcgggcgcagtttctccttgtcctatggcgagcttggtacctgcgtaatgactgtgtcttcggttctgggcaagcgacggtaaagggctctgcatctttccttctgaatctatggaattccttgtgcccgtctggcagtgcaacgctggaaaatgagaaaggaaaaattgtgtcggagggaagacaaagtgatgtgaatgggtgcggggaaagaacccaagtggcaggtgtgtggcaggcaccagctatgggatgggtgaaaataaattggtagcgtcggcattgttattcggaacagcgtggggaatgttttcaccagctatgggatgggtgaaaataatctattttaataatccagcaaataattaaaaaaatagagcccttactatatgtcacatatgccagattacctaatggaacgtgtgctcgttagaagctcacatgcctttaagtttctagttcatttccggtgtgtaagctagggattttttttaattttttgaacctttttaattttaaattttaaaaacaaaccctttcaaaattatttctaaaatttgaaccttttaggcacactagctcatctagtgtgacaagatgacactggcacaccacctgtagcggacgtgacggttttatcctgccacgcgtggccaaataacgctgccacaccagtgagtaggggtggaatcatgaaagcttggtgcaagggaacctcggcttggcttggctcgctacaaacaacgagctaaaactgcagctcggctcggctcgtttatgggctcgagccagctcgagctagctcgcgagcctggcatcaagtaaatctcaagcaggactaagagaaattgagcaatattttaccacatagaatgtgtaataaagtgatatttttctttaatatgtcatcacaacatataaatagataatatgacaatcaaagttataattttcaacaaataaatagttagaaaaggtgtaattttttttgcatatgaccctattgtaccgagccaagcgagcctggcatcaagtaaatctcaagcaagactaggagaaattgagcaatattttaccacatagaatgtgtaataaagcgatatttttctttaatatgtcatcacaacacataaatagataatatgacaatcaaagttataattttcaacaaataaatagttagaaaaggtgtaatttttttttgcatatgaccctattgtaccaagccaagcgagctcacgagtggctcgtgagccagctcgggcttgggtcgtttcggaaacgaggtaggaaggaggcttgggcttggctcgtttggctttcgagccgagccgagctatgcgagcccaagccaagcttgagccgagctcacgagcccaagcttttttgtccacccctaccagtgaggtcggtccccgccggtgtgaccagcgggagtggcatgacggtattgttttgacacgccagtttagttggcgtggtcaaatgttcaaatcttgaaaataagttttggatggatttatttttaaaattaaaaatgaaaaatgttcatttttttgggtaagctagggtagtaataataaaaaaatagtaataataaggtggttaatctctagctggactgactcgccttgactgaaccaaagctacatttttgttttgcttgggacaagcaggagttgagggggagaaacacctggctgatgttcttatgtttcctcattgcatcatcactcatgctatacaattgtgccattcatttttgctaaacttgctaattattccctatgcccatgatgtatttcctcgttgcgttgtacagagaaggacaagaattaatggctggggtggtgtagggccaagcagggtttacaaaactgcgcggctatcacacgcggtaacctttttagtttttgaaaccacggtatgtctcacggttaccacacggttttttgcggtaaccatgtggtaaccgcgtcaaaaacggtaaggggaaccatggggccaagtgcttgttacatacggtgaacttggtgaatggtgatataagtgagacaaccagtgagcatttgttcaccaacatagatttctggcagtgcttttaatgtattaagtgatgtgcctatatcatgcactgtttcacaatgtatattcttcatcttctttttctaaaacaccatatcctctattctatatatgatctcttatatccttatcctccaatgtaatgcatgtgatgatacaacctgttaaaaggtgcttccagagcaatacaattgcatgaaatgcaaacattagtgttgaaagacaaatctttaagtatttattggttatgcactatttggaattatttgttgttcattacggatgtctgacatggcttcaattcagttatatgggctgttgggttcactagcaattcctgcagctgccattgcaaccactgctatagtgtatcaattgttggggatatagtaattgacatatgtgcttcaagtttgttcctattagaatgaaaagttggacttgcttaatacactccatttgtatctaatagccaaagtagcttaggatcaaatgcatgcacatagtaattgtaaagttctttgtgatggtaattagctatgataatgcaacctcatacatgaatgctatttaaataggtgattttatttagatttatatgacatcaagtttcaactgtcacgcatgatgatgcatgactttatttttaacatttgaaccattatactattacaattcagtaccagacaccaccaacggtgggaatgctcctcggagcaatgtagtagttaggatagataccacatatggatggcaagtttaaggccagcaaagcttgagcttgagcttgagtctgatcaaagtagacaacaccgacctgctgcagctgtagttgctgcacaatcgcctgaacgctactaatggcctggtagtgagattgttgcgctaccagcctgagctgttggcaacactgttgctgcatgacttggttgtttatcaattgaaacgtagctggttgccagaagggggttgccactatgctatgctgttgccttacgaactcactgcatgggctgagcacttgttgctgtagcaggagatgcgattgtagttgatattgtctataactttgactaagagcatcaaaccgtgcagaagcgttgcatgcaacaatagcaaggagagcaaatacgaaaatgatcttcatttttgtaggattctactactatgcttcaactataatgtttgaattgtgtgaaggatgaggagggttttcattatgcttgtctatttatagatgtttccctatcggttgctttagagtgttagttttgcttgatgctatattaggatctaagtgagtcatattatttggatattctgttaggtgcacctaaaaatgttctttgatatcatcatcaaagtaacttttatgcccatcatatatacatgatggtgagcaaaaaaataatgacatgactcatcgctcactttatgtgtcaatgtgataaggattgcaacttttgaaactaagtttgttatgttttgtaagctattattttgataatgcactacacgtggaactttacgactgtgtgggtttatgctctttgaattatataatttcagtaagaaaaaaaattatagtatgttcaatggttttcattgttccattaatactcttgtgaaaacttgtttgtgatacgaaataagttaatgcaataacttttaaattaactttgcagagctttacaataactcaccaacttactctaattgtggttggggattgatttaattcatacttttatagaccaaattgatattgtgttgctaaataaaaattatagtggtgttgctacacctacacagacacagaaggaatcctgatatcatcagctatctactgcttcctccacatggactcaagaagcagaagcaaaaaagaagaaggcatttgctccaacaaagttttccggtgaaaggcaacacattgttctgaacttcctggcatgtattatgtgaatctagcaaattaaccaaacattgacacaatgcgacaccttgtaatgtagccgtgccgagaattgtatatctcacttaccattgtatatcacacgtgccgagaataggagattgatttttgccaaccaaaacgctctaggcagaccaattgggccacatcaaggcccatttcaagattattgtggcttgttcggtctaaccggggacggtttaatgaccggttcatagaaaaaccgaccggttctgccggttcaaagcgggtcatatgcatgtccggtctttcttttgaactgaacgggttctggttttttccggttgaactgtcggcccgttccggttttttccaccatgtccccaaccctccatgtcacctggtttccatagaattaattaggctgccaactagacaaaaagttgatgtggcaacggaataaaagaagagaaagaagcaaaaacatagaaaccaggtcgcatgcgcgacaccgtttcggcggctgttccaaggcactggaaactagctaaatccgcgttgggttggatgactcgtttctctccccccaccccacccccccaaaaaaaaatcctcgcatctcgatccgctgcgccctaccccgtcaccatgcctgctgcgcgcctcccctcccgcgtctgcttgcttgcttgccacagctgaccctcctctgttaatgttacatgcaaagagctactaatttttttttgcctatgaaaactggtatataaacgatgcaatggggaggtagtgtccatatatgcatttattgatctctcactgctctagacaccacccatggacaccatgggttggggatggcctaatcgaccaaggtgctttgtcgcttcaagtccaacaaaaattacttcacactttaaatgttgcacaggttcaactaaatagaaattaatcttggttggcagcatgcatgacattgcacgatgcacatttactctttgcacaaataaacaaagagacattttgttagatgatgatcattttgagaagacccaattttcttctctttcctaagttaataaaatggcacatcatgttttttcctacgtggcatatcatttaatgctatgaaaaaccattctaagtgaagcgctgggatcaccctaacggcatatgtttctttgagaaagagagtcatcatatttgtttgcaatttgaataatgccaaatatataaaaattggagtttaaaacatcccctgtgtgtttctgtggttgtcttcttttgaattacactgtgctaaatgttagcgctggattgttggactatttcaagggttttaataaatctcatctattttgttacctcaaatccatcatgtcctaatgaccataacttttcgaagaaaaactttcgtgatctgttccaatctaaaacatatgagatatcgaaattatctcaatattggcataatatacaaatgctatgaagcatttttagttttttttatgagaatataattacaacatataatgatcaaatatctgcgaatgtatgtttaaatcatggatctatctttttaactcacgagtggggttactgttcatgcatgttcaagtcatggacaccgatctatatcttactgcattactttaaagttgcatgttcaaatcatggatcctgatctatcgcttattactttgaaatttaaattatgagaaataaatgagcgaactgaagtaccaagagaaatgacctatatggcagttcttgattaaggagtattaatattttactgggaataatgaaatggctactcgaagatgtttataggggcaaagcagtgcaaatgtgcaattgccagccagttaattttctccatggaattcaaaatttgttttccaaattttggcccattctggaatggtttctgattgatgtttcaattttttaatctttgaaaacaggtcggcacagcgaatttctatttgtattcgcattcgtaaaccttaagaattgcatgagttatatagtgcccatgaaaggtgcttagtaagtaatttgtagctgttctcaatcaataaccactagaaattatagagaaaatggggcaaaatatatagaagtcggattttaatagaggatatgcatttacacgccctttttttctcttcgatgcagtgcacacagtaatgaaagattccctaacaaaatgacaatatagagtacaatgacaatttactactcaacgaaaaaaccaagtttaaattggatctgaacattgagaaacaaaataaataaattcgtatgtacattgcacatgaacgtttatatgctggacctgtccttttttacttgtcgatttgctactgagcttaacttgaaaattaatttgtgagggtggaatatgtacaccacataaatattacgaaatttctttactataactattttcatgatgtttagagaaatcctaggatgtctcctctaggatcaaaataattaccctaaataaaatacttgacttagaatatggagcaaacatatattttaaagcatggagcaaataatccattttaataatctgaaaaaaatagagccttacaatatatcatgttacctagatggaatgtgggctcgttagaagctcacatgcctttaagatttgagtccatttccggtgtgtgagctagggcagtaatcacaataataagggcgctggttcatctatagctggactgactccccttgacttaaccaaagctacatttttgtcctgcttgtgtcaagcaggagttgatgggaagaaatgccttgaagaaagagataatggccaacactgtggcagctggcggtgcacacatgcatccagttactgatgttccttcttgtgttctatagaaaaaagcaagaatggatggggtggtgcagtgtagaatgttagcttgttacataccgcgaactgatgatattagtgaggctagtagtagtgcattagttccccagcataaattttttacagcgcttttaatgtatcaagtgatgtgcctgcatcatgcactgtttcacaaagtattcttgacattattaatcttcttttttctaaaacatcatatcctctgttctatatatgatcacttaaatccttctcctccaatgtaatgtatgtgataatacaacatctgttaaagatgtgtttccagagcaatacaatagcaggccatgcaagcattacagtcgaaaggcaaatgtttgattattcattggatatgcacaatataaaattatttgttattcattacggatatttgacatggtttaaattcaggtatatggtctgctcgacagcgaatcctccagctgcggctacaaccgctgctatagtgtatcaattgttaggggtatagtaattgacatctgtgcttcaagttcgttcctattgggaatgaaaggttgaacttgcttaatgcacttcatttatatctaatagccaaagcagcttaggatcaaatgcatgcatatagtaaaattgtaaagtccctgtgatggtaattagctacgataatgtaataggatttatcctcatagaggaatgctatttaaataggtaagatgattttatttagatttatatgaccctaagtttcaacagtcacacatgatgatgtatgactttatttttaacatacgaactattatattgttacaattcagtaccagacaccaccaacagtggcaatgctcctgggagcactatagtagttagggtagataccacatatggatggcaagttgaaggtcaacagagtttgggcttgagcttgagtctgatcaaagtagacaccactaaattgctgcagttgtagctgttgcacaatcgcttgaacaatactaatggcctggtagtgagattgttgtgctaccagcctgagctgttggcaacactgctgctgcatgacttggttgtttatcaattgaaacgtagctggttgccagaagggggttgccactatgctatactgttgccttacgaactcactgcatgggctgagcacttgttgctgtagtaggagatgcgactgtagttgatattgcctataactttgactaagaggatcaaaccgcgcagaggcattgcatgcaacaatagcaaggagagcaaatacgaaaatgatcttcattgttgttggattctactactatgcttcaactataatatttgaattgtggtgaaggatgatgaggattttcattgtgcttgtctatttatagatgctttcccatcggttgctttagagtgttagttttacttgatgctctattatgatctaagtgagtcatattatttggatattctgttaggtgcacctaaaaatgttctttgatatcatcatcaaagtaactttgtggctatcatatatacatgatgggtagcaagaaaaataatattatgactcatcactcactttatgtgtcaatgtgataaggattgcaatttttcaaactaagcttgtcatgttttgtaagctatatatattttggtaatgcaccacatgtagaactttacggctatgtggatttattctctttgaattatataatttcaataataaaaacaaaattatagtatgtcatatggttttcattgttccattgacactcttgtttgtaatatgaaataagttaatgcaataacttttaaattagctttgtagaactttacaataactcaccaacttgctctacttgtggtgagggactgatctattttatatttttgtaaaataataataataataataataataataataaagtcgtgttgctacacctaagccgatgtagaaggaattctcatatcatcaactatttgctgcttcctccaaactgactaaagaagcagaagctgaaagaaggagaaggcatctgttgccaacaaaattttccagagaagggaaacatgttgttatgatcttccttgtatgcttttgcgctggacttgtgcctaggtatatgtatgcctggagacaagccaaaactctgaactccactcatgaatatatgtcacgtagtataaccatataccccacatgctgcaagttcttccaataacttgtaaataatcctatcaaccatccaaaagtagaatttaatcaattagaagaatataatcatttgtcagtctatatccaaattaaataaccaacttaaaactatcgactattcatagcatcaacaacatctccatgtctgtcaacaaaacaccgtccattatccaattccgcattagaattagggtgatcattttagactaaagccatcatgttatagattagaaataaataatctatgattctcacacattcaagccatgagctagaggcctgttcttgtgccgctggtgatctcttgctgcctaggtagtgtactttgctagctacctctttggtggtcccacattgggaacggtataattggtggttgagctcagtttgtaacagtccaccctctagaacaacgtagccagcccatctgacgggtgggcctacttatacatactacccatttacactttcaccatcgcttcatgtaaaagggattatccgggagtgatatgtttggaggaacaagtcgttataagttggttccattcttgctaaactagtgaggtggtattaaacatgagcacatagctctcatgggccacaaatgcctcatcctaattgagccaggatgtcacagttcaaccttagtacaaccgttcctagttgatttctttcttttagtttgagaaagagtggtgaaagccattttgtaaataggaagcaagtaagcaactaggcaaaagcaaaaagagagacatggagaacggaggctcagagcagctacacataaaactaatgatgatcttgtttgagtttcaagttggtcggtctgccaccaccaactccctcaaactataacacgtggaactcacatgtccatccctctcgaaaccaaatactttttaagggaggaagttatgcattaatgatttagttgagtccatttcaaatcttttatagctgagatataaaaagatgaaaaaaaaacatataatttaattctaaattaggctctaaactgaaaatagatttctttttttgcaatgtggcgatgtgattttctaaattctgtaacaacgtacatgcattttgctagcaacgaaaataaaacaagaaccagccagcaaccaaacttggtgatgatttcagttgacaacttcaattctgttctcctctcatcgatccctccagcacattgcacttgtccctccagccatgctgagaattgtatatctcacttaccacttgtcgttcgagcttgatgttcctgtttgaaatgccgtaccaatttctcctaagatcctccaggtaatgcggtgctggtttgtcttcttttcctccatgcatcccattctcacaaaacaaaacaagattgaaccccaatgaagctcagttgaagctgtatccacattatctactccttatgtcttgattcctctcccattcttttgtaatggttcaacagttcaatttctgcatggtatctgcttcaactttggtgcttgcaggtgtagaaaaaggaagaaaacaagtggttgtggtaaaaatcaaagcgaagtgtttggttatttataactgatgaaaaactttttcccccctgtaactacttccctttcaatacatatataaatgctagggaacatatcatgtgcacaaagtcttttcatgtacatactatgcacaccaactaacaaattttaccaaaaaaatctagaaaaatttgtacaagtacttccaataataatacacttatgtgaagtcttaatctcaaattcattatattttagtcataaaaaaagataagaattctgagttttgagagtataaatctgttataataaatttgaagatgggacttaagatataaatttaatactattaaaagtacatgtataatttttatagaatttttgttgatattttctagttactatgcatagtgtatacatgaaaagacttgtgtgcatatgatacgttccctaattgctaggcataagctatcatattttttgtaaagaaagagtcatgtggtcaccttctacattatattcatataagtggaaacccttatggcacctgttcctttgatataaaagagctataatattagtttgcagttttcatgcaaatagaaaattatttaaaacttacagctctgttcaaaacttatgaaaattaggtgcatcccttgtgtgtttctgtggttgtgtgtcttcttttgaattacactgaactaaatggtgatgatcattgaacccttgcgctttcattctgactttatacaaaaggatcaaccggaaagagttgtatagttaaaatgcattggttaatatgcagtctcaagctatctatgcaatcactgcatctgaggagactaatccatcaatactcattaggccgtggtgttaaattgagtctcctcttatccttctcgatgcatctcattcctacactacgacattcacgttaacttctatcctcatgtgctttaagctgatgcaatggtgtgctaccacctctagcttctggttgcactattaatgatgcatgggaaggaatacatagtggtttagaccataggagtttgctagcgatctactcctttatatgatatatatgttggttggagtcttggagcattgtgcaaagtttctattgacagatttccaaccaacccaagcatgcatcgatgaaattgacaatgtaatcactaaagccgttgatgaaagctcactagtataacagcgcactccgtacgtatatcatctaattggagcactgtatatgccttatgaaaccgaaggcattattactgaccatattgatgaaagatttctagctaatatatactttctctgtttcaaaatgtaaggatttctaggatttaaattttgtaccacgatgtaaggagatccctacactgattcccactattcaaataacttcaatggatgaatccagagccaaccaaatgctttgaaagggaatctaatccattcaaaattcaaaaaataacaattaaagtaactaaagagtaatcttttggcctaaccatagtacttgctaaacaaccaagaaattcttatattttggaaaggagggagtatatgatagtacaaacttgttatcatatcaatcactttcactatttttttaaccaattatcatacatttttaaattttgtaaaacttactttcgctgtagcattgatcatacaactattccaacatttttgttcaactagctaggattagtgtacaacaatatctgctggacaatttattcacattgctgataatccatggcaaatgcaaggaattgcaagtatgaacatacccagcatgcatggtagattggtagttggatccatctaacctgcagaatgatcatggggctgtctgatcccctaatttcctcccaaatgcatccatgcaaatattactggatcacaaaaattatctgcatctcccaggattcatcagtcctgttagtttctccaaatcatatgaggaggctgctggggttaaaatgttgggtgtagagatttttgctgattttaaaatgatgttcatcccatgcaaatgttgcatacatttcctgatttctctgtagcttgttcagcacaacggacagatatcctatacacaccgccgcattcggtttgttgatctatcatcaggtgagtttgatcaaccatgcattatgctcacttagtcacttggatcctcgtagcagaaagccaaagcttctgcgttgagaaaaacccctatatcttctcctaatgcatcccattctaattaagatcacgagattgtggtaacatttgtgctgcagcctgcagcgtgaggggaaaagaaattgatttgatagttgtggtttttgagatccatgtgcaccttataagcttacattatcttgcactgtgttagtcaatactgccaaatatgcactcctgctttttgtaccgaggctcaccagtgagagggtaagaaatctggaaatggaggtatttttggcatatgagagccttaactccagaagcgatcctccaatactctctactggtagtacaagtagaaatgatgtaaactatttgatattaagggtaaattagtaatttactaatacaatgaagctagatcgatattaaaatgactaactttgtctttttttttccggctagattgatttgtggtcattcattatgctggcatcactcatatatccatcaaaaaagccaaaaaagtaggaaaacaaatgtttagttactgctaatgacgattatgcccctcagcacctattattttggaaaatatatgtctctccatgtttctactaacgctaactaggatggtagtaaaaatagatgcaaacccttcgatcaaatgagatcagtgattcagattgctttctactacaccatagtgggctataactccagcattttttggcaaggtatgcagtgaaattgtagcactatcactgtacctcaaatggatgtattgaattccatccatcgcttgataaaaacaaattaaggaactactcctataccattgtgttaaaatattgaatatatgatgagtaaactgcattttacacattgtacactgctttgcaccatatttagcagatttaatttcactctgcagcagagtatgccaaattcagtttattctagcgtacatcaacaattgcctatagaaatctcaattgcagccagcgcactttttgtttaaagtaggtgtaacatcaaccaaatttatggacccaccaaacttttggttcaaagagctcaagcataatttctgttatgatacaattataccaaatgagtcaacaatacctcttaatcactatgccttttacttcatagttttaattaacgatgaaaattgctatggaaattcctgacagaccgagcgttctttccttgtaagttgtaccgtttccattttttgcaatacatgagatttgatttctctaatttcttttagcattgttttgatatcaacaagttaaattgataaatactaaaaatcatcgatcggccaagcgtcctttccaaagagatgttacgattccaaccgttcccatccttatatagttacaattaaccctggtcactgttaatacaaactttggtagtatttgatggattacgtcaagagtaccttagtttctattttcagatctacaagactagaaaggagaacttgtggtgattctaccaagaggctggtacgtagttccctttccaaatcacacatcacaattttattgataattaaacattgtctctgctccttggcgaactaagacggcatcttctttttttattttttttagaatggttatttttatccgatctactcagattatcactgtaaccacgagaatgcacgccctctcataactaagacggtatacaccttcatttcgtttgaactagaaacgaggctagttatcttttagtggctcgtcgaggaagtcatctagagcccatgaaaatactattacagcgggctaacctatggagtcatcaaataatgctgttcatgcgacatggccacaattctgccgtgtcctcggctgctcggccatgggtctacccttggagccaagctgctatgctcttgttctactgcagtactgcctctcttggaaaaactcttgctttctgaatgcttcccattcttatagaattcagcagcactttgttttgcaattttgtgtatcgtaaacacaacaattttcgcgcatataacttttgcttagtaaagtggtgttggattgaggatcaggatagaacatgagatgcagcgggagtttttatgggtatgtgtcgctattttattctgtgtgtgctggtgctacctaaaagtatattattattattattattattattattattattattattattattatattgttatttcttttggttttgtcattagggaaaattccagatttcttaattagtgtcttacttgggtttgcttgacaagaagggtgacatatcatatatcggcaaccctccacaatgaaaagcagaaatgtgcatgcaacaccacgtggatgttggccacgttggttctaaatcctaagcatatcttggcattggtctttttttagacttacaagtcagtttatgagttaaaatatctaagcctaaataaataataattttttgtttgtctttcctaaaaccataagccacttttatactattaagctaaaagctagctaggttgaagaagtttttttttacttacaagagaaagaagtatgactccactcttaaaattaggactttaaatccaccagcttataaattatataagccaaaaaactgatttaaaaggttaagtcaataagcctaaacctaaataaagaggccatggccagcactaaggatattaattgccaacctagatgtgtgtgcacttgtacaagctagtactaccttcattttgaaatgtataatattaacttttggacatgacatttgattatttatcttattaaaaaattaggtaagtaatgttgtaacttgtttaatcactaaagttacttaaatataacttatatttttacatatatgtactaaaattatttttaataagacgaattgtcaaacatcaactccataaattaatagtgtgatactttaaaaacaatgagattaatatttggaaacatattttttctacgatgtgaagttccatgttaatatacatttttcaacttactaatattttttaatccttttcacattgctgtcaaacatttatttatttttaccaaaacctgtaacacggcattacacatgatccaaaatataccacccaatgtaggatagtagcggctaacgacacaatatttatttactctcttgtgaaaccctgtcgatctttaaatgttgaaacagtgatatatctagtctcatcagtgatttgaagggcaaatctttaatgtttcttgccgttagtgatatctagatctcatcagtgatttgaacagttgtgtcattgccaataaaaaaaaatcagccagaaccttctttcacatttcccatgcaaagaaaccggaaaagaaacatatgctgctccaaattcgtctttctcattaacctagagtgagctatgttagctacctctttggttgacgagctcatgagttgaacctcacacaatgttatgggcattgggccgtaggtcaaggtttataggcagcccaaaccaatcaagttagagataagattattagttagttagtagttagagataagataggataagattaagttcttacttagggatcaagtttgtaccatctatataaggatgggattgtatctattatcaattaagcaatgaatatcaattaatctaatctctctctcccagcaatgttcttctccttagcctgaatctacatcccttctccaggagccgacgctgcccggctatcttcccggctgtagttattccgtcatggtctgaggtcatgacatctgtcctagtgtgagatgcaagtgtcgcacttcatgctgaaagaaggtcaggaatcaggaccgatcgatgctgaaacactcccggtattatcgttgtgccttttcttatcttcctcaatgcatcccatccctacaacagatcagataaatgagggtgtgaaccaatgaattaagctcacagttgcatacccatgcattttgtggtagagattactcctcgctctttaactgatgtgtggcaactgcttcaagtttagttcttgtaactgtagaaaggaagaaaacaacgaagtggcactgataaaaatgaaaggcaggtgtttagttatttataactgatatgaataagtggtaggttggtgaatgcttttttttccctgagagttatggtcaccttttacattcaccacctgttggtttgagaaatcatcaatcatatttataatttactcctctgttcaataacttatgaaatttgagacatgtccgttgtgtgtttctgcagttctggtttttttttattcacacgattcgatggtttcaagattataattatttgatactatttcgtaccaggaataaaaatttgttccagaagacaaaagacctagacatcaaacatgaattgaccacgacatgataagttgttcttatgtgtaaaccaaaatgttcatatctgtccacttctctgattgaaaacattcgcaatattgatatacttcgtccatcccaaaataaattaacttttgtatacaaatctagacataggttatgttcaaattcatatataaaagttggtgttagatttgactagttcaaggggtcaatgataatcacatatgcacatgtattgcacacattccctttttttctgaaatgattatcatgtattaccaacattattcctctttttccgtcaaaataaaaacattattcctcttttctgttatcatggcatcgtattttttccccaaattttgtcacatcctaatgacacccccctccccttatattttttgaagaggaagactttcatgattgttctgttctaatattagtctcttccttgggggatcctatgtgagaaaatatagatgttttacaatggtttctctttctagtagaataagaaactctattaaacaaggtgtggaacaagttcaaatgaagtgctgtaggtgcatgagcatactgtccggaagtacttgctcattttggttttgtgagctcacagagaatctgatcatttcttcttcatcacaaatgacagaacttacaggctcttcacctctctactaaagttagtgtcggtgctgctatcttagtttctgaaaagcccacacctcagctctttcgaggaatttatatacttctactattctggctatatgtaaaagagttaatccatacagagttagaacgcacgggtttatgtgctggtgctcaaccaatctaaactctacatgtgggactattattgctcggctgggttgttacattgagtctcctctaatcctcctcgatgtacctcattcctacattatggcattcatgttcactattcacattttcacatctcctagagccattccacctttgtggtaagctgatgcactactgtataaacttctaacctctgatttctttcactactgatcgagcatgtaatggaataagagattttttacggtccttgagggaaggaggtaccatatcctgaccgtcaatttcgtgcgatccaacggcctggatggtatcggtacccgcgtctccccgagggcggtaccgaatgcatttcatgggtggaagggtaaggtggtaatttcgcaataacacccaacccagcgatctccccggctcctcgcctctctcgaacgccgatttccccttctctctcaccgacaaccgcctaagaacagatgctgccgggcgccggcttccatctcctcctttcgcgttcgagcgcggacgccgatgccgttggctgccgtctcctccgctcctccgcatcctatggcaccctccccctccccatccctagcgcctccactcctgccacctcgtcgccagatccggccgcccccgtggtcaagggcgccagatgccgacgagctccgcagggaggaccggggggagggtaaggggttgtgttggcctcggttcggtgatgctgctcctcaccaaccatatcctcagcgctaccgggactgtgcgatccgattgtccgccccctcgccttcctaggatggttgcggtgcccccatgaggccctgacccaccgagtttcttcctctggtcatagactctccacggccgagttcatcatctacgttttcccttcctcttcctgttaaggtcactaggtcagtaaaattatcccaataccacagctgtagacaagactgaaccattgggtcgattctatatggggacatttcaaattgaatgtgtaataattcttgatagtaaatgttttatgtgttaaacgtatgtgcattatagttgcatgtcgcatactcacaaaacatgaagagatatatggattgtagttgtatttatcatatcacaagagtaaatggaaaatgtgggttagatataatcttgatatatcttcagttagaatttcatttgcatatcttcagttaggggactattataggacctgaaaacaggtaagcaatttggcactacacttaattagttaagatttttccagctgctaatatatatcctgtgtatagatatgaattacgaattgctagctattcatttgcatgtttgcagatgaactgcacactatttgtcaattcatgtgtgtgcatggaaattgtatcttagttgaatagaacttctcttgtttattttgcactcaaggcgttcgacggaatgcccatggtataattactgactgtcttataggtatataattaacggtctcatcgtttcttggcattgtcagaaacgacatgctggcctctcaaattctagattagtttctgttctctcaataaaaatgtttcagctatgtttaggcatgagaagttttatttctgacttgtgcagtttttttctctctctgttcagcagaaaaggaaaggcatgcagacaatccattgtggcacaggctcacagctgatcctagatgatcaaaattgaagaatatttgcatgtggccagtaactctcttttgtatgcttatctgaggcttaggcctgtcagtatgtaacattatgtaatttgaaactatgtaatctcagtacataattgatctgtacttgtcgtgttgtttagtcttggagttggttgtgttattttgtgtctggatgtgattatgactttatgactgattgcttataaactacctgtcgtgaatgttcacaagtactggcgaggttctgccaaattttttaattaaaatttgacagcttttaaccgatcatattaggaccaacgttaactaacataagcgttgatcgatgatctttcttacctaagaaacaccgatatgaactgattatctccttctattcagtattaaattcctatgcagcatgggctgcttgcatgcatttattttatggtctgtttaaaacggtattgttccatacatctgattttatgggcaaactggcaaagttaaagcaccttcgatacatcaaactaggagagatgttagaagactatcaggtccgacaagcaaaaggttacacagtaagtgcctctgtaaactagttatcaaggacctagagaatattgagaatgaagaagaagccaagaatgcgaagctggaggaaaaacggcatctcggctcattatctctagaatggtcagaggatgatggcaccaacagcagagaagattgttcaatcattcttgataaccttgagccaaattctattctgaagaacctaaagatttcaggttatgttggtgctaaaatcccatactggattgcaaaagcctcagtgaataatcttatcagcctagatttgggaggttgtaaaaattggaagaaactgccatctcttgcagaattcctactgctcaagcatcttcgattggacaaccttcagcttccttcagaattcctactgctcaaccaacttcgcgcgacggcggcggagacggcggcggcgggctcgatgcgcgacggcaaccttcagaattcctactgctcaagcatcttcgcgcgaccgcggcggcaggctcgatgcgcgacggccccggtggacggcggcggcgcgacaacctcgatgcgacggcggcgcgacggcctcgatgcgacggcggcacgatggcctcgatgggcggcggcgcgacaacctcgatgtgacggcagcgcgacgaccacgatgggcgacggcggcgcgacgatcttgatgggtgacggcggcgcgacggcctcgatgcgacgatggcacggcgcagacagccggcatggacgacctgatacagcagaaggaagagaggagagcttatttttgtttgcccgatcatacccctgttaaaccaacggttagattagattggtaccttatggtgcctcgtacctcatagtacctcgtggtatctcctcaaggatagaaaagatgctcatgaaagannnnnnnnnnnnnnnnnnnnncagtagttttctagttatctactcttggatcttatatatatgttggtaggaggtaaggagcattgtgtgaagttcatttctgtcgacatatttcaagtcataataccgaaatatttcagtacagaaaaaataaaaaaaaagcatatggtccatccagtctaggcattgatggatctgacaatgaaattactaaagatcgttaatgaaaattcattagtataatataatattacacttggtatatcatccaatggtagtaatctcccttaagaaactgaagacgtaactaataattgtactaatgaaagtttactactacctccatcccataatacacagctacctctattcaaaagctacctctgctattcaaatttaaatagcataggtagctataataatatggtagtcattataataccatcattccatcaagcattcttactattgttttacctattctttgtacatttttcaatttcaattcatagaatttattttcattatgacattgatcatacaactattccaacatttttattaaactagctagctggtgccacaatatcacttggtacaatttaatctagttactgataaatccatggagtatatgagaaattgcaactatgaacatacaggtcgttgctactctttctggtgtcttactgcataaaaggttgtgtgaggtcagtcaatgccactacgctctatggattgcgagtgatcgatgcagtctttgtttcacgtcctttttctccttcccaaatgcatcctacgcctatatttgtgatgccactggcagttgatctgcatcatctttaggtagtttgagctcgatctgatccatgtttgtgtgagttgctactagcttgtaaataaattggtatatatacaccctagatagagtcggaataaccatcagatatagatggacttgtgactttagatatgagtatttgattaaatagtgctggaatctggatgtgtggaaggtatatataggtatataggtgccctccattggaccactagtctaccataatattagaattttgaatgccaacataccgaaaaattttgatacttcaaaattaatcaacatgctgtcagcattttcttactcaaaattattaattaaggctcatacttcacctaagcagtgagcaacagtgttcatgtttctcctcagttggatgtctatatatacaacgtagccagtgctatctagtttatactacgactgcttctgatgctgaattgctcgtgctgtttttctctttggtttctctcttttcctcaacatatgtgtatcattccattcccatggcacaacatcatcattgtggttaacatgttcatgccaaatacttgctagcacacctattctctggggtcgttgctcctggaaatgattgtaatcttcgatctgaaccaaagtttatattaagtggaatacattccatgtctactaaatgcccctgctccctagtaaagatcatcgtcatttggctaccccgtttccctatgcatgcatacattccaatacgggctataacatatcattgttgatatctgtatttccttaaatcaacactctccctctgtttcatgaatttcatctgttcatgtagaaacagcaagtgaaaaggttgaaggagtgcagtggtgatgtttctaattgttcaggagatgtctaaagaggtaatgcaaattgatataaaagagtatggtacctcctctagaataataaaatcatcggtagaacaaattatgtccctccattcttgtcaggacgttgctggttgatgttgacttttagatgtcattcatcccatgcaaatgatgcacagactttccatgttgttgagctcaaggacggaaaagttacagacacacaccattgttaggaagcgataggcaaacaaacgataaagaacaatagatcaatcacagaagacatgagatttaacgtggaaaaccctcccaaaccaggagagaaaaaaccacggatgccagccagcaaaaaaatctttactatatcgagggtgaggttacaacgccgcacggcggcttacgagaggtatatatatgaggtggaaccctaaaaggtattacgatctgtaccgcggggcctccgcccccgcacccccgggcgtccccaggtgcacaacccaatgggccaacttcagcctccgcttcactagggcagaagctggcttttattaagtgcaaatgaatttggatcacaactcaacaaccatcacgttaggttctttgatatcttagaagtggatcttgttcaaccatgcaaggtactaacttggatccttggaccagcaagccagccaaatcttcgttggcctctagagaggcaagaatagagggaacaacccatgcatgtatcttctcccagtgcgttcaattccaaggtcacaagattgtggtaaaatttgtcatgcaaagagaggggataagcacttgactggatatatagttgtggttccagagatccatgtacaccttataagctgcacattttgccttccactttgctagtgaatgcagctatactttcaattaacattcactaagtcggttgtattgtcacgtggtgtggagtggccctctagtgagagggtagaaaatggaggtacggtgttagagactgttgacgtcgaatcgcgccttcacacattgagcacattatgtgcaacccgcagtggcacacccggagacgagccgcctcaaggagcggtggatgctcaaaagaacacccaggagggaccccgttagggtgaacacgcgccagtttgtcctagactccggcaggccagttaggacgtcctctaagccgtagagacgaggatgacaagcaattggggaatttgagtagaatagactttgggataggtagcaagaaggaggaagatgtagaatatagagggtttgggtaataaattgattttgataattaatttattgttgtttcaatcggttttgaccccttatatttgtaggaggggtggacttgtttctcagggtcattttcatgtccaattcggcttagaaatcaactaagattcgagaaatcctagtctcaaaaaaggaaacacgagaaatacttaattggactcggactttgtgttgaaggtctgaccacgcggacacctaaggtctgactgcagttcattgtccggtttgaccggccacacaacggaagtcagaccgatctgtttgcactctgttttccttcttaatcaaattccagcagagctcctgccgtcgttttcctaaaaaaaacaatggaagtcagaccggccttcgcgggaaagactcgatagtttccaaatttggcaagttgctataaatccaaactagtaccaaatttgagtatcaacggagactccacaccaccaagtgccaataattatggtcttccaaatgtaaatggatagtgatgactaatgagagccttcactccagaacttctattggcaggggacgtggtgaaattgcagcattatgactgtacttcaaacagagttattggttcatacaggtggataggagcagttcctttccttgcatcaagtttcagggatgctaataattattttgtaaaatgatcttttttttctatttgtaaatctagataagaacttgtgaataaaagtgatataacgagcatgcatgtccaatctccagtcccatgttggcaacttttctcaggtctacgtgaattaatctatttaatccagaatatgtgatgggttaccatgtgtatgtgcagaaggttctttcttctttgatttgtttcatctgatcagcttcctgttaattctaggatactgaactttagatatcttacatgatcaggtaggcaacaacatttcaatgatcatataagtatataactgctacgtagggacataatcttatagagggtcctcccttcatgtttgtttatctattaccggtggaggctatttttagttgttaatcatgcatggtgctcacttagatccctataccaacaatcccgagcttctacgacctcttgagcagcatgaatggggagaactacccttttatcttctccaaatgcatcccattccgagataatgagatattgtggtagaaagaggggaaaggaaactgattgggtaattgtggtttcagagatccatgtactcattataagcttgcattgccttccactttgttagtaattaaatgcggctatgccatttaatatgcactactgctagttgtacttgtggctctctagtgagagggtagaaaatggaggtgtggtgttcatgagagacttgttcactactgagtgtccataagttcatgctaatgtgaatggtactccctccgtcccataatataaggaataatgggtgaatgtgacacatcatagtccagattcactccagtatgatgtgtcacatctacccattatcccttacattatgggatggatggagtagtgatgattgtgtaagatcaaagtgtgttttgttccttattctgtgatgaacaattggcatctgtgattattggttttgatatttggagattatcgtcgaagtggttttggagataatcaattttcaggtgatgatcggattctgttattttatgtgtccggtccgaccgggcggaggttgccggtcagaccggcgctatgtgtgcggtcagaccggccaggcccgcggtctgaccggctaacgctgagtcggtttcggtttcggattggttctttggatatccatgattgtttcatggttatggcttctagatggatactatacgtatgtaatactgttgtttgctaacaatgagtcaagttgaggatagcttggtctcggaatatggtttctttgtttgtttcatgtgtaggtgactcgatgcctcggcagagtatttgcggtgatggaccgggagtcggcttggtggtaaaacgatgtccgtggtggtcagatatcatgcgggatactaaggctagagttgatgcacgtggttggtgaagattccatatggcatacggtggaagtattgtgtgtgtatgggatgcggagtcgaatttggaaggagtccaaatttggtacgattggttatgttaagtttgtgtcttgtactagagggtttcctaaggtgtttaggactcttagtatgagtttggttcgtggttttaggctgcctacctcatgtataaatagagggggagcgtgaggcttcccagtatcgctttttggtatcactttggagagcaattgagttgctagtttagttagggtttcgagtttagtcgaaatttttgtaaggagtgatgttgatgcactttgtgaacacatagagaatcaataaagtcgtcatctactttaagagttcttcgatttatgtttcaccgggtttcggcagtctaactggcaactcaccggcggtcagaccggcggcaagcggcggtcagaccggcgggagcacggcagtcagaccggcggcggcaacaggcgcagcaggcgacatcggcggtcagaccgggtgatctataccggtcagaccggcggcatccactcggtcagactggcagatcaatctcggtcagaccgacttctgtcgaattcgagggtaacttttatttccgctaaaagttttcggttcttgggtataccaaccattcacccccctctggttggcttagttcttgtgattcgatcctacagactgatgagtggccttcatgctagttttctgggaagggggtgtaggtgaaatcaaagcatatatactatatatgtgcctttaaaatggtgtagtaaatcccatccatcccttttttttaaagttaacccagatgaactagctagaactggcattactgcaaaaagtttatacgctggtcctcaacctatctaaactcaactctacatgtgggatattaatgcccaacgctatgctatttgccacattgagggcttatttggttcacagcattttcaaaacgtagaaatagaataaacgtagaaatactatatgaatacatgtgcagacctatggattaaaaaatacaagaatttttcctatgttgttgagcaagccaaccaaaggaatgcaaatattaggttagagtggattgttttttcctatgcttttccttcaaaaatggaggaatggaaaactttcctatagttttcctatggttcattcctatgaaacgaatggtagtttaaaacccatttttatccctatgcttttcctttgcaattcctttgaaacgaataagccctgagtctcctctaatccttctcgatgtttctcattcctacactatggtattcatgtttacttttcacagtttcacatctcctggagccacatcacctttgctgtaagctgatgcactgcttaactaaaacttcaagcctcaggttttctgttgaactactgaatatgtaagggaagaaatagatggcagtctggatcactggagtttgctggttatctactcttgggtctaatatatactccctccgtcccattttaagcacggccatgagtaactttaattgtccatcttatttaaaaaaatgaaaatattgaaaaacataagtcacgcataaaatactaatcataaaaaaattcaaataagacggatgatgaaagttgaaaaaaaaaactcatagcagcgcttaaaatgggatggagggagtaagttcgtaggagcttggagcagtcatggaggaatttgctctaagagtatggacgaactagtataacctacaaaaacctgtcttctatattctactttctttttcaaattttgaagtgtaatttcaatcgatatttgggcctaggagtagctgccctactcctatatctgcccaagtcataataccatcagtatatctttcagtacagaaaaagaaaatgcagaagttccatccaatccaggcattgatggaactggcatgtggttcaagtacagagagaaaatgttgagtaatcagttggttcaagtggaggcatgtggctgtcccctaatttcttcccagatgcatacatgcaaatattacttatttttaagataatggaatagaatatcccagcctttactcaaaacgagttacaaccaattattataaagttacactcaaaaaagagtgtagttcaacaaaacattgagaacacgcacttaaaataaaaaataatccatctaagataaggagaacacattattgaaatctatttgtgaatctccaaccataattggcaaaaagttgcataactattgtctcaagcctacggcatgcaaccttcataaactcgtcatcttcatcataactttgtagctgagcccaacaccgaagccaatttgttgccttgaaaattacatgtatatatgtaatagatggtgatttgtcaaaaaccaaatcattcctactcaaccacagagcccaacatattgcagagacccccacaagtataagcttactccatataagcttactcattttcttgtccaccaccaaaagctaaccataaaaaatatatgatatactactaggagggcatagaccaaaagaatattgtattgctctccatataaaccttgcataatggcaatccatgaaaagatgttgaatattctcatttttcatataaaaacaacatcttaaactaccattctaattctgtcttgctaaattgtctttggttaacacaacccctttaagtaagtaccacatgaagatcttaatcttaagcggtatcttaagcttccaaatcattttatttctctcgatatagccattattaattaaagcaagatggaatattacttgatcaagatattcagtcatctccattcttgtgcaggaggctgttggttaatgtagacttttagatatcattcatcccatgcaaacgatgcacagatttttcatattgttgaggtcaagggtgttgttgagctcaagggacagaaaggttatagatagacaccttcaccttatgttcgttgatgtgttagcaatggagcatgttcaatcatgcaaggtactaacttaactggatcgtcagagcagcatgcatgccaaagcttctttggactctagagcggcatccaatgagagaacaaccgatgtatcttctcctgatgcatcccatgcctagatcacaagatcgtggtaaaaatatgtgctgctgtgagaggggaaaagcaattgatttgatagttgtggttttagagatgatccatgtatacaccttataagctgcacattgccttccactgttgctagtaaatgcagctttatactgtcaattgtcattcactgctgccagttgtactgtggctctctagtgagagggta

SEQ ID NO: 10261 - DNA, 36143 bp, Oryza sativa
aattttaaccaattaaaattgagcaagcaatattctaattccagggaaaatccttttcttcctttttctttttttttcccccttttcttttcgagtgggccgccggcccattctccttcctcctctcctcccgctgggccggctgaaggccaaggcccagctaggccgcgcgggccggccgcccgcctcctctcacctgggtcgccgacaggtgggtcccacctgtcgggcccgtctcctacctcgcgcccgcgccgccgcgcccgcaacagtcaccgcgcgcacgcctccgcctcctccgggccacgtcggccacacccgcgcatgcgccgcacctcccgcgcccactcccctctctctcccgcccgcgcccgcgcccgagatggccgggattcgattttcgaatcccgcctctctctcctcccccactcccccacgttggccggcgattcccgcctccctcggccacgtccggccccctctctccctatttaagctgcgccgtcgtcccctctctctttttccccatttcgccgaactccctcgtgctccccatcgctcccgcgccgtgcacccacccgccgccacctttcccgccgctccggccaccgctagccgccgctaggctcgccgccgcaccgcgccgtcgccgccgtcgggttcgcaaggacgaactccaccccgtctgcccttcctccgccgggattcgtcgccggaattcgcatcccctcgcgctccggtgagttctacctctaccgccgcctttggccatggatgccggccgccgtggttcatctccctctctctaatctctctctcctccttccttagggcaccccgaagcccgtccgccggttgccgtcgtcctcccgtggcttgccgtcgccgttcgccgtcgtcttcctccgcgccggccaccctcggtgaggcttcctctcccctctattcccctccctctccttcctagccgccgcttagcgccgccgccttcgcgtcgcctttgcgccgtcgcctccgccgccggttgccgtcgccggcaacgcgttcgcgcgcgcgccgtcgccatcgccatggccggtcggccggccttgagccgagccgagccgggtcaccgccgcccgtccgatcaaccccgggggcgatctgggccgtcggtcccgtggaccggcggtggaccacccgcttggccccggtccacggtggactaccccccctttgagccgctgccaagtggggcccgcttgccggcgccccttttccctctctcccgagccgctgaccggtgggcccctcatgtcggcgccgcgccccctttggtgacgtcagccctgggaattattgcgcaataaatgatttaagtactttttgttatagtaataaacacagtgaatcttctaaaattcataactaatttatccgtgctccgtttaagcccattcaagtctcagtaaatcaagaaaaacgtgtaaaatccattaaaaatggttttgttctctgtttcagtagtcttatagcctgtttgcaatgtttgccttgtatgtcgctagattccggttcttccgacgctccggtgtacttcgaaatagtcgccgagtttcctccagcagcagagcaaggcaagtcatgcttgccacttgaacatgttgatcctatattgcaaatgctctattgtttttcttcaaatactgcatcgttttataatgttattatgggatgtttacctattgtcatagccatgctattgttgtaccatgtccctttgtcagcttggggttataacatgactagagattggactagggattgcttagccatgcttagttcaactagtgcacaatggggaaaatcctattaatgtttagactgttggttctaatggtattgttggattagtgccaccgcttgggtgttagttaattaaaataaatcacatggtgggctgtgggtgcatggttttgctagtcgcacccatggcagttaaggaccggttcgcgggatgccctggaagaacttatcgtacttaccacaagccagcgtgggcaacggctgggcttgtagtgtagctttcctctagctgacgcatccaggcaagggtgggcgtgatggagcggggcgggccctgcgacggcctctgtcgcttccggattcacctaggcacgagaggggactgcccgttgcccgctggggacgggggtgaaacctgaggtgtggtgtgcttggctagagggggttatgcgaagggtcctgtcacggtctctttccggtatgtcgtggtggcatgtcggcgcacggaaacatgtcgtggggctgtgtcttgtgggtacagttgtacacctctgatcagagtaaaactattcgaatagccaagcccgcggttatgggcggtcaaccagattcaccgtgattagtctcatcctagtgtaatcttttgaatttggatagtttaggtggatggttgggcctgttgcaacgtgggatagcgttggatagtggatagttaatattaattaattattacaactgtttaaatctttcaacttctgtttataaatgctcgctttatgcaaatgaaccactctagctctcctttgataattccctgcatcatacccctattccggtatgacttgctgagtacagtgggtagtactcagtcttgctctattttttttcccaaccccagagtacgagtatgtgtcagatggaggtttctccgaggagtaggcttcgtccgtaccgtcgaggatgcctgtggagtggtgttcccgctgcagttctagtcaaggcttagctcctgttgtctttcgcttttccgctgcatttatgtaagacttttatgatgtttgtaagacgtgggtctgaatgtcaacattgtcgtttgtgtaccccggtcggtcctggacggggattttaatgcacattctgcttggaattctattcgggaatttctgggcgtgacagccacccccgtcgtcgtccgcctaccacgcctctcctcatcattgtcgtcgtccgccggccaatcgtcgtcgttgctcactggatggcctctcccgttgggtgtgaaagtaagggggaggtgtgagagtgggaggaaaggtgaggagaataaactgagagaaaatgttaatatggagacagagagagaagggaaaattaagatgggtgaaaaaaattgcatacgggacctaggcccgtctgcgaaaattcattttcacacacggatatttattgaacaactctcaattccttttacatgcgggcttcttaggaattatttttagtctgcctgaacaaaggagatgtttttttagtggtataaaggaatatcacgagaattttgaggaaagttaactgaccaatgtgaaattctcatgtgttctaaaggatcccaccaacatatggtcaaagtgagacaatccttttgtatgaatacaacggactttggatgatacgttttgcctcttgggctcctttacagcaagggctaactataacaattaacacatcatgcacaaccacttttacagtttacccgtataataattaccaataaatatataaatatatatgtagaaccacttttacagatcccgtattatagttagcaataaatatatactaacactattagcatcttgttaaaacccatgttgtggcggattatatatatgtagcacacgcttctcttttaactctcatcttctgtttcctacaacttaacaccagtctattatggcaacgaataatatacttacattatcttattatatttcgtttgtatttaatgcatattcttttcttattcctatggagatgatttggttcctataaaataaaattcatgtgttcaaaaagcctttagaagagcggtgaaagataaccattagcttcattccatttgaagttcatcttgcatagggcttgtgatgtgggccccaatgcagccgagtagcatcattcccagttgcgctgcatggacaacttgcagaaggaaaaagtttacttgagatccctcatcttgtcctctagtttcaaattcgtccctgacccaaaatgcatagtcttgtaaaaccggatcacagtgggtcccaagacagtattaagaacagttttggctgatgtggcggctgagtcagcgtgagacccacgtaccagtggcccaatcttcttccacatctatctcccttctcttcccatctctctcctggcctccatgtggccggtgatgggcaatagtcgaacatgaaaggcgcaacgacaacttctcgcgcccgagtcctaagagcatgtcggtctggccgaatggtccggagttctggtcatcgcactcgaagatgaagccaggaacttgcttgatgccgatgtcattgtcggtgttaaacaccacagcgtattgcttcgttggtttctcgttcctgacggacaccttggaggcgcgagcgcccctccgctagggctgtcgacgagccgagctcgagcgagctcgtctgtctaggctcgagctcgatacaaactcgagctgagcctataaaatgttcgagctttctgacaggctcggctcgagctcgaccaagctcgagcttaactaccgagcttgatttttaagtaaaacaatatatatttcaaagataatctttaaaaaataattaatttctagttcatcatattagtagaagaggaaaaaaaaaataaatatataatgtcaatataaggcatacaaataacttattagatcttctaatttataaataacaacaaaaattatgtattactatgctcgttggaagctcgagctcggctcgacaaagctcgcgagcttagggaaaggatcaggctcggctcatctggagctcgagcctaggacgagccaagctcgagcagcttgcgagcctcgagcttttttgacagccctaccctccgccgactattaggcttcctccctgccaccgatgaacctaggcggcatcgaccactaggtgatgaccaacgtggaggggtcaaaggcagatgaagatggtgatgaggttggcgaggaaggccatgcagggtccttatgtagcattgttgccgatgtcaaggagccagaagctgatgaggtagacaatgatggcatcgaggcgggtagagcacagggtgatggagtcgccgaagattcgaacgaggtcagtggagaatctgacgatgagaacaatggcggcgataatgaaggggtgctgacgaccgaggctggcgaatgtgtacgggatgccaaggtcctagacatagggggtcggtagggagagttgcagcgccactcaaactgcacgccgcatgccaccgacaccgcacgtagaagcttccatatggagggcactagagatgggaagagaggagggggggaggtataataagaagattgggccactgacatgtaggtcccacgctgacttaaccgcacgttagccaaaactgttctcagtactaccttgggatctaatgtgactcggttttacaagattaggtatgcaagcattccggtccagggacggttttgaaactcgatgacaggatgagtgacctcaagtgaaccttttccacttgcagaacactagacatcacagcccaagtcttacccaccacaagcccaacacaccacactttaggctccttaggcccataaccatctacctatgagcccaaaaactacggcccaattaggcccacggcttggcccaacttctcagcgaaaaccctaaccccgtcgtctccacggccaccttatataaaaatccgccgccgccgccatcctccctcctcccctccgctctcccacccttcacgccgccgcatctccacgccccggcgatccgagcacaagcaagcatggccgagcgcggcggcggcggcgagaggggcggcgagcgcggcgggttcgggcgcgggttcggccgcggcgggcgcggcgaccgcggcaggggcgggcgcggcgggcggcgcggcccccgccaggaggaggagaagtgggtgcccgtgaccaagctggggcgcctcgtgaaggagaacaagatccacaagatcgaggagatctacctccactccctccccgtcaaggagcaccagatcgtggagcagctcgtgccgggcctcaaggacgaggtgatgaagatcacgccggtgcagaagcagacgcgcgccgggcagcgcacgcggttcaaggcgttcgtcgtcgtcggcgacggcgacggccacgtcgggctcggcgtcaagtgcgccaaggaggtcgcaacggcgatccgcggcgccatcatcctcgccaagctctccgtcgtgcccgtgaggagggggtactgggggaacaagatcgggaagccgcacaccgtgccgtgcaaggtcaccggcaagtgcggctccgtcaccgtgcgcatggtgccggcgcccagggggtccgggatcgtggcggcgcacgtgcccaagaaggtgctccagttcgccggcatcgaggacgtcttcacctcgtcgcgcggctccaccaagaccctcggcaacttcgtcaaggtatcttgaattcctccctagaaatgctcgcttatcttagaattctttctctgtaaatgaaaaatgtttgctgatagtgctagatttgaatgtaacagaaatggcttgactgattgtgatggaggacatctgtgtagaatgacttgactgattgtgattgaggacatgtgtagctagatagtctcatttccaccattttgttatgcctgtattatcgtagtagtattttgacatgtccgaccttatcacacaattcagttgtgcttagtattgttgtttgacatccgtgctgttgtgcttagtgttgctatgcatttcgattgtaataatattgactacattgtcctgtttaagtactagtatacatcctttgttaagttctgttgactaggattttaggaatctagggttttgtcatagcatcgcttccctttcggatgttctgtattgttctgtatcagtagagaaatatggtttatcattgcatagtgtgcaaacagtaaactgctttgtttactgaggatcatttggatgattgttagtagtcatgaattgttctgcggctttaaatgttgtcgctgtttctattcatgtgtacatgctgtagcttgctgaaaatagctatcatacttgcagcaatcaaacatgatatgtttccatttacatttcaagcatttcaattggtgaacccatgagactcttagatagcattctaatttcatgtacaccattacatttcaaatgtttcggtttacatgtcaagaatagtgcctcaattgatataacctgaactttttgttcttgacaggccaccttcgattgtctcatgaagacctatgggttcctgactcctgacttctggagagagaccaggtttatcaagacgccgttccaggagtacacggacctcttggctaggccaaaggggctcgtgatcgaggcacctgctgagaagatagaagcttagaaattttgcagcaaagagctgagaaagaattttgcattatggcagcaagaactgctgtcttatcctcaacctcaacttatgtcttaaaaaatccaaattttgaattagcgaaccttaatttatgtgctctggaatgtttaggtttctcttcaccgtgtttacaattctcatatccatatgaacgcgtacagcattggtgcattttgcgagttttactctctgttatgctgaattgtgttaccaatcctcattgaaggccgttagaacaaattattattctggttgtatatcattacaatctgaaaatgttgagcagcctatacgggaatatttataaagtattaatctgcatcgttgtaacttgtattataatatgtggtaaatgtgctgactaacaagaacacaatgttattttttgctttcccaaaacttggtgttggtttatatatcaaacagtatgacaataaggtccctcgctgcagtaagatgaaatttcgccccccccctcccgggcaaatgattatctcagccgttttttttggggttttctcaattttttatgattttgataaaaaaattaatcaaatttagttaattttttttaaaaatccaaaaatgtattgaaatggccgagatcgaaattgaaaacctgctggctactgccaatgggatgaacacatcatctttgctatacaattatctccctctttcagggaaccattaactttctctgccatggttttgttactgatactgcattaataatatagcacaatatcattccatcttttatattgtactaacacattgaaactgcacaggctatattcaccagggataacatgctgtatacgcttgctttcgctgctttgtgcgccatcttcagtatcctaaaggagattcttcagtatcctaaaggagattgttgagcaatggaatgctatggtattcattttcagcgttctttcaggagtttagctcatgggctcaggaattatggataacacatcaacaatcacaaggaacaacagtttctcctctgttcctgctaggttatctgcgaggatagggtacggtctctttgagatactctctccgttttatataatataagtcgtttgactttttttcctagccaaaccttattaagtttgactaagtttctagaaaaattagtaatatctataatattaaaaaaaagataatggaataacattttggcctttgctcaatgagctacagccaattattacaaagtccacacataaataaattcagcacacactaatatgatataaataaaacaaaaactaaagacaccaacacaagataaaagagccctgaattattgaattatattcgagaatctccatccaaagttggcaaaacggtgcataatcatccactcaagtttacggcatgcattatttagagagaaagggaagaggagatgggggaagaagaagtggctactgacgtgtggctctaatttttatttttagttttatttgctgactagacttccacatcattgacacgtagatgaaaaccagctgaaaaaccacttaagggtgtaaagtgaacggtattgaaagttggagggggtgaaatatctggttttagagttttgggtgtattttagacaagacaaagagttggagggtgtaaaatggacttatcccttatttattagcttgatatcatcatcaagcctttgtagttgagcccaaccccgaagcaaatattttaccctgaaaagtacttacaaataaaattttgattgtgttttatcaaaaaccatatcatttctactaagccaaagagcctaacataccgtggaagctcttccaagaataagtttcttaacttttttattaacatgcaccagccaattcccaaacatatgagaaacactatgtggtgggtatagtccaaatgagaattgaattgatctccaaagaaatctagaaaaaatgacaatccaggaaaagatggtaaattgtttcatttttcataaaaaacaacatctcaaactaccattgcaattcttcttagggcatctctagtcctaagttcggcgagaaccatccatgtaagcgaagtttattttggttcgggtgctacaacgcagcatcgatttaccaggtccccctagaatcagccataacctttcctccctcacacaaacaacctttcctccctcacacaaacaaatgaagaaatatttttctaaacggctaaatcgactgcttggctgaggttgatttcctctctgacaaataacagctgcatctcacagtgtgttaggttcgatgtttttccctcacgcgttgattcaacccaacgctacagatgctcttagccaaattatcttttgttagcacaattcctttaaagagataccacataaaaatattaacctaaggggcatcttaagcttccaaatgatcttattccactctctatatccattattaattaaggctaaatacattgatctaacagaaaaatgaccattttgatgaaacttccatctaaatatatcatcatcctctgttaaattaatatgcacaattgaagcacacaaattgtgacagttgaccaaattatgaccaactaaagctctctagaaggaaacattaagcggaacaaaacccataacacttgcaattgaagaacttttccttctaactatagaagacaacgacgactatttgtcatttaaagaaaaatttcctaaccacttatcctcttagaatctgatttgctcaccattattaattatccaagaacccatacttattaaggaactcttaaccttcatcaggccagacaataatgggaatccccttgtttttctttcgacctgggttattgatttactcctaagatatttccacttcaataagtcttaccacacacattgttcatttatttatttaaacaaccatttgctcaataaacaccggttttggatttctaaattatgaacaccaactccaccctaatattttggctgacatataatgtcctatcttgttagtctaaatttccttttgtgtttatcaccttgccaaaagaagcgggatctataaaatcatttttttgaagaacccctttaggaatctcaaaaaaagatatcataaacagaactaaacttgataacacataattaatcaaaaccaaactccctccaacagacatatgtttacctttccaactaatgagttttttttcttaattctttgctcaattgttaaccaatcattattactaagctttctataatacatagggataccaagatatctaacaggaaactattatattttagatcaaaaaatatttgaatattgctcataacattgttttgcttgaccaaagcaaaataattcactcttgtgaaaatttatctttaggccagataattttttcaaaagcagttaataacaacttcatatgcttcactttctctaaatcatggtcaagaaaaatagtagtatcatcagcatattgtaaaatagataaaccatcgtccaccaaatgtgggacaactcctgaaatctaaccatcagcttttgctctcttaattaatatagctagcatatcaacaactatattaaaaagaattggagataacaggtccccttgccttaaaaccttataagtttgaaaatttgcccccacttgaatgaaagaagcaatccaattacaccatttttgcaaaaaaaaaccctttattctcaaagttttttttaacaaaagaccacttcactttatcatagggttcctcaaaatcaatcttaaaaattacaccattcatttttattttcgatttaattcatgaattgtttcatggaggataacaaccccttccataatgtttctcccaggtataaatgttgtttgtgtaggactaataactttctgagctactccagaaattctatttgtagcaactttagtaaaaattttaaaactgaccttaagtaagcaaatatgcctatatttttgaatcttaatagcctccttgcacttaggcaataaaataatagtaccaaagttgagcgaataaagatttagacttctgctatgaaaatccttaaataaatctaccaaatcagatttgataacattccaaaacacttgataaaactcataagaaaatccatctagactcggagctttattatgttccatttgaaaaattgcatctttaatttcattttccataaattcatctactaaagcattattttctaattgagacacttgggggatatcacttatctggctttcatccaaagttaaagagaagcttctagagaaataaaaaggactttataataagtggtaatatgcacctttaaattcgcatcaccacttataacccggtcaccatcctgttattgaattttttttgttttcctatgcttcccatttgcaaccaaatgaaaatatttggtatttgagtcaccttccaaaatatctttagtcttagctcgctgataccatttaatttcctctcttctaagcaaacaagctaatctattctaaaaaaagtctagtatgaatctcatcctaactcaaccgagttaattcagctttttttttaaatctaacaaatctaatatttccggcaagaccttcttttcttttttgtaagtgccactattttgtttggccaatcctcttaataattgtcgtaatctacgaatttttgcctgctaacactctataggagtatttccatcaataatatttgaccagatttccttaaccatatctacaaaaccatctcttaatagccaacgcaactcaaatttaaagttttgatgactgttacaaacagaagatgattttgtatttaggagtaaaggagcatgatccgagatgtctctatgagatgtctctattaagagcaaatatcgaggacagtgaaaatttttgttcccactccgttgacattagcactctatctactttttcataagttaacactggtaaattatttgtccagatataattttgactaaaaccatcaataatagtattaaaaagaaaaggccatatattatcaaaattatcattatttttttccgtaggtctatgtaatagattaaagtcaccaccaataataattggtaaggtttcatgactagacatatgaactaattcgtttcattaaatctaacattttatattttgacaatatatttgttttgtgttaaaaatactaatatgttgtcaagtttaaagaagtttaacttggaaaaaagtcaaacgacttataatattaaatagatggagtatcatcaatctcctggtttgctggaaagtatggatatgtcacgggaataggggccgtggctgttctctgatctgtatgtggaacaggtggaatgtttctattttgcccatctgaagctgttacagtattacaaagtcaatatacaaatcagaacaaaaatgtatggagactaagagaaagtgtatataattttatgtttacctcaaatacatattgtcatatgctactgtttatgtgagtatggagaacaagagaaagtgtatataattttttgcttacctcaaatacatgttgttctactatttctgtgacgctgtgaacatcttgttgctgaacgcttggtagagtgttttcatttttagtgctggatgtgtgtggattgtagttaagtgaatgcttgcttttaactaatctgaatgtcaactgagaaaattttgataattttttattatgatcttttttggcaagagatgactattggtttgctgtgttcgctgatggtattgtttttgtcagggttaaaagataatgcataccctctatcctatgagtcttgagatatatgaatacaatatgtcttatcttatgatatacggaaaggattcgtgtgagttaaggaaatcagtcaattcgtatgggaaatatccttcacaagtagggccatatcaatatcctactatcctactcagagggagagaagactataatgtatcgtgcggggtccgatgtctccgagttctacctggaaatcaaggtgatctaggtataaatacataccccctaaggggtatagggcattgaatcctgagcgcaagacacccgcaaccacataagtaatccggaggacttgaagtctattcgccaatagatcttgtcgagtccctctcgacaaggatctcgtcagtaatctcggagtttagttattctcttttgtactctgtggtttcctctataatcccatataaactggattagagctattaccttacgaggggcttgaactagttaatccttgtctttttgtgtgcttgatgtcgtatcgcgtagatcctcataccaacgtacccaaatatccttagaatatagtctacgggtctcccccgtcgacagttttcaggtaactccatgctcaatggtcactctatgctctggtacaaatataatattattgcctatatatacatattgataacatagtactcaccctattgaatgtgaactagcaaaaccaagcgttgactacgaccaagttgtatcttttgcgatactcttgattcgcatcatcaaatgcgctgtatgtcatcacaaaaataactagccattggataacccacaccactagaaagaacaatgtctggatcaaggagaggtcgtcgtggattaccaggcaaacataggtgatcaccatggcaacagtaaatatgctaaacaagacctgcaaaaaaaccaatcgtttagcatgagcatgtggtgttagttacccccttcgtcccaaaatataagaacctaggatcagataagagatttactagtactacgaatctggacaggctgtctgacgactcctagacaccaccttgagaaaagaggctagactaacaccgagccgactgttgctatgcgggatcgatcacattgattgtctttcttagacacggtaaaaggaaaaggagagtggaattagttcgtatgtactcacatcttttagggttctacaagggcgagtagtcgtgaagccttgatgatctgcatctaatttgctagtagtagggtcatccagatcatacggggtctcctcaaccgtcacggtcattccaagaggcatcggagcgtcggcggccattgcgatcagatcttgcatttcaagtattgtcagcacctatcaaagacaaattcttttaccacgagtttgacagcctagctctaatgcagacagtatcagctcataaaatctgattgcgagatacataagaggatcaattttggaattatcaagattagaaagaagataattttgaagcatgagttctcatagtccaaaattgggtggcatatgttagcgccaaaatttggtaagccccgaggtcatcatttgcttagaaaccatatcagcttcagagtcctggaattgaccgatgggaattgtcactcactagcagtcggattcttggttttggttaaggaaattaatcaattaaaggaagtttatttagaagagattgagtttaaggaggatacgacataacaatttatctattaattaagcagagttagttagttcccttttgtttttggaaagtgtgtttagtatccgatcaggacttgtgcttttccttttatctttagaaaagtttgagttgtgtccaataagggcttgtatttacccatgcgtataaatatatacacccggagtcattgtaatctatctctcgatcaatacaactttggcacatcgataccctttttattttcgtctttctcaacaagttcctgttttgagttaggctacatcggcttcgatctctgatgaggggtaaggcttattgtggctgtttgtatcggtgaggctagggcttcgacaccctaatcttgtcgatgtaaacatatatttatcatatatcttagttaatctaagtcgatgtctcaatttacctatatcggctagatcttttctagggttttttttatcagttaaattgtttcttagatctagattagctaaggtatccaccaccctgaaaatcagtaaaaggcttgattgtttagactttatgcttctttttcatactagcaaaatgcccatgcgttgcactgggtgaagacaaaaataaatagtaatgggtgtgtgggagcataatgccactaggttaattgagatccttatagttaaattgaatcttttcggtgcaagtaagacgctaacatgacataattatttgttgttctaaatccatttacatggattataagaaagctattaataccactttaaaatgaaattatgtattatacatactaaagtttgaaacccaaaaagtatttatttttttcatgtattattatgagtcggttgcaatgcatggttatatttttatacttgatattgataaaacacttttttttacatactgcaaagagtagcaatagtaaaagaaatgtttctcgctagctatcagatcaacctcactgcactctaattgcataattgctttcactcaaaaaatcaaaagaaatcgtgatgaatggaaagaaaaaaaaggtggtgtatcacataatagctctcactctaaaaaaacagaacaaaaacataccatgaatggaaaaaaaattgatgaggacgagggaaaaaatctggatgtaaatacgattcattttgttggtgactatatatttttttaaaaaagaaagacgcgtgattgttttctattttctaaaattaatttattttgtcggtaaataattcattttgttggtggttacattttttttaaaaaagaaagacatgtgattgtttttttacttttccaaaataatgaaattgttcccttttttatctaattcctggtagacatgggcccaaaatttatttagtgttaatagtcttaggcaagaatcctatttaggtggtattactcgtgctacagtgctcagttgctatagtatcacgcagaactgtgctgtgttgggctgctgcttctctgctacgtgggctgaactgtgctgtgctgggctgctgcttctctgctatgtgggctggttgctgggttgcgtttgctttttgttgggccagcctgctgccgtcttggctgggctgctcgctaggtttctcttttttttttcgtttctcttttatttgagaagcgtcagataggggtgggtggaaaaagaccgaacaacaaaactgagaccgagaaatttagtcatcaattcggtcctaggtagtgaaataccgaattttattcggtcaattcggttagtctcctcgggtaaccgaatagaccaaaaagatcgacttaccaaaaaatatctaaatgcaacctacaatccactatgtttaatagaattaaactctaattttcacatccctacttcttctaggcatgcaacctaataagagtctttacttataagtgcttacaaattttttttttgtgatttttatgttgaaaatttccattatttctttgcatatatgaaaatattgttgaatttcggtcaggaccgagaccgagaccaaaaagaccgagaccgaatttgtcagtcctgacatttttgcactgaaattcggtcttcacttttcaaagaccgaaaagaccgaaagaccgaagaccgagaccgaaattttcggttagaccgaatggccgcccctagcgtctgagatcgccgtaatgcatccagattcatggattagcggcgaaataatcacgtgggcccaccctttaatgatggacgaaaaaaatcaactggaagccttacttattttttaattaggtataggtatagatttagtgccgcatcaattggatttgattgccgataaaggtttcatcggggtttcagctgatgagttatctggacgttgcatcggctaacaaggattacatacaaattggttttagccgattgcattaaaggtttcactaattatctaatcttgtggatttaatgacatcggatcacaaaccgatgtatgcttaacctttggaacaagcaattattctatacgtattgatcaattggtttctacttaattatattattgttttattacattatcatcagccgattgttttatatcattatttactcaagtgtagaaatctacattgaacatatagccgattgctcaaaaccctattgacattggtcagtattggcatcggctagtataattatatcggtatgtcagttgcaggatcaaactgactgtcacacccgcatctcatcaatattttggacctgcactggagctaagcagatcttctatgccgttgtgttcatcgccttacataggtagtataatttgaacccgaagtaaagtaaggactcgatctaatcaatcctgaaggatgaatcataatattttttgaagctctatttctaatcataatgatatgaatcgaagaataaacaattcacaactattcgtaattacaactattttactcatgtgcacctctacatcacttttttttaagataataatagacctgtacataatgtggttctcctttcattctatacatacacctgtacataatctattcgagttcagatcatcctcctgttttattaactaggaaggtagcccgcgcattcgcgcgagcatgtaccgtatgtaggatgaatttgagaaacttatagggacagtataccagcgaaataatatctgcaatgtttcaaaattgtgattgtttttcatgagtctcttcattagcattacaaaatgaatttaattgttatttataaaattacctattgaagattggggttggtaacttatggtacctaagacatgactcttgaagtttcatatggaaagagaaaaaacttaggcctgtttggatcatttagtcctcagattaaaaagtttgtcccatactgtttggatcagggactaaaaaagactaaaggcatgtggactgagggagaaagaagaaagaggctgtcactttagcccctatataatccaatatgcacttttagtcaccttgtttggattcttaggaactaaaatggagggactaatgcattagccccattaaccaaatatggcctaagttataaaagacattacatatactaccatatataattaatggttctactgatttatatagaaaaaatatataataactttattatttgatggcagacatcgattggtcatagctatggataattcctcatagaaaattatgaatatgtgtacagtatagggatacaaattagaaaaaaaatagtagaagttatgagaaaaaaaacaaaatatatgactctcaatttttacttaattcggtagtccatcatttctaaccattggatatttagatgacctaacatattgtgtacagtccaactaactaaattattcgtcttacctcagttatggatgttggacatgatttacatatataaaattttaagtataataaaaaatacacactactctgccaatgtagcgaacgatgtgtgcgacaggttcgccacggctggcttcaacacgaacatgatcacgtacctgatgcagcagctgcacctgccgctggtgcacggtagattccttcgccggccgtctctggaccatcgccgccgctggcgttttttcccagctcggcatgctcggcctcgtcgggtccgcgctcgtccctgccctctgccccgcgccgtgctgcgctgccgccaccgcctcgtgacgacaatctatttagagtatgtatgtatacgtacgtacgcacgtatgagagggtgggcctatgggagaagaggtgggttgtgggatttttttctaaagataaatataatagttgaaaatagtaggtctagcgatttattattattatagaaatattgggtccaccggtttattagaacgccatgtggcggcttagaagcgtttgtaggagtctcacgtggcggcttgagagcgtttgtaggaagtttaatggacttttagtatataatagatagatagatagattactgaaagcacagggctatccctgatttcttccattttgcgtttccgcaagtgctcttggcatcactaccacctcccttgatagtgagcttgacgtccttcaaggttattccttgacaaggtacatttctgctacagtccagtttgatagcctccttggaagcacttgtgcccctgatgttcttgaagaccacattgctaacttgcaccgcagatgtctgatacaaaaccactaaattataagcatgcacattatttacacacatggataactgaataacagaaaagctatcactgagatttgtacctgttccttgcagggtgtagcagaatcacagtagttctggtcgataatgattgggttccaaacattttccatgatcatgttctggaacacgatgttcttcgcgtagccccaaccgccctgccatgtcttgatgcgagctccgttggttgtgccatatagcctgacggtgtcgacggtgacattgttgacatgagcttcagagttgtgatcgcctaagctcccgatgctgatgccgtgtcccggtccacacaccatgttcttgacatgtaagttctcagttccatcctcaatcgacatgcagtcatccccggtcttgattatgcagcctgtcacttgtacatttttacttcttgtgatatggatgccgtcggtgtttgggctagtgcctggtgctgtgattgtcaggctagagatcctaacatcagtgcaatcctcaactgacatgtggatttgttggctgtttagtagcttcaagttctccactttcagatttgaacaggagtagaatgtcaaggcctgtcagatgaaaaagaagtcagactttgtttgagcaaaatagccaaagttttatgaattgtgatgtgctagaagattaggatttgggaagaaaactcaccgttggagcttcagtgcatggctgaaaagaagagaagaataatatccacattagagatatttccaaaataaaaatgaaaaagagtgtaatgattcataactaaataacttcagagcacttacaagttttgcattcgttttgcaggaattttgccaccaaatcttgccgttttcatcgacagtcccaccaccagcgacagtaaggccactcacaccattgaacataatccagtgcctaatagtttccttgctccaatctgacctctttggaggagccaccaacgtaccctctatctgaaaatgttcaggaacttaacatttttgagtaattgaatttcatatgaaagtaaatgcaagtgcacgagtgcatatttcttaccatgaacgtgatgcttgatttgcatggaccagatagtgtaatgtgcttggtgaggtatctcttgccctttgggatgagaacaatggaaggttgcgaagaggagcaagctgcagcccatgcctttgccaatgcctgcaacaacggtattagttaagttttgctatttgtcagtcgcctgaaaataaaacaaagacattatacggtgtcacattttaccttcgtgtcatcatgttgtccatctccgtaagcgccatgtttgcgcacatcgaacaccaccttctttgactcaagagacctgcctctgagactatcatctccactagttaaatggaatgatgcattcatgttgaccttggcatgaacactacacaagaagaacgacatgacgacgacatatgcagagaaaatgagcacattgcaagccatctttccaactgttaacatatgtcaacacagtttcggacgatgaacagtgcagaaattctagtgttgttgtgagttctggactttgtagaatgtgttgatggatgtggcgattgatggagaccaaggattcgatcagggggtctatttattcgcgccgaaaccggttggaaatctttggatgttctcaactcaaggttgcttgttgttgatcagctagataggttgggttcagatatttggatcctagtatcacaagattctgtcggcatgggaactgagataaatgtgcctgagtccctgactctttgttgcttcactacctagtctacttgtatggctaaattacttccagagaaactaatcctgctattgaaagaagttcagcactaaaagaaaaatcaaggagacctggatcacagttgagtacagacaatcatctaaaatcctatgcatttcatcagtgctgcactcttgagacccactctgaattaactttgacagatttacgagccacaggtctccttgtgtcattaaagtgtatgtattattgtaagcttaatcaattctaatgacaactcatcagtcatcaacgagaaagaaggcatgtgtgtgtgaattccaatgtggtattctctacagatgcagcctatgatgcacggatacgcgatactggtacggcgatacagatacgttgatacggcgatacgggattttaaaaaaaaacatcaatacgtcgatacggcgagtatatataaaaatatttttaaaaataaaatataggaaactacaaaagggtaaagcaataagattatcttaaaaaatattttatgtattgttgcctgttacaaaaaatatagtaaatatagccttgtattacaaatagagcaagtatattaaagttataaatatatcagaagtatagcattgggtctttaatgggctattacactgctaggtatcggagaagtatctgataagtatcgtgtgagtatcggtatttattttttctttttttttcgttgtttaatgaccgatactcctctgatactgtatcgacatagtatcggacgtatcgccgtatcggatacgtatcagataccggtacggcaagaaagtgaagtatcggtgcaacattcgcagcattataatgtttcacataggtttctgaatcttgtgaagttaaaaattcaggtgtaaagctagctcttagctgagaaaggaaaagtacgggctccaaggaagcctatgaagaggaaaccaatgcagatttcaggtgatttctcatagatatctcaatgaaagtatggacaattcatggagtaagcagatgaacaacctctgctgtttgtggcttacaagcatggtgaagaggtgcagaaaattctagagagcagcctctgttgtgggcttgtggcttccaagcacatatttcagtgctttaaaaaattaacaggtgctacatgattttatcagtcaaaacatttgtggttttgaaagtatgcaatgttgcttagcccagtttgtactgtcaattaatacgcaaatttgcctgacaactctgaaaatatccaaaaaaaaaaggaagaatgagggatgattctgaaactgttttggtctcaaaattgtatgcttattatgccaaccaatttcagaaagtaaagtcttgaaccagctgtaagcaatttatttttttttgcgcaccaccttttttttttcttttggcactcaacagccgagacgagctaatgtcaaacattttctgtaagattcttcatctgtttttttttaattttctaaaatatcgttgagaaaaagagagcataaaaccgtggctgaacttgaagtatttgctaaactctgaaaatagagggttcctatttacctagcatggtgtttgtgcatatgggtatttcacgtaatcgcaaacaaaatttgcaactaacttggacaatatgatatatttttcagatattaataaatttaatgctaataaaaataatcaaagcttgaatttgaatatgaatagttcccgataaaattatttgaaaagttacctcgatcaactgagctacaattggtatacccatgccacacgaatgaagaaaaaacaatttataggaaatagttttatatatgcattattagctgttcaacagccaagactaaaaacaaattaaaataacaaatcataaaattaattaattgagttctgcattcatattttcggaagggacattcagatccccttggttgccctaataagcaaaagccaaaactaaaatttgaattttcaaactaaattttgaggttgattttaaaattttttcaacatgattctttttcagtattaacttttaaatcactaagacatatataaaattttacttataaactaatactcctatttattttctaatataccattttaacttattagtagagaatatggacaacccagagggcctcaaattttgactcgctggtaagacggcaaagcacagtagcacacaatgcgaagaccaacggaacgaatccaacctccaacgtccctgagcaccccagccgtcggatgcgtcagatccggccgtccatttggctcccctcgtaaaacgcgctcccacccggcaacccaacgacatccgggcccacccaccagtctcctctccgtttgggaacacgggattcccagtcccggccccaccccccctactcccattcccattcccgtcggatcccattcccacgggggagattactcctcgggcttgggattccgcctcctctctctctctctctctctctctcctcctcgcgacttgtcggcggcgacggcgacggcgacctcggcggcgcacggcctcgctccctccaccgccgcctccttccttcgccgccgcaccgcgcgtccccgctccatctccggtatgcggtgccctcccccctacctgcgctccttctcctgattcctcctaattcctcctctcccctccctcacactgctctctctcactcggctagggttttctcttctagatctccgcgggcggagctcccgggcgcggaggaggctgcgccgcgcgcgcggggaaggcgcacgaggtagggggtttctccttcctccatcttctcactgtggagtgtggattttctggcttgcttgcttgggcgcgcgtgcgtgcgtgcgtgccactggttgcttcgttgggggggggggggtttgcttgccgtgtcctcctggatgattgggcgcggtctttctgactgatttctccttcgcgtggatccgtgatttgttctgtgtcgcatggggggagtgaatcccaaagtcgagcgccactgcttgaagtttttgaaatgcaaacaggaagagcgaaggggtttttcgaaatcatgttcctggtaaaaaattgggggggtttttgaagtcatgttcccggtaaaaatttgggggttttggttctgtgggtaaatcgaaaaaaacaggataagagtgctagtactaaatctgaagtgtgcgtatgagctccatacacataactattgtgtccaaataagctccgtgccttcaccatatgatgcaacatattatgaagctttgttgcgttcatttaatctgtgtttttggggatctatttgaggtacattgatgtactaaactcttctgtaatttggtgatatcaaggttttgtcttcacatgactagatatggctcggcatctgattatgtgctttcttatgcaattgttgtcaactgttatcatctgaaatttgaaatttccaatgttagggcagtctagagttaagtttgaactgcattctttgcattccctgtgaacttattcctcacattcacttattttagctttgcagtgctattttcattctgaaggaaattgcacggttaatctgaatagattggtcagtggttgtctgcattctacatatgatccagatggtttggagatattcagtgtaatcaacaatgcagacacggaaaaagggtgctacgaaaaatgcacttggggatcctgccagtactaaaactagtaggcaacccagaagagcagctcaggcggcagcttctgaaaagaaagtgaatgatcttattacttcttctgccaagaagaagaagtctggtaaagttctatttttcaagtgtacatgatgtgtatgttaatgcaaaatcaatttcttctaaaccaaattattggtacaggcatgcttaatggttgtttgactttcatttattcaaataaactgacaaaacttactcatatgatgtataggataatttatagatgcttttctttaactactaagatgtattttcatggttcgaaacttgcaataacatattgtgaaatgatacatgcttctagaataaacaaatacattttgtccttgtttaagttgttgactattaatctattcctacacgtaaattgtttgtttaatttactatattggtgtagtgcccatgtgctggaacagttttgaaataaatttatgtcattttctaatcttgaaattccaaaacaaatatttaaatataaacgaaacaaaatctaccagccagctattgacatatatacatgtaaacatgatatatttttctgtaaaaaatatcctgcaaataatgcacacatgtctacatggatccatccacagaagataagcataaagcacaagatcactgtcaccaactctttcttttaaggagtagattttcaatttgagcttaattcttccacctcttatcgcgaaaagaaccaaacaacattctttatgtgcataaccgtttcttatttactatttaatgctgtatatctggtgaagttatgatactgattaggatgtagcaatggctgtatttggttctttgcattttaaaacatttgcttgccatgcagttggagccccttcaaagaaaaaccgagcttctaaaggtggaaggaagttgatatccgcatgtgatgcagctaattctgaaaatgaagtttctcaggtggtctctggtataccacacgatcagaaggtaaaatattttgactgaagtgaacttttttggctacttttctttttgaccactgtagagtaaatttcgtccaaaaagaatagagaaagggggaacagtacattaactacttaatgcctgttccggcacatgattattacacttttattattgagctaccaaattaacatctgaaaaatattgtactcttttggtttggttgttttagatcatctataatgtttagcctttttgtaacacctgataatcgtgcattggcatgtacggtgttgcttcactacaaagttttcacaacaaaatttggaacttatttttcctttattatttatattggtataattgctatgcgtacgtaactacttatgcatttatttttactacttgggcagcagtcagatgacaatgttgatgggaggccatgcaattccatattttcccctgcatatcaccttcagaaagaatgtggtgcgagtaacttcgccaaaggtatatataattgccatattttgaattcatcttttgatgccgtcattgttaagttttggactaggacgctttaaacatctgtgaaccataacatcgtataagtttcagggtataaagatttttctaactgctatcaacattcagcaatacatccttgcaaaaaaaaaaaacccaacaaaatgatcctgccctgatacatgctgcagtcaaattcttgaacgaaaaacttttactagttttgtgagtggaaaatatatcataacttttacactattgtgttgtcttgtttgcctgagaatgaaatggaatattcactcctgcattgtcttaggtgatgtccatgagaaattatgacttttaggggttattatataaatattatgagctccagcattagcactaggaattctgtactctgacagatttcaatgcaagttttgaatttaatttgctcacaggtggatatttcaatttaacgagatggtttatctgtcaacaaagggttcctttctgattatcaaaattagtttgttgtcatctattgttggaacctgtgccctagtaatagtacatgtctcatcgtgcatgctgtttctatgtgacttcattgtggctgtggtgctcattttgctctccataccatgttgctccagtagttgattcttgaagcgttaatcatgcaggcttagaacataaaggtgatacattgggttcggttagctcagtagaagaaaggacaacacatgctcaaggtagaaaagaagttaccaccagcagatctgaatccactagccatgcagttaagacttgtgttgggagcgatcaccatacactaaatgcacaatcagctttctgtaacacaccgcttgaagaggatgaattcagtgaactcggaaacctttcttcagaagtgtcagcaatatatcttgccatgcagcagtccaagttggagtgcattgatgaacatagtcaagattcaatctcaacagaaggttatgttgatcctgaggacactgaggaatatgatgattttgatccatatgcttttatcaaggatttgcctgatttatcactagtggtccccaagtttcgccctgtcctactccccaagcaaactcggagttgtcctacaactaccctggtacttgatctggatggtaatatatacttcctgtctgagcacttgtgttcactactacactaaggagccttctgttccatttctgtgattaactccaactactttcaagcaggagtctatttatgtaataatagttattagtgaatggatgaagttagctacatctgtttactgttattttaacttcatcattgtctcctgcatctatgaattggtgttaatggtacaaatttgaattcaaataactctagtactctacctaaaggctggaaactggtaaacaggagccactgatggactttcaaatgcatcatgattttattattaccaatttaccataccttcattggcatgaaatattaatagtcaacatacatttgatgttggtgtttgatttttgcctgctgcgtggcagtaatccttggacatagcagttggtaccgcccccacaaacaaaccttgatttagctttatcctagttttatcctattcttttttgttcatttttgtttgatctatgtgtgctcttttataaccagctagacatattttcgaaattgtcttttcctttctcctttgatgttcattttgtgtcactccaaacaatgcagaaacacttgtgcattcaactcttgaaccatgcgaggatgctgacttcgcatttccagtttattttaacttcagagaacacacaatatatgtccgatgccgtccctatctcaaagagttcttggagagggttgccaatttgtttgagacaatcattttcactgcaagtcaaagcatttatgcagaacagcttctcaatgttcttgatcctaaaagaaagttgttccgtcatcgtgtttaccgtgattcctgtgtttatgtggagggaaactacttaaaggatctaacagttcttggacgtgacttaactcgtataatgattgttgacaactctccacaggtatgcacttagctatctcaatttttgtgcgacaacatctgttcaatacttcaatctatgctaactttatcctggttttagtggtttgtattcacattgaaatgcctatttgtttcttggtggatataaattgtgttatagtggtggacgactacaaagataggtgtgcatcagttaccaggggttgtgaacttgtgattgaagctgtcaactttgctaggtgtctccagtaacttgctaattgttgtgacatatagtttccttactactttcagggtctcttaaagattatccgaaagttcactacctccagcaaaaaaaaaaatgttcttgtttacttttcaacctcaagagttaaccttggctacaatttaatatcatatattttgctcacggcattttcataatgaaactaacattttttagacaataaattggtcgaaattggtactatatttttgcaactagagttagttttgtagtaatataaattacaaagcaaaatcttgctattggctttcactggtagttcaaactctaattaagtaattatatttagcagtagcaggtaccttttagttctgaaattatgcattttattcagttccatatttgtagatccccatcaactattattgttatggttatggggacatgaataatgtactgatgtcctgcttacaggcttttggattccagttagacaatggcattcctattgaaagctggtttgatgatcccaatgatcaggagctgttgaaactgctcccattcttggaaagcctggttggcgttgaggatgttcgaccatatatagccaggaagttcaacctccgtgagaaggtagcaaccgcatcgtctctttcaatggacctgcaaatgtgatccacttttgctttggaatatgtctctgtgtaggtggtaatttcgataaatgcagaagggctggtatggtgattctgtagagtttaggctgtagtgtatcaggatcccccctgtactgcaaatcttgtatgtctttagaaccgccatgtacaatgttctccagatgtaagttcgtactggaagaatttggggatcccatgtatggctaatcaaggttactaggttcatggtggtgaactttccagcaatgcagataaaattgttcaaaaaatgtgttctattgtgattgtaaatgccgtggactgcatgctcctaacatctggacgattggtcaggtagctgaaatagtccgttttttactttgacctatccttagtttaatttatgatttcctgtcatggttgttttgccaacttatgtatcttctgccctaacaaaatggaaaaacgggtgcgaaatctgatactactttcatgcctgtctccagaaattattacctatccagttgtggtgacggtctcattagtcatttcccaacaagatgtgtttacttaacgcaatggtactgtggaggaatgctctggttgtaattgtataaatttcacgcaactctttgagttgccatcatgtgtgccctctgttattcagttgtgaagatgctgtgagcatctgagatgtcgtattgcttttgttgttctttcatatgatgggatgagacttactttgcatcgcttgtttgatttgatatccgaatgctgcacgagtcctttttgaagcagaccgattcgtgtggtttttcattttaacagatgtagtccaatttctcagtttggtgtcaatataagcattacagcaactctacaatgtttgatttaattacactagaggaaaagaggagaaaaatcttgcaaacagtaaattactgatgctcctcatctgatggtcaacattgatgattatattttgccatgatttagagtggtacgagttacaagaaataatctcaattgcaaattcctatacacttctgtacatgtcatgtattcctcctgtacatgttcttctgaatatatacacctgtctctctagctccacgatgtaaaatactcctacttctctacatcttccaaggtccaaggatgttcatgtttcagatcaattcctgaaaccacatggatgttcatgtttcatgtcagttcctgaaaccacatggctgtggactgacactcccggatttcttccattctgcgttctggcaggtgctcttggcattactgctacctcccttgacagtgagattgacattctccaaggttatgccatggcaaggtacactgctgctgcaatgcagcatgatggcctcctctgatgcacttgtgcccctgatgttcttgaacagcacattgctcacctccactgcagatttctgcaaccaaaattatatatatgaagttaagctttgactgcacagattaattaatgccaagaaattaaccgtgttaaacgtaattttgtccaaaattcagttttaactttgtatacctgttgcttgcagggtgtagaagagtcgcagtagttttggtcgatgatgatggggttccagacattgtccatgaccatgttctggaacacgatgttcttcgctgaaccctttcctccctgccatgtcttgatgcgagctccgttggctgtgccatacaacctgacattgtcgacggtgacattgttgacatgagcttcagaattatgatcacccaagctaccgatgctgatgccgtgtcccggtccacacaccatgttcttgacatgcaggttctcggttccgtcctcgattgacatgcagtcatccccggtcttgatcatgcagtctgtcacctcaacatctctgctgcgtgtgatatggattccatcagtgtttggggctgtttctggtgctgtgatcgacaggcgagacaccatcacatcggtgcaatcctccactgaaatctggatttgctggctgttcaccaccttcagatactctaccttcagattcttgcaggagtagaatgtcagtgcctgcgataggtaaaaataagacagagtttgtgagataaaatgtcatcaagattttgttgctgcattggaatgttcatggtagtaagcagaggtgtaaggacacgtaccgttggagcttctgtgcatggaagctttgagttggttttgcatgaattttgccaccaaatcttgccatttccatctatggtcccaccaccagtgacagtaagaccagtgacaccactgatcagaatccagtgccttatggtctccttgctccagtctgacctctctggagaagccaccaaactacccttcacctgaaaatttcgcagaaatggaattcagattctttttcttacaaagaaatgtatataaacttatgcatttataatcaattctaactcaccatcaatgagatgcttgatttgcatggaccagacagtgttgtgtgcttgatcaggtatttcttgcccttggggatgagcaaaactgcaggttttgcagaggagcaagctgcagcccatgtatctcccaatgcctatgcaaggtgacacaagaaaaaacaacggttagatctcagaaactatgatttgctcctgaaccaaaaaccttttgacatattctggtgtcattgcattgtactcactttggtgtcatcatgtcgtccgtctccatgagccccgtagctctgtatgctgaacacattactgccaacatctgcatcagcactatgcaagaagaagaagagtgcaaggagagatgcagagacaatgagcacagtggaggccatttctcagactaaatttgacaagttatgacaagtcagagatgaagtaaagtggatgtgctgcttcttgatgtggtgattgatggagaccattggtttgatcaggggagctatttatatgcgccgatacgtgttggaaatctttggatgttttctactcaggttgcttgtggttgattagctagtttggtgtggatttttggggtgtagtatcacaagattctgtcagcatgggaaccgaaatatatggcagtgttcggattccctggatgggtgccgcacggaaaacggagcgattcattagtgcgtgattaattaaatattagctattttttttcaaaaatggattaatttaattttttaaagcaactttcgtatagaaacttttttaaaaaacacaccgtttagcagtttgaaaagcgtgcgcgcggaaaacgagggagagtggttgggaaacttgggtgccgaacacacctgtgcctgaatcctgagtttctgttttgcttcagcaaaaggtctaccttttaaggataattccttccaaattagccatttatgctctcaaatttcaccactaggagagaaaaaaggacattaggagataaattttacttagcaaagatgctcaattgaaacaataaaatttcttcagtactgctgcacttcagagttcagcttacatgaaaactgaacccctgactgatgtacaacctggcctcaagaataaatattaacatagcctaattgaaagtgaaagttaattacacaaaaattccattgaaacacaatatgatgacctatgctcttgtttgatcatgtttctctcaaaaatcaactgtctagatacttcagatgtgagctcttagctcaaaaaggaaacacttggggctcaaagagagcttagtaagggacagacttcctatctgggaattttcgcatggccaaagattgatcatgtatatcttattgaaagtttgggggaatgcattgagtaagcaagtgaacaaccttagttgaataggggaaggaacaagtatatcttttttggtttctggaaaccttttaggacagactcacagctgacagatagtatgtatatttcagtttattttgttctttcagttcatctattttgattataatagtagctctcactctatggttatgctaagtatttccagagcaaaaatcttgaaacgcgcaagcaatcagaccaggttatttttatttggaggaatgccttattttaataaaaatatgtgtgtcccaagtttttgaatttgcacctgttcaatttacgaaaattctgagaagatatattgacatgtagattagccacagatatgcacacacaagatcatgccaaaaatatatgatgacacatgtattataaaagaataggagattgtttttctttgacagttgacattttcttcaaatcttggttgaaagttaaattatcaaattcttcattgaaacttgcccctacaatacatttggaacttggaagcaacccttttcccactcacaggttgaaaattaaactaaaatcgacttcattttcaagttgtaagtgaacaaagctaagcatcttttactaacaaacgaaatcgacttttttttcggattgtaagtgaaccaagctatgcattttttttactaacaatattttagtagaaagattggtggcagagttatataataggtggagtagaaaaggatggcaatgtagtagctaaggaggttcccctgccatatccattgcccattgggttccttagattctgagaatgccaatttggtattttgcttgtacaacaaaagcataagatgttcagtaggagcaacaaaagaaaacgaatttaattcctcgtaattgtccaattccattatttggatttaatcttgcacctgttcgatttacgaaaattctgaaaatatgtatggacatgtagattagttgaaatatatgcacgaggcaagatcgtgccagaaagatatgattatatgagtctcataaaaggttaggagtttgtttttctctgatagttgacatttgtttttctctgaaagttgaaatatcgagagacctttgttggttctctttttcctcaccaaacaatgagaaaatgaaatagaaggggctgtggatatgaatcctcaaatgctagaagaaagggactttttttttttggtaaatctaaatcaagagcatctcgatttagtactaaccagcgacaggacattgattggaaaattttacttaactatagtactagtccatcaaataagtagagaaatacatttctatcacctatgtttcaaataaaattttctcttaaattactcatgggatttacgaatccgattacaccattatgttcgtaacaaataaattttcttaacaagatctcacatgattatatttttgatgaaaaattacaaattacttttataatatatctaaattacttttagatatcattaaattacttcttagacatataaaagtaaattcaataaagtttataagtaatttatatatattatagaactaacttaaaaaaaataacttatcacgacattagaagtaaatccattgtgggggggggggggtaaaaaaataagtctatctaaaatttaaatttaatcaacacaaattatgaaattgactaaaaatgataataaaataaacaactcataacattattaatgtataagaagtatcaaatttaaaagtaatttatatatatatatgataaaagtaacttacatattaataaaagtaatttacaacatagatattttttaatcaaaatataatcatgtaagatcttattgtaaacatttaattcattgtaacgaacataatggtataattggattatagatcagataagtaatttaaaaaaaaattctataagaagaaaaaaagatgtggtagacaatgcaaccggacttgagagtgaagtctctggttaaatacagcatacggtctctgtatagtcgcgtctttttttttttcatatatcccggatgtcccattgtggatctatctctatcaaatataatacaaatagttacaaaaaaaattgttattagagtatattgacatgatcttttccaatgatactcacgggtaattgtatcgccaggcatgataatattctagagacatcaaactaatttcaccttgacttaaaattaaccgctaaacaaaattaaactctgagtttaggacttgatcagattcagtctccgaatatgttactactaccatagactagtagaagtagtagccttataataggtctagtattcggactgctcgtcagcccttgtgtataaggtgagtgagctactgtttcacttctgacaaaacctgcacgccgtcagcaatggcgccaccgccgcggaaaaggcggcgagttgacggcagcggcggaaatggtggcaactatcctctcgtcgccacccccaacgacggcgtcctgccagtggacctgctcaacgccgtcctcctccgcctcccggcgaggccggcgtgccgcctccgcgccgtgtgccgcccgtggcgc

SEQ ID NO: 10262 - DNA, 18341 bp, Oryza sativa
ccgccatagggatgggctcggcgctctgcgatgggcggtgggcacggcgccgcagaggcgtgtatctggcaccggccccacgacggccggcggcatcgggcggcgagcatgggcctgtcgggcaccagccacgcgacggccagcggtgggcggcgtgaagctagaactgcaggcggcgggcgggaggctagcgtttcgggattatttttatttttatttttttcactgaaaaatatcttcgcatgtggttggctatataaaccgtatggaaaaattccttttttgcatacggttgcgttgcccgcatggagaaatagcgatttttgcagacctttccgtgcatgtgggccggctaaccgcatgcaaagatcgattttgcctgcacgcaaagatttctttagtagtagtgtgcttgggtagccgcagcgagaacgacctccgctcctcgagcgagtcctggagcgtgtcggcgtggtgcgcggcgcggtgaccgttgaaggggtcggccaccgagtggtttggggagagcgacacggacggcgtcgccgcgggcgctcctgcgtcatgcccgccaccgccggagtcagcaatggagcgcggtggcgacagtgtgaggcagagaggcaacggcgaggagaggaggaggatcgaagcggtggagagagagagagagcagctgcgtcgggagcatgttctgcaggatggtgaggaaggcccagcagcgaccatatctacgatccattgccgtgaattggagctctaagctctgagctgtgaactcagctagcttcttgctgatctactgcctgagctgctaagctggacagcagcgggactgatgccatcgccatcgccccgatgccgagctgcttgctgctgctttggctggccatcgggagaggaagggagggagaggagaagaagaagaaaatatatacgggagtggaaagggatagaaaacgtgatggcgatggtattgtttaaatttgataaaatactaatggtatcaaactaatatcatgaatagtacctagtaaaaaacggatcggaccggcgattcaaccgaatagtcaatagtagtggtattatttcaatgttttttttatattttagacatttttaataaataattttaataaaaaaagcttgcagtaacttattaacttatttccaaaaatgaaccagccacaccattgtaatcggtgtggccaatctgaacagccatgccattggtcacgcgtggcatgtcaaagggtgcctcatggcagacgttgtcgttgacaagatcaatctggcgctgacgtggcacttctgccacgcctagctccttggcgtggcaggtgtagtctgccacgcccgacttgttggcgttgcagtgcatctagcccaattattttatatttttgaagaaaataattatgataagaaatttcatgtgttaggaatatttttattaatttcatgaccattgtggtttatgatgaacatgctaggtttgtatttagaaaattgatactaaacgggtaaagatcggataaagtttttccggtatttgtgaggtattactagaaaacttcttggggttttgattaagcaagagatttgatctacctagcattcgccaaattaacttcaagacgataatcatcatggcaacaagtttagaactaggcaacacttcaatatattttgtgaacaaaatattcatgaaatattggttgccacacttgatgaagatattctccccaaattcaaaggtatttatattagcaagcatacgacaactgcatacgtcgaaggacgtggttactcaacagttgttgggaacaataaagtgtattaattcaaggatttttcttaggatcctccctttacatggccctaggggtctagttatagtcctattacagatccccctattagggtttagattttacaggggaatttacatggttgcccttatgaaagggacacttgtatgggtatacagtgtaattgagatacatgggcctctaacgggccaattagcgaacgctggcccactggccaatgggctagagcggctgggatggccccttgggcctccttggagctggggttgaaacggcgaagtcatcctccttcggcatgcacccttcgccatttagtcttcgcccaggacgcatttggacttgcggggtcccaacgcgactcttcacccttcgccgcctttgccccatagtcttcgccacgaggcttcgccccgatgaatcttgacgtctcgagtctgaatcctcgctggttgcatggtttcggcaagtctggtcgaagggtctcatgacataccgccaacaatagttatatctattaagctaaaaccgcgagtgaacggaatgaagacctacaaaaggagtctaaatggatgaacctgagttataagacggcattgtatagagagaataaaatgaaggtttacacaagaaggtagaatgatgacttatgtgccatattaactacaacacataggcacaactattcataatttgaaggctacaaactcaggttgagacaaagaagaccaaggatgaccaactacaaatgtctgaataatagagatattttattcaagaccttgatctggagaaatggatgtgaaccaacaattattcaagatagtagtactaaagaaacatattgtactcatttatcctaaaaatataaatgggtatatcagactaggagaaaatatatgaagaaattaaatgatacaaaaatatatgttagaaatatacaagatcccttcaaggcatgacaaaccatgctactactcgaagacgtatgactgaaggaagaagtttacaattttggcaagtgccaagagtttgatcggatattgacaatgtatttggataaaaagggtgcgagccatctacgacaaattttctttaaagattgaattcccaattttctctacactaggagaatcagcatcgaagtttatgaatcaacaaggagaaaataattagaggacacaaaattattggttgaaaatataccttgaacaagatctatccagggtattcattgtcagatccagcgtattcagacctgaaatggactcccactctctcacgatgtggccgccgcaagacaagaacaggagaaaaactagggttctaagttactctaggacaaattaatttgctttttcatgccttcttctccttacggcgctgggttatatactcccagtcgcattttcacccacatgttcaaaattacagcgctgctgacataatcagagtaaaaatcgtgctcgcaggcaacgacaaatactaaatagtgaatagtacaagataactccttctacacctttggatcctgcggtaaagtttaatttccttcatccggccgtccatcttcacttacgttctcagcgaaacgatatgtcctgaactctgcttcttctctgcttatctgaacttctctgcatgtctgaatatttgatctccatttcctactctgaaactccccatcctgacattcatgaccataaaaatttggagattcatgactagagctagagatttgtacttccgacaagtgcaaggagtttgaatttataccagtggtatatctggataaaaagagcataaagcgtatatggcaaattttcttacccacaatagaggaatcaagctaccaattttctggacacactcgataaacactttcaactccaagagctatattacaggccaatcatttggaaagcaagactattgacgtacaacaagaataaaacgacgaataaaagtgcgactgaatggaaataggtcaatataagtaatacttgtacgcaacaatggaaaaaattcaagaataaattcactaccatctaaattccatggattttgaaatatctcacaatatttcttaagcgaatgtagtgaatcatacaccctgattgctaagaaaaactttcttactccctccatcccaatatattacaacctaggatgggattagacccatcctaggactacgaagtcctaggttgtaatatattgggatggaggtatgtgactcgcaaataagcaaccaagacttggatttctaatgaaggaaatgggtagatatagttaaagaatatgacttcaatgttcgatcctattcaagaagggataatgtaataatcgccataagaatacaacatctggttatggtatgaaaagtaacgaagaaatatataaggagatgatcagttactatgaacaaagtattattcatggacatgtgagacagtacaaaattagaagtcaaaaatttaagttaaggcgttacaaaaggttggaagaaaataatgttcaaaagaagatcctgcagccgacaaaaacagatgagaatcatgcaccagttttatctcgaggatactagaaaaaagtctgacctcctcaataagtgtatatatatatatatgctcgaaagatcgaatcctatgcagaaataccctatgacatgtctctatttggaaaggctgtcaagtgtcggattttcaaactttgaaccacatgaagttaaatcaagtaatctacagctttttattacccaatgcatacatccaagaatattccaagaatacaagttatctaccagcagattaatcagtcggatatccggaattttgggaaggaccaaagaaagaataaaattcccacactactacctggactcttcagaaatctcgaggatgagattatttaatggggtaggtttgtaacatcctaaaaattaactattttctagtcatgtgtcatgccgattcttatatttctaataaccttctaaacctagaaaaaaataattagagagacctcctaaaactaacttgcataaaacctctccttggtattcaatctcttttgtggtttttatttaaaaatatattttgttaaattgaggaatttcttgattgaaatctaattttgaatattaaactttttttattaaaaatcctttattcaaattatttgaaacccttttatgaattatggtccaagaaaatcctccaaaccaaatccttgcaattccaattttattggaattaattgttgacccgtctcttgatattaaagctatccttagttctccttccaaatattccaaattcctccttttgatttagctactaatttaattcatatggcttgattcctcttgggcataagaatagtactagaaaggtctcgcgcgctgcgccgcacgggtgtaatagacgtgtctaagagccgcacgggtgtaatagatgtgtctaagagcctaagacacatgttattggagcttacctgtcacatcctgatttttgtttcaggatttataaataatttaataaattaataatagaatttatgttaaatgttctttaatttacaagtgaagtaaaatgtgggaaataaaatttcctaaatctaaagcatggatggatttaatttttattaaattctccatgattaagtcaactctctgaaattttctcggatttttcagagctcaattcctaaatgatacaaagaacagttcagtaattatttgatcattaatgatctaattataattgttaagagcttttcttgtttaaaaatccttaaattataaattgttgtttaaaaggaattattagaaatgattttaaaagcctagaagagaagatctaattttaatttgctaaatctcaatataaaattgggctagataaaattttgttaaatactttgcttaattctataattcctagatttttctgggatttatttgagctaaggaagtatttttaataaatggaattgcatttcatgaataatttaaattgaaaaaggtttttaaaagtcttcttttggctttgggccgaaagccggcccaaaaccctctctctctctctttccctcggcccagtccggcccaatccgccgagccgccgctctcctctctctctcagccgctgacaggtggggcccgtctgtcaggcctgtcttcctcctcgcgccgccgccgccgcccgaaaccctagcgcaagccgccgccgtctccttccaaatccggccgctcctttccttctccggccgaatcgatagaggggaaacaatctcctcgatctcctcttccttttcccctttggaaacatcggctaaatcggcttggaaagtgttggattcgagatcgaatcggattcctctctctctcccgaacccgatctttccttctcgtcaccggtcgccgtgggccttcgccgccgccttcttgcacctataaaaggacccccgagctctcctctatccgccgccacctttgctttagcctgccgtcgcgtctagcgccgcctccgcgtagccctagtcgccgccgtcgttgccgttggttcagccgcgtcgcgccgccgttgcagccgccgtcgtcgatcgccgtcgccaccatcgggttcgcaaggtcgtcgccgtccccgtctgccgcttcaccgccgccgaagaccgccggagcgccgttgccgccgtcgacccgaaggttgccgccgcttcttcctcgtcgccggcgccgtccgttgctcttccgccgtggttttggtcaccggtgagttcgccgcgttgtcctctatccgttggtgccttccgttcgtgtcgaagcgccgccgttcgccggcgagcgtgcgccgtccgagccgccgagccgccgccgccggaggtgacgtcgtcgctgacgtcatcgttgccgttccccgtgagccggtcgtggaccgatcgatctcggccgtccgttttggatggattgatctcggccgtccgttcgcgtgaaccgtcgcccgtgcgcccggtccaccgaaaccctagccgctgacgcaataattctcttttccttttcaaaaataattcattattgcgtcataatttaattaaaatccatataaatgcgtcataatttaattaaaatccatataaaggttttaatccgatttaatctttaaaaattcataactaattcatcttaactcagtttaatgtggttcaagttgcaaaagttgtataaaataaagatctacatattaaaattgtccataaattgaattaaatttatttaattctttttaaatgggctttaaatagatttaatcttgtaaaattcataataaattcatttgaagtcagaatgaggccgttcaagtctcataattcatctaaaattatgatctacatgtttgtttactttttatgtactgtttatttggtttttattagtctttttcttcgttttgcgtgttagcttgtcgtttccgtcgttgcgaaggttcgcgagtgcgccggaagtattcaagaagattaattgaagaccgattattgcaaggcaagtcacacagatcctaaacaatcctttgagcatgttgatcctatatttaaattctctatttatttcaactgtgcatttattttcgaatgtcattgggtggaattaacctattctttgttatggcccttttgttcttgattactttattccttgttaccttgggttattataattggactagttgagctttatatatatattggttcaactagatattagatataattgcttagccatgcttagaaacattagcacactattgggataatttatgactcattattatttaatgatggcttaatgatagttcacgatggtcaatcgtgattggttaattaattatttgccaactaaaacttgatgatggtgggttgtgagcacatggttttgagagtcgtgctcatgacaattaaggaccggttcgcgagctactgttgtgaaatattaaccgtgccaaccacaagccagcgtgggcaacggctttaccttttgtatagcatgattcattgcggagcaccagactgagaagtggcggagataagcccacgggggtcgctggggagtccatgccttgttttataagggggtgattatgatccaggaatggtgcactgtggtgagttgtgttgtgcaaagggtattgtcacagcctctattcgggtactttccagtatcgcgacgcatggtagacatgatgttgaggctgtgtcttgtgggtacagtggtacacctctggccagagtaaaactattcgaatagccgtgcccgcggttatgggcgagttgagcaatgtttttcgtgattagtcccacacctctcaccataactatggatgttatacctggtaataatttgcttagctcctggtttggagttagatctgttcagccgggtatggttgttcagaatggttgggcctgtgcagcatgggtgtgctgttcagtgttgattaaaatttctgattaattactccactgttttacttctcttaaatgttttgctaaatgctgcttttgcaaatgagcctatattatgccatcctttggtatccttgtgcacttgcatatttgctgtgtggcttgctgagtatgttatatgctcaccttgcaataatcaatcaacctcagttgaagaaaaaggatccagaaggagaagacgtttggcttataccccagttgagctgcctgtgggagtggagccggagcttcgctagattttattttttccgctgtagttttcttcatggtgaggactaagtgcctcataagtaagtatttatcgttttagttaatttgatgaatctgtatattaaattgtcagtttgtgtacctcggctgattcctggacgaggatttaatgcacaaataagttcggaaattactatagaatttccgggcgtgacattaccgaaagtgttatatttagctggctatttagcctgtgtgggaacaacagaacaagtaacgcatttcaagctgtaatgagcttgattggttttttagatcgtaaagagtctttcccacccaaaaagctagccaatgagatgaggggctcccccacttatatcttagatccttttttcttccacaaccaatgtgcgactattcaacaatctccccattcacacattggtgtcctttagcccttcaccgccccttcaccgtttctccacagtcccttaggtatacgggtcccgcaggcacccacgatccatcaagccagagatgttgaactagccaggctttgataccagttataggatcgtaagggcctttcccaccccaaaagctagccaataaagtgaggagctcccccacttatatcttaggtcatttgcccttccacaaccaatgtgggactattcaacagttttttgtttaaatttgggctcttacatactgctatgatttaaggatgtacacctcctgttagattcaggcactcagtaagttagcatgttctcaagcttggattacatacggtatgttcatctgttagagccgttgtttgcacccaaatttagcacctatggatgaaataggggaaaattgtcaaagtttggaaagcgtcgggtttccttcacagggccggtcagaccacaggtatgtgggtggtttgaccggttagtagggccggtctgaccgcagtcagggtccgagcccgaatttgttttcatcgggtctcggtttccttgctcgggaaggctatgtttcgtgtttcctttggtttctatcccgagttggatgtggacaagggtctgtagagggcaagaccaacccctatttaagggacaatgccggttcattgtaaatcccccgaatacaatttacttgaattgttcttttatcatgttttctattttaccctagttttagtccatctttgtcgatttgcgttgtaaattgtccgccgccgctgcgagagtgctgcacctctttgtaggtttgtcctgaaaaccttctgttttgcccacgagacgggtagttatcctcatatcgatctaaatcagcttagaggctgattttaatatctaaatcggcttttctagccggtttagctgtttttctacaaaaccatcttcatttggccctttggctagatcgaggtggttggcgactccatatcaccgcaaggcgtttaggtgttgtgatcgtgcttgttgacttgtcacaaaaaattaccaacacacaatttttgacgactccgttagggaacaatctaatcggccatatcacggcctaatttcgtttaatctagtagttttcgtcaaaccgatagtttcggccaaacggccgaaatcaatctatgcatatactgccgtcgttgcattgttttgtcatctaatcgagtgtttcggccgtacagctgaaaccgatctatactcgcgtgcgtcaaggcagcagtagcagggccggcagcatcttgctgtacacggcctgaaagttttgagtctcaatcctattcggtttgctgtgtacaaattcctaaaaatagaagatcaggcttacagtcaaagccgatctattactgttaaaaaaaaatcaaagccatcgcattgcatcggctattaccttgaagattctgttttcggaattggttaggtacagtgacatatatacacaagaaaaatcaagaccgtatattaatttattcagtcaaatatttcggctataagctatatggctggatttaatcaaggaatttcttcatcaactataacgagcggaaacaggttcaacaatattactacacaatacattaggaccgatcaaggcgtcatggaaggaaacgtcccgcttcctcaagttgtaatttcaccaaaagtaacctccgattcacccaacccatcttttgctaataatcgttatgtagatgcatatactacttcttttttgcttctatacaatatgctcgtaatgttatgggggaatcaatgggtgtttatacagccgattacacaggaatcagctatatgcagaacttagctaacggtatgactggtcgtgacaccggtttaaccgcaccctatgccggtcagaccgtgcctaccatagccagttagaccgtgccctatcctggccagatcgcgcctcctgtggccggtctgaccgcaccactgaccaccggtcagactgggccatgggccagtcagaacgggtgcttggctggtcagaccgggctatctatagccggtcagaccggtttcctgggaatttctccaggttttcataccacgactagcagtactaattttaattattattcatcacctgttaatactattagtcatgctactccacatatccctaatgcttacaatgatcctaatagaggatattctcatgacaccgggtatggccaatatattatattgcgccgcaacaaccacctcttaggccaccaaatacaccaccaaatctatataggcctaaaaatatggaggagttaattagtatcattattaggaacatatttgggattgaaacgaaggatcgtgctagggagtaccaaaagtcgtatcctgatttttatgacatgatcccacatcctcgtggttatagaattcctgaatttaccaagtttagtggtgaggatagtaggaccacataggagcatgtagatcaattcttagcgcaatgtggtgagactagtaatatggatacatgtaaattgtgcttgtttcctttatctttgtctggtactgcttttacatggtttacttctttaccagcaaattctatttttacctaggctcaattagaataaaaatttcatgattatttttgcactagtaaaacttgagtttaggttatctgatttaacatcgattaggcacaaatacaatgaatatgttgctgattatattgagaggtttagagatattaaaagccgatgttttagtttgaaaataactgacaaagatttggccgacattgcatatgatggattgcttgattctattaaagagagattgaatggccaaatatttcttgatgttgatcatgtgttgcataaagctctggatcaggaaagccgagtggatgataatagcttaaatgctagtttagatgatagtgcaatatcatgtatagccaaaccaagcgatggttcgaattgtgttaatagtttggacgatgatgctataacgagtatagtcgaatcaagtgttggttcagattgttttattaacttcgatgataacgcaataaccaatatagccgaaccaagtgatggttcggattgtgttactagtttagacgatgatggaatagccgtaccaagtgatggttcggattgtgctgttagtttagagaatgacaccattgaaaatatagccgaactaagtgacggttcggattatatcacaagcgaaagtgaaatagcgttgtcacctaagaccgagtcaaaaattgatcatgtggatgttggaaaatatgataataatgtcttgcgggatagtagtgaaatagaatccaaagaagctatgcatacatatcaaaggccgtatcttgaacacgtagattcggtcccatacctgcaaggatttgaggtgcccaacttcacaaaattcacaggtgaggatgctagaacaacaatggagcatatcggccaatttattgatcaatgtggtaaggccggtagtaatgatttgcttaagttaaagttgtttcctctttctttgtcaagttttgcatctatatggtttagtttacttgctcctagctcaatttctacatggtcacaaatggagcatgagtttcctgattatttcaaagatgcaagcttgatggagcaaagaccgattgatacttcatcggtcacttgtgagactatttcggttacgcttatgcctaagaccggaattgttagtaatcctctccctattagtactattgatgatgataaaatgaaagggaaaaatgttattattggggatcctcggcccgagacaattcggatcaataatgcaaaggccgaagatcgtaaggttacaaaggatgagtcatctagttccatagagactaaaaagctgaagctcacttttgagatgcttatggctaagtataagaaaggattagccagtcaacgatttgataatcaaactagtgattcaaaaagaccaagatcatctcgtaggaagagatttggtcaaacatcaaagcaatcagagccatcaactataccaactccatacaaacctccagttgtgatgccatggtatccatatccaatgtcaccatttggttatccttttatgtattacatgccatggatgcatcaaccacctataccgtattatcaagagtggaaggaatcacctaggtcaataccaaatcattcatctaattcaagacaaaaccgtttctcacaaaagaatcggtccggtggatcaaagatgaaaaaagtaaagaaggtgtgggtgcgaaaagaagccaaagctccggaggtcgttactattaaggaggagtctcaagatgttcgagtacctactggagatgcggcgaaaactatacaagcggagaagactgaagccgacgccgttactgtcaacatcggcggcctgaccaaaatagctggccggtctaaccgctagacaacggccagtctgaccgatggtttgcagccggtctgaccgggcccagaggtcggtctgaccggggggcattggagaagagtgggaaaattgagagcaacacaggagcatcaacttcgaccaaaaatatcaagaatcattgcttagctcctggaaaataaccatagccgaagttgataccttctggcttatttcgctctcaaaagaggaggctacagcatcttcgagccataggtcaaaaagaaaaagaggtcgaagttgtagagaataaaacatgagccttaaacaacatctaaacgagtgtggagacctaaagagataaaagttgagggaccggtgatttcccatagaagcaatagatccaatttgatgagagaagaatcatcggtcatttcagataagtctccttcacatgacgctatgggtattagtgcggtattgatcctgccttcgaaatcgtgcaatcaagaaagccgattttgcttggggagcaaggctttagtatgctcatcaagacataaagagagacgaacggcgatggatacaacatcacatctttgagccgccgtttgttggatgctaatgcaaggtatgagtttattgtgttcatcatcatattatatgcatatgccatgttggaacattgcttgatatttagcacatgtgtgttttgcttatcaaatccatattatacatacatgttgcaaatgccagttctaagtagtggaattggtaaattggcatataatttgtttaaagtatgatttggctcatgaatctttgatatttatttaaagccaaatcatatgtgtttttatggatcaccatataatatatagatttcatatttattgcactatgaaagttttgcttattagtaattcggctaatatcaacggtcaatgtgatgatttgttctagagttgctttctttaggaacattggcattgttaatattttgcatacatgctcaagccgattacttacatttatagtttattggaatctatgcatgtgacacatgactttggtgattcattgttgatcatacttcaattggctaagtgttctgatgctatgatgattattatttcaaaagccacttgaattagtattcatctagacatattagttggatattataatttttcatatgtctagagggaaggaattttggttcaataatttgatacaccaagcatctggctattatgtgaagaaaaatttatatgctaaaagccgatgcttgatttcaaaaggttggacgaaattggcaaaatcacatactaggggcggtttgaccggtattgcacggccgatctgatcggtggtaccgacggtctgaccggctctgcatggccggtctgaccgagcagacagggtggtctgaccggcattgcgtggccggtctaaccgatcccagataggaagctgggaggcacgttacaattgattcaaaggccgaattaatcgtgaattcggacatttgtgcccatgagtcagaagaaaattggagaatccctttgaatagaatatttgaaagatcctagtcttagggttgatcggaaaattcggcggcaagcattcaaatgtattttgcttgatgggagttgaatagccgaaatatggatgaggtacaattaaagtgattagataatgattactctagagctgctatgggagatgttcatgaagggatttgtggaattcatcaatcggcccataaggtaaattgtttgcttagaagaacggggtttcatggccgaaagtgattgatgattgtttcaaatattatagaggatgtgaagtttgtcaatggatcggcaatgttcaattagcgcctaccgctgtatagaatcttatcatcaaaccatggccgttccgagattgagctttagattttattgatcaaatttatccttcgtcatcaaatgggcatcggttcgtgctaattgctaagaattacttcaccaagtgggccgaagccatgccgttcatgaatattacttacagagaggtaattgactttgttttgaagcatattgttcatagattcggtattccttaaactttgaccaaggagcttcttttgtgtccaaagaggtgagaagttttgtcgaatcatatgatattaagttgtttagttattctccttactacgctcaggataatagataagccgagtcgagtaacaaaatattattgaaattagtcaaaaggaagattgaagaacactcaaaaaagtgacatgaggtgctttccgaagcattatgggctcatagaatatctaaacatggtgccgctaaagtcactccttttgagttggtttatggtcaaacaagccgttttgccgattgaggtaaatcttggctctcttcagtatatcaagcaagacgacttgttgattgaagattacaagatcttgatgggaggcaatttttaagacgtcatcgacaagcgtttgaagactttggaagagatggagacacttcaagacagtgttttcagagagtgatcaatgggaaatacttgaagaaatacttccctagcgtttggcaagatgcttaggaagtcccgtggccggtaattggattatcaccctaagacaacatgttctatgcttttagattcacgatgttcatcaaaaaggcaggggggcatgtgtttacacccaaatttggcacctatggatgaaataggggaaaattgctaaagtttggaaagcgtcgggtttccttcacagggtcggtcagaccacaggtttgtgggccgtctgaccggttagtagggccggtatgaccgcaggcatgtgggcggttagatcatcagggtccgagtccgagtctgttttcgtcaggtctcgggtttccatgctcaggaaggctaaggctatgtttcgtgtttcctttggtttcaatcccgagttggatgtggagaagggcctgtagagggcaagaccaacccctatttaagggacaaggccggttcattgtaaatcccccgaatacaatctacttgaatcgttcttttatcatgttttctattttaccctagttttagtccatctttgtcgatttgcgttgtaaatcgtccgccgccgctgcgagagtgctgcacctctttgtaggtttgtcctgaaaaccttccgttttgcccacgagacgggtagttatcctcatatcgatctaaatcggcctagaggctaattttaatctctaaatcggctcctctagccggtttagctgtttttctacaaaacccatcttgatttggccctttggctagatcgaggtggttggcgactccatatcaccgcaaggcgtttaggtgttgcaatcatgcttgtcgacttgtcatgaaaagttacagcatccaatctacaagacgaagcactctgtagtatgatgaatagcggctcaaccggtgaggatgccagcaatccaatctacaagactacaacatggcaagccaacattgtctcccgtgctcttcctaattcgtgccgctcacctcctaacccatttttcttaagttgtgcatggctcgtttcgtgctagggatgttgacgaagccacatccatagcaactaaaggtgaggaaaaaaggcaaatctagataagtaggactaggttctttttttttacccctagcatatatactaataagaacttcttagactgatattacacttctataagactaaaataaatccctttcatatgacctttcatatgactaccggagaacatcctcttactataaagttacaacccactaaatattaaagcttaacaagaaaagatgccacatcatcttctactaacaagatgacatatcattatccactaacaattattacatttaaacatcacgaaaacatactatattatctatgtttaaacattatgcaaacatgctatataatctataattttataattattaaattttaaagattttaaaatgcaagcatgttaaatcatcggagaagactaggcgtcgagagcccgatggggagtggtaaatcgggcgcccacgtcatgctgacgtcaacaagatgcatgcatgtttttttctcttaaattatctatccattcatgatccgattgcaccattaaatttgttgcaattaaatatttaaaacaagaacgcacatggatattttccaatgaaaaaaatatttagcttattattgaattatttttaaatgttgcacgttgttacaccaagtatatcggaattgttttactaagtagatcaaaaatgtttcaatcgtttaaatcgggcattgtttcaccttatataaaaacaatgtttcagcaaatagcgaaagaatgtttcaagtcactgcaacatttgattcatatatagtgaaacattacaagtacattaggtgaaacattttttgtggaacaaaaaaacaaacgaattcccttaacagagagtttctataagatgtgggtaatttgttacaacagaatgtttgaattcactacaacattagatctatttatagtgaagcattatgagtacactaggtgaaatatttttgtggaataaaaattgaaacgaattcccttaatatacgatttccaaaatatgtaggtaatttgttgcaacgaagtatgtggtggggacatgtggcgagtgtttacaggggcacacgtggtgcgtggtgggctagcgcggcatgcgcgcgtcgtgcggcggggggagcgcccgatttttgctccccctgcaggtcgaccgatccctggtgtttccgcaaaccatcatgtcacataattaacataatatttcaatgagtaaatttcagaaaactacaacttaagtaacaaaactatcagtttgctgcaacattagcgacatgttt

SEQ ID NO: 10263 - DNA, 793 bp, Oryza sativa
agcaatatttaaggacctgcactagagttaagcaaatctctcagggcaaatgtgtgtttttttgcatcaacacgcttttggcatgccaggtgggaccatttcttgaagaatttgctagatggtggacacaaagacatctgatgttagtccagacaatgtcattccaataacaatggacaaattaccaccagagcaaaaggcagaatatgaagatctgatgaataagctctaaaatcaatacttgcattcccttgttcagaccagatcaggaacagtaattcagaggtataaagtaaatcttctaagcaatgaagacctagagtcaagttctgggaaggacaaggaagtcaagcaggaagaaactcctgaagaattcaagagtttacaagacaggattgattatgctgtacacaatgctttgatcaatcaatcaggagtgcttgtcaatactttgactaatatgaccaagtctgtagttgatggtactattgctgaacatcatgccaaggggccaatattcttgccagagggagtttttccacaatacaggccattgataaccaatcagcaacaacccgtgccaggactagtgccagaacagccgatatcagcaacatcagctatgattaagcaggaggtgtcagcatcggcacagaatcaacctggattcaatcctcaagttctgatgagacaacaacctcaacacatagggcagaacattcctagagtttctcctaaacaagttgcagctatgtttggccctaatcagtcagttgttcagccgatcttgcag

SEQ ID NO: 10264 - DNA, 1182 bp, Oryza sativa
cctttgagcggccgggaactcattttgaactctacaatgtgatccagaaacctgacgaatctttgagtgattacattcgacgtttttccgagaagcgcaacaagatctccaacatcactgttgacaacattattgctgcattcaccaatgatcaactcatcggcaagttcgaacgcaaacctcctagaacggtcaagcagatgtatgaaggcaaaatttgccacaagacacgcaaagattatggtctttgctgtgggacacccgaagatcgtgtttttgctcgtggacaccgcaaaaatgtggtaattagctagaggacaccagccgcattattttattatttgtcgtcgaaacggagagagaaatagcgttgaaagtaccaaaatgcccctagacactgttcttcttccttctctttgcttctcttctcttcttcagcgagggagcataatccccaacttcaccggcacgttggcggtgagccgctcctggtgaactgtcgtcatcgtcatccaaccatcaccacaccaccacgtcctggtcgtctccaaccaaccaaattcttgcacacacacacgcttgcacgcagctccatcgagctatggctggagtgaacaacaacctcgtcagcctcaagcctgccgcggcggttccgcagtcggtcgcctcgtcggcgctgccaaagcgcgtgcacgtcgcgtttgtcacaccctaaaaatcccaaatgtataaattgttgtttaattggaattattagaaatgattttaaaagcctacaagaaaagatctaattttaaataataaattccaatataaaagtgggctagataaaattttattaaatacttctcttaattctatagttcctagatttttctgggatttatttgagccaagaaagtatttttaataaatggaattgcatttcatgaataatttaaattgaaaaaggttttaaaaatcttccttttggttttgggcccaaaaccccctccctctctctccccggcccaatcgcgcccgacctagtccgccgagccgagcagccgctcgccctcctctctcccgctgacagatggggcccacctgtcagggccgtcgttttcctcccgccacagccgcgccctaacgcgcgcaagccaccgctgccacccttccaaattcgaccgctccttttccgat

SEQ ID NO: 10265 - DNA, 839 bp, Oryza sativa
ataaacggcgcagacgactccatcccacaagcagcttgaccagggctacgcctaatcctctacaccatcaacatcactgtagcactcctcctctgatgaatgattgcaaggtgagtataggatatactcaacaagccacgcagcaaatatgcaaatgcaagatataacaaaggatggcataatatagtctcatttgcataaacggcatttaataaatatttcagaatttaataaaacagtaaggtattaattaaacaatattaatccaacactatacaacatacccgttgcataggtccaaccattctgaacaaccattcccgactgcacagttctatctccaaaccaggaatgtaacattccaaaccaggagctacacaaattattaccaattacagcatcatttattatggtgagaggtgtgaaactaatcacgaaagacattgttagacccacccataactgcgggcacgactattcgaatagttttactctagccagaggtgtaccactgtacccacaagacacaacctcaacatcatgtcaaccatgcgtcgcgatacttaacaagtacccgaatagagattgtgacaataccctctgcataacacaattcaaagcagtgcaccattcccggatcataatcacccccttgtaaacaaggcatggactccccagcgacccccgtgggcttatctccgccacttcacagtctggtgctctataatgaaccatactatacagaaagtaaagccgttgcccacgctggcttgtggttggcacggttaatgtttcacaaccgaaaaccgtgaaccagtccttaattgtcatgagcaaaa

SEQ ID NO: 10266 - DNA, 6533 bp, Oryza sativa
cgtttccatatagaactattcttgtcctttcttatccggaactcattctatatatgaggtttatttccgtataagaaatggtatgtggtaggccccgccgagtttagttgattactattgggtatgtgttatccataaccctgacagtagcccccgacttcaatgcaaatgaacgagttgaggttctcgatcgaagactttggaacaactatcatcgtgctcgcttgaccgttatcggtgagatcagagatagtgctagattccttttattggccttttagacaccatattaggtttgtctagtttaatctccgatgtcggcaaagaaggtacggaacatgcgactaagtctgtcgtcttgctgtaattgagagtttggattgaagtcaagaaatttcgtctcggcaggcacaccattgcttcattccatgttccttgtcgaactccaacggtcgttctcggataatcgagaaggtgcaaagtctgcgacaaagtcttgaaatctgacttgactgttctgatgtctgatttcccttatcaacatttgtcgtactcgcttaatcaatcccagtgtaagaccgtagagacatggagtcctggacaacgttgaatggaattttcctgaaatcaatactcggaacaaaatattaaatcgaaatagccctcgagcgaacgctcaagggtaacctgttataatatgtatggaaaatttgaaaataaattgaatctacgtgtgacaataaaagagtactctcgctagagttgccctcagcaatcagagttctgtactcctcctagcccctagccttgtcctcggggaagtctgttctcggaggggaaggctcaatgacccgtaacttgcctagctgaaaatgcgatttacctagcccccagctatgaagttggaaaaaccaatttccgattacacggcttagttaatacaccttttgagcactcttacatgaccaggtcttacatggtcgttcggctctcagagtctgacaagaccttatctgctctgggcgtccctagccaaaattcccgtaggtctcttggaggcttgtcagaatggcgtaaagggtcaataggttcgatttcaagagtaggtgctatcgtggtaagggatctctggacaaatattgcacatacaagcacttacagaaaatgacgtagatgatgagacgaccaccacactaggtgaagaccaggtgtacagttgtgcccaacaaatcgcataggtagtgggagaaccgctacgctgctggtcggagaccagtcgtagtcataactcgaccacttaaagtggaggtatgagagattactacgacctactagttcgaggaccaggagtaggagtctctcagtcgtttgaaattaaggtgcgagagactagtcgtagtcgtacctcgaccatcagaaatcatggtacgaggaccgctgctttgctggtcaaagactagtcgtagtcgtacctcgaccatcagaagtcgtggtgcgaggaccgctacgttgctggtcaaagactagtcgtagtcatacctcgaccatcagaagtcgtggtgcgaggaccgctacgttgctggtcgaagatcagtcatagtcgtacctctaccacttgaagagaatccagagtaatagatggacgacattctcgtgacctgtgagaactgcctcctgatgatgacgaggacaatgaggaattatcgtagtcggaggttcagctcctgtacctactacctcatcctcgggccctctagaagtctggggatctcgagttttgtcgtcgtcgtcgtgtgacgtcgtgatgtcgttaaccttgtctgttgtcgtcctaatgtcattagtcctggatgttgtcgtcctagtgacaacggcgatctagtcagtcttggttgtcactatcacgagaatgttgattgtcgcgttaggtgtcgtgagattgatgtaaccgactagtcgaggaccaggagtaggcgtatctcgatcacctgaagatgaatttttaggtggtgagagatcgctacaatctactggtcgagaactaggtgtacgcgtatctcaatcacctgaagatgaacttttaggtggtgagagatcgctacaatcaactggtcgagaaccaggtgtagacgtatctcgatcacctgaagatgaattttcaggtggtcgagaaccaggtataggcgtatctcgatcaccgaaagatgaaattttaggtggtgagagatcgctacaatctactggtcgagaactaggtgtagacgtatctcgatcacccgaagacgaattttcaggtggtgagagatcgctacaatctactagtcgagaaccaagtgtagacgtatctcgatcacccgaagacgaatttttaggcggtaagagatcgctacaatctactggtcgagaaccgggtgtaggcatatctcgatcacccgaagatgaattttcaggtggtgagagatcgctacaatcttctggtcgagaactaggtgttggcgtatctcgatcacctgaagatgaattttcaggtggtgtgagatcgctacaatctactggtcgagaaccaaatgtaggcgtatctcgatcatttgaagatgaatttttaggtggtgagagatcgctacaatcaactggtcaagaaccaggtgtagacgtatctcgatcacccgaaaacgaattttcaggtggtgagagatcgctacaatctactggtcgagaaccaggtgtagacgtatctcgatcaaccgaagaatttttaggtggtgagagatcgctacaatctactggtcgagaaccaggtgtaggcgtatcttgatcacctgaagatgaagttttaggtagtgagaaatcgctacgatctactggtcgaggatcaggtataggtgtatctcgatcacctgaaggtgcgctagagttggtgattacatgtgtatctcatgtggccagcatgacccacattcccaactcatagcatatccggatgcccgttcgcaatcatgtcggatgatcaagccgacgtcgttcgcgagggattacccgttaacgacatattctcccatagtccggacgtggtcggtgctatatgtgagataagtcgtcagtcttcgttggtaggttgggtgcgacaactctgcatttgtcgagaacgttctcgataatgggtgtactcgaccacaacctactcgagtgctcaattgttcctgaaaaatattttctagaagacaagatgtatagcagataatatcgagcatgtactcaaaaaactgcatgaatcctctagtattatcaggatataatgagcagattaaatatcaggctttatgtaaaccataaataagcatgatttatacagagtaaaatagagcgagccccagcattaaaccgtagttggcctaatatagggaatgctcactaataaatattgtataaaaaacatgctctaggtaaacataataaattattgatctgacaatattgtatatatatgaaaaataagtacggtaaattgtatataaaatattgcgtaccttcgtagatacatgctggatgtatctacgaaattagtagatcaattaaattaattaacctactaattaccttaattagccatgctaatcacatggtgtgagcgtgtagcttatcttggtgcatgtccatctatgctgccatgcatgtctaggatttggttccacacgtgtggacgtggccggcttgagttgacgtcgtgatttgccattaatgttgacttgaattaatcctcctcctgaagactggagtctaaacccgactaggatacctcaatgatttctagtcggttggcaaaccgacgtcccctgcgacggcgatgacttgaatcttggttgatctcgaattgttgatgacgatggttccgatctcgtcgggacacgtactcttgccgggttggatctccttggtccaaagtagttgaagtatctctcatcaaaaaatccatagtgacgcggccatgacgaagcttgagatgacgagggtcccgatccgccagataatgcacttcggttgggttggatcccccctatagccgaagtcgtcgagtagctcgttattggagaatccatcttttgaacccatctcgtcgaaatcttgaagcaccaaaattcccctacctggcacgccattgtcgacgtttgatatcgcgactacagtgtttggatggtatggggatcgttggtaccagggtatatgcgagattgaggtaaaagagatggaaacagtgatttttatacaggttcggaccccttatctaataggtaatagccctacatcctgttgaccgaagccggtgttgctctttattcatctggatcacacaaatacaatatttgggataacatatctggtcgttgtcgacttggcagctagataaccaacttgtagtcgacgacaggggtagtcttcctccttgaatctgtactcagcgagatcagagatggcgctagatccctcttgcccgcttccgtaggcaccggatggcgtatggctaggctactctctgatgtcgatatctaacggcgtgtgttggcttgtggctttgtggctttttggtggatgtgtcccctctcctcctaggagggtttgtatttatacccatagatgcccccttgtccaagtaagactagggagataaatatgaatacgatttaagtagtccttgtcgtttccatgtagaactattcttgtcctttcttatccggaactctttctatatacgaggtttgtttccgtataagacatggtaggtggtgggccccgtcgagcttagtcgattactattgtgtatgtggtatccataaccctgacagattcgtctcgcaatttaaacacaacatgtgtaattagtttttcttttttctagtatttaatacttcatgtatgtgtccaagcattcgatgtgataggatgaaaaaacttgctagggatctaaacatgccctaagatggttggaactaagttttggacgcacatgctaagctaagatagtagcaaaaaaatttcagcccctccctccatgtgctggcgtatccacccaatactttctctattttcgaattgtgcgtgggttctactccatattaaacggtgtgcatcatttctcaagggtccaatatttcgtttggatttcaccagccaaatttcacctctcctccaaaccgctcgctttatgtcaaattcgaatttcaacccaaaccggcaaaccctaatattccaatttctgggataggaggatacgggccgataggaggcctatatgggcctattgggccgggctccaccggagcaaaccccctcacatcatagggggacttggccatcgccgccggcagccacgccgccgccgccgcatctcgctcccctaccccccaccgccgcaagcctccccggcggcgaaccttaccgcccccgcaatggccgcggactggatgtgggcgcgccggtcgtgggagaagtgggctgggaagcacgtcggcgcttcgggtctcccctcctcctcctcctccccctcctctgccgctcttcgctgctgctgctaacgagtcgccgttgttggtgatcttgcagggaagccggtcaaggcggcgctgctgctcaactacgacccgacggggccgtctcgcctcctccccgtcgtgtgagtctccgatcccccatccatccccaaatcacgggcggtgtttggctacttcttggtcgtagggtagcaaccgtgtttgtccgtctccttcgcctcgatgtcactaggttgtgggactgggggcaccgtgaaattgttgtttctgttgaggagtatttagggggaaattgtttggtttattttgttggagttctatatgacttcagcattgttcgtttcctgcctccggtagcaactgagtaatttacagggccttctagtttgattgaaggaggatagggattttgatggttaatcatgaacttagtgatactcatcggtttataacctacaactcgatgacacagttgaaatgccaatttgataaacaacaacggcagttccaagaatggttttcagcttgcttgttggtaactttggttcggtctcatgtacttttgaatgtttgatgattgacaaaacacatatgtccagattcgtagctagaaatgcttatatttttggatggaaagagtagtttatttgttcatgcatataatgacaggaaccaagtataagctgatatttttttcttatctttctaacattccactatgtttacgtcattcagtttgctctcaaaatttgtaatgaagagctggtagggccatatattttctatataaatgtacttacttagttattatatacataatttacgggaagcttgttcatacaaaattttatcagatctcgcagaactaaatcaaggaatactttactagatacggagttttgtaactgaacagcagatgtgaatatattagatagatttcagtgtcaaagaaatgaacttatttgttgtgatacatgaatgatgaag

SEQ ID NO: 10267 - DNA, 16801 bp, Oryza sativa
ccgccctcgccgcctgccgctgccgcccaccgatgccgtcgccgtcgctgcaaccacttaagagtttgcatgcgaaaatagatttttgcatgcgcctcattaataggaccgcatgcgaaaatagtcattaaaaattaattttaaaatatgagaacttcgaatcgaattttatggtacgctgcggcagtgctcctggtgtacctggcccacctcgccgacatggtggaccacttgaagctgtcctgaagcggttgtcacgggcgcggaggttgcagacgaacataagagaggcgctgggaggctggaggagggatggaggaaggagatgaaactgacagatgggtcccaagttcaagggtatttggtccatatgaagaatgaaaatagggatgaaaatgaagcggatagttgtttccgtccgctccagataaaaacgaatatggatacctttcgaatatagatacagctatggatattttctcccagatatgaatacgaatatggtatcggggtttccgtcggatacagataataattcggatgtccgatgaccttcaatatacctttttagattttaatagtagttatgtcttgacactagtccacactattaatattatttaattatttaaaactatttataaattatcctatattttatataaaatgagctaattatatatgttgatatttgtttatattagaagttgaattggtttttgtgttctgaggaaaaaatgtttccgtattcgtgtgatcgtgtccgatcatattcgagataatccatattcggcaaaaaaaaaaaaacgaatatggtacgagcgttatctatccgtgtccactccgttttcatcccgaactaaaaacgtgatggctatggtatagatccaatttgacaaaattctaatggcatctagccgatattgtaaacagtagtggcatttttctaatatgacaaatttgcaatggcttaaggctgggcatggaaatcgatgttacctattagcgtgtgatgaattaagtattagcaaaaaaaaaagcttgaaaaatggattaatatgatttttaagcaacttttatgtgaaaaactatttttttcaaaaaatacacgtttagcagtttaggaagcatgtgcgtgaaaaacaagatagttgaagttggaaacgtgggggaaaatcaccgcctaaaagaagactacctaaggctgatttcgtttctttaagttcccaactcactcatctcattttccgcccgcacgtttttaaaacgactaaacggtgcgtgttttttttcaaacaaaacttttatatgaaagttgctttaaaaaataatattgattcattttaaaaaaaaactaatactttattaatcacatgctagtggactggttcgttttccgtgcaaggaagtggggctcccgaacacagcctaagggcaagtactatgatgcttgatgtgttctctctaaaaataccatatacgattagatgatgaggtgggagtaataattgaggaaagagaaggtgagccacccctcatgcaaggagcaacctccacacaaaccccaaggaaaatgagatgaaagaaataggggattggacaaacaaataaaataaaattatttaggttacaatgatagaggtggtgtagatgtggtgtattgtatatatcacctcttatcttatatgaataaaattagacgtgacaattacccctactataaaatttgccctaagagaaaagactgtagttcgtttgttcaagtctagtgaaattaagataaccaagtatgtgtccagaccgaatattatagcttcaaacttgtgtttacgtgcatatgtgccgattctagaaattagcaatgagaaaaggcgtagcacacgagataaagtggatgagcaaaggtgagaagaaatattatattcctgttttcaggattggatccgtcaagtgtttattgatctgatgatcgagttgtggttatgttcttggggcttcctaccattcttatacaggttcaaagacaaggttaaaaggagaaaaaccctgctggacacggcacgagtttccttttctatttacataatcgtatccaattaggactattagctatgccttaggtaacaagacaatataatttctaagtcctaatctattacataatatgtgaacctggcccaccagtcggataaagcgatcgtgtgggtaacaatatgtgattgtacccggtacatagctcgtttaaaattcaggctagtggccttgtaattaacttcagtgcaaaatagattagtagtccatcgactggttgtctggttgccactacatattagctgcctacatggcagccactacatattagctgcctaacggccatgtacaaatctcactccaccgttaacgcgcaaaaccgaaattgtacaacagagtactgtaacataagagaaaaactatcgtcgaatatgggtataaagttagtttgacggtttgaaattgtaacagtgtagtataaagttagagtcaaactatcctaaggctgagtttggcactttagtttcccaactcactctctttctttttcacgcgcacgcttttcaaattactaaacggtccgtattttaaaatttttctatacgaaagttactttaaaaatcatattgatccattttttttaaaaaaaaattagctaatacttaattaatcatgtgttaatggtgaaccgccccgttttgcatgcaggaggggatttgttcccaaccacagctgccgaacgcagcctaagttctctctatgtacatagagagacatactagttatataactacaagacgatagtaatataggtgtgggtttgactagttagtggcctagtcgatcgagggttatgaatgcctagatacactgtaatatgctagattaaagagaagtggatgtaatcatgtctctttaaaaaatatcgagccccgatatcgtcaccagtttagatcttttcgcgatgttattctgtgttgagtttccaaagtaatatcatggctggtttaacgagaccactttggactcaagtgtcgctccccgcatgggcaaccaggtggcgaaaaacctagccgccgctcacccccgactcaggcggcgggaagaacactccggcagcgctctcgacggtgcgggcatatagcggcgagttgccagggcagcggacaatgccgacgcgacgagctggccatggaggagtggcaatgacggttgcgcatcatgggaggccgcggtagcgcggatccggccagcgcggctgagctgagacgtcgaccaagcagatctagcagctgagcagccagatcgggcatggtggcggggtggtcctgtgagaggcggcgaagtgcgggaaaggcagcgccgggtgcagggagacagcggcgtcgggcgcaaggagacaacggtgtggagcgagggccgagacgatggttagatttggcgcctggcaactccgtggttggctctggctggcaccgagcatctaacatggtggggcaagggcatagtggccaatgtggcgcggtcggcatcggtggtaggtcgcgcacggaaggaggttggcgggaggctgacctagcgcgggttggcatggtaggagcggtaggaagtaggcatgatgatggcggtgggagcggcgtggtgcgagtaagaggagccgtggctggctggtgtggcacaagcggggtctgctgcggtcggcgctccggttggagtctcggtggaggcatgggcattaggacgaggcgacggtgatgcgggcaagcggcctaaggcatgcgagtagtttgactgaggcagcgatgacggtcgtgccgtgaggtgggtgagtaggcctgcgatgggcttctatccagacgctagtcctcctgtggtggcaccttgccgccacaaggtggccacatttggtccattattctctctcaccctctccctttctaacccatccgcgtggatgggtttggagtgcgccaaaggttgaggtcctacttgatggctagccagcggcaaggcgctagcgcggtggctacgtgttgaaggtgcacagttgatagtggttatgtttccagcaggcaacaacacgggcgaacaaagagattacaggcgaagcccagcccctccagggcagcaatggtgatgcttgagagcgccgttttcccttggggcattgttgagtgatcttctctgctcaccctgatggatttcttcaagtgaaaaccacgttgagggttcaaggtcggcgacgatgacacttttagtgtcgtatccttcctaaaggtgtcgtttagaatattcatttccttagggatgttgtgttcctgcttcttttttccttagggatgtagcgggatctggttatagacacacggtgtggttgttattttttctttttcctactatatcgccttctagggttgcagacttgtaatttattttcctgctctatcaatacgaaacatcgcattgtcatgtgcggattgtttaaacaaaagtactcccttcgtcctaaaatataagcattttcaatacagtaataagtcaaatatttttagctttgaccattactaaaaaaataaaaaagataatcatataaaattgatgttaatagatttatcattaaataaattattaaaatatgctatactttttatttaaaaaatcttacttttatatatattgttacttaaaatagtatctcaaaaatcatgttagaattaaaaatatttataatctaggacgaaggaagtagactccagtcacaaacatcacagagtcagccagtcaagtgaggtggtccacccttgcagatgctgtcgtcctcactagtcagtaccccctccgtcccaaaaaaagtccaatcctagctacgaacctggacacacatgtgtccaggttcatagccagagtttggctttttttgggacagactagtactcagtagtcagtagtcactagtcactactcactcactcccctgctgctttgcgttagccatccggagtgacttccattccggtctcacagaagtcaaccaaccccttccaggggctggatctggccggcgagcggcagggacagcagagctgcgcgtccctcctgcttcaggccaagaggaggcggcggatctggggcgggcgggccttccttgctgtctacgacaggcttgttcccgacccccagtttgcaagcatggagctggcgacgggggcgatgaggagcctgctgcccaagctgcttcagctgctcgagaaagagtacggcctgcaaacgggcgtgagggagaagatcaagtctctcacgggagctcgatgtcgtgcacgccgtcctccgcaagatcggcgatgtgccatcggagcaggtcgatgagctggtcaagctttgggcgcgcgatgtcagggaggcatcctacgaaatggaggacatcgtcgacacattcttggtgcacgacgatggccctgaccccaccgatccacacatgctcctgcgcctccggaagaagttaggcaagctgttcaagaagagcaaggctcgccgtaagatctctaacctgatccaagacattaacaagaagttcgagcaggtgaaagcaaggcatgtcaagtacacagtcgacagcgttgtcctcaagtctctagcggcaacgaccatcgatcctcgtctccagaatctgtacaaaagggcaacagagcttgttggcattgacgggccaagggacgatctcataaacaagctatccctggggggtgatgttgatgtgtccgacaagaagatgaaagtcatctctgtcgttggatttggaggactcggcaagaccactcttgccaaagctgtctatgaccacttcaaaccgcatttcaagtgcagggcttctgttccagtcgaccagaatcctgacatgaataaagcattcgatgaccaggttgaaccgcatttcgaatgcggagcttttgttccagtgggtcggaatcctgacatgaagaaagtctttagagacattctcattgatcttgacaaggaaaagtacacgaatccgaatatgatggtgttggatgaaaagcagctcatggacgaactcaaggaattcgtcaaggagaagaggtatgagtgtaatcaccaatccaatgactcactgcttacgttgtgactttgaattccagtatctgtacaattccttccttatatctatttactttattaaataaaggatgaaaggagcacattttacatctcaagtctagaaaatagtacaacgctaatcgatgcagattgatttaatacagtcatgcataaaaatgtaaatgtgttttcagcaagcaaaaacagttgtataatattcagatatattttctcatacaaatgagtattattaatttattatctagccacgcaatcgcaagaaaatcatgctagtcatattattcaaacaaatttaaacatatcaagctcatttgctcccaagagttgcaaaaaacaaccacattaatgagaaaagagagacattcatcatgtcgattttggtaggcccaagctatataataaattaatgatgtaggttaactggttatttgttagagctactgcaaattatatttatataacaacatgcagttgtattttagcactaagcacaagacatacatcacatacaaacattggagatgtaagtacatgtcagttatcctgcaaaaatataagtgcatgattcaattcatgatgtacaaccagctaatatagccaagcccaattcaaaccgactccaatactaactgaattgtagtctgaacaaacttcaaagaacttagccaaatcagattcaaactctaaactcaattttaactgaatttgattctgacccctaactctgactgaaccaagattaactttgaactgcactggttttcctcctgctctgatacttctatccaatcatgacataggtgtttcattgttattgatgatatatgggacaaggagtcatggaaattaatcagatgtgctctgcaagaaagtgattgtggaagtagacttgtcataactactcgtatttctgaagttgccacacatgctggtgaagcttacaaaattcagccactttctcgtgataactctgaaaaattattgtatgcaagaatagttgatggtgaatggaagtatttcgataatccatcagctaaggcatgtgaaaaaattttgaagaaatgtggtggtgtaccattagctatcattacaatagctagtttgttggccagtaaaccaggggaggactggtctgaggtctacaactctgtcggttttgggcatgaagacaatgatgatgtaggtaatactagaaggatattgtcttttagctactatgatctgtcttcacatttaaaagattgcttattgtatctatgtgtatttcccgaagatcatgtgatagagaaaaatagtttgatatggaagtggatagctgaaggtttcatccatgaggaactagcagcagggttaggattatttgagctcggggagaggtgcttcaatgagttgataaatagaagcatgatccagccagtggagacaaaacatgaagggtatgtagatggttgctgcgttcatgatatggttcttgatatgatccactcattatcgagtgaagaaaattttgtcactgtattgaatggtgatgagcgacagaaacttccggggagcattgctcgcaggttagccctgcagcgtgttctagtgcacaaggatggtcagctagctaatatcactctgaagaatgtgagatcccttattgccagtcagtgcttcggttcattatgcctacacactccggttttacgtgtattagatgtgataaactgtgcagaaagtgagacgcctaatgttttggaagatagggacaaaactatgccaagccatcttgggagtttacttcacctgaggtacctcgggttagtagatacatatatcactaagctgcccagggaagtaaggtatctcaagtttctgcagacactggatttaaggggaagtcgcataaaggagctgccagaggaggtgggactgctgacacaacttgtttgcctacgagctgattgggaaataatggtgaagattggtttgatcggtaagttgacctcattgcaagagctttggatagagcctgctgctgctgtttatgatgacgatgctgcttctgttgatgatgatgatgatgctgctgctgttgatgatactacgaagtctacgatgaagtttgtgaatgagctgggcctactgagggaactaagggtgctccggacttattttgaggatttgaatgagagcatggagagagctttgttggaatccctaagcaagctgcacaatatccgggacctgcacattgagggcccacccctagtgacaaggagagtgacaagcagtgcaagatctgtctcctgcctgcatctccgatacctgtgtctgaattgctttgtgttctctggactgccagcatggattaaatcatcgcttgctccgaacctctcctgtctggatgtggttgtgctaattgtgaaagagcaggacatggaaacccttgcgaggttgccagagctccgctgccttgtgctgcgtttgcatgagaccgaattggttagcataaagattcatactgaagatgttggctactttcggaagttgagaatcttaaggatacttggtacatctatctggtttgatctgcacggcagcaagtgcaacatcacagacaatagaagcttagcatctattatcatgccaagtcttgaattcctcgagtttgctgtccatatgcggttcctgaaagatgcaacccagcttggttttgacaagctgcttagcttcgagaagcttggaagaagttcgctccagaaagtcaccatagtactgaaatgtggagatgcccgtctgtcagaggtggaggaagtggctgctgcattgatgaactcagctgcggtccatcccaaacacccaactgttcaaaccaaatggcaagacgaacaagctgtgctctcaccctaccaagaggtaggaactgatcatgcatgcacattgatagaccaacgttggttcatcttattaattcattcccatgttgctttttgtagtaaaggtaattacttcccctatattatgcctcacaaactaggagtcgaatctagccacttctagtttctcttcttttaattagtcctatatccattcctttcccttcttttatacgagtagaaaaattcatgtcctgtctatcatttgatattgcaaaaaacgtacctagatgcatgtttggccttcaatttgattacaatatctttatgaggtacaggcctcttgagggcctatgctactagttgcaccatgtttatattcgagttaagttaccaatggtccttaaacttattccttcttgatttgagttcacgttctcgtgaatcaatatacacatgagcgagcaaaccggaggtatgctactttagcctgcagtagcaagtgtgcactggtgacctggtagtgactccatcggtttaaactgtcagtgggtgccgggccgattcctcagagatacaccaccatgcaaatgtttctaacttggctgatgcctcagttattgttctctcccacagaataacaatttccgaaattgaaaactctgagtatctctggcttgactgtgttctctagtactggttgacgtctccccaccatcactgtcctctgtgccaattcatttcactgcagatttcttcatgacgtggagatgcttcgacacccatctactgccgtgtcctgccacaggaagaccgttgctgctgttgagcttggttggccgttggatgaagaaactgggagaaagaggaaaaataaccactgttttttttaccatgcagcccctgattgtgaatgcccttggttccatttggaatgtgtgtactgtagttatagccaggaactcatgagtggccagctgagtttgctgcactttcttgttcgtttgctgttcaatattatttgctaattgtattgaaaatgcaggcatatatgcatgtgagcagaaccccggagttggtaaatgaggcctggaaggcgaacattgttagctctggccgtattcgagcactgcgtatgccagttacagaagcatcttcaagcaaagtatgttcagcgatgtttgcacgtgcatcttttcgtattagtacgttgaccatgaaatatcaagttatcaacctgaaacataggaccttacattctatttaatgcaaggaagatcacagtatctgttgatatttgcatgtaaatatttcacaagcgtctatatttgttgatattgacattggatgtgatttctcatttttgtgatgtagcacactagaattcaaagcgatagtggtataacttataagctgtattcagagcggtatacaattctggcagttcactagaatattcagatcggtatacaattctgataagcattgtgttttatttcttttctttataggttatctgtctgctttatagaaaaagtgggaagggacttttagctctcagctcaaatgctgttcataagctgtggaaatgggagagcaatgacaagaatcctgctggcatggttagacaggagaactaaattattttgatttcaacagcgcagttctgtttggttgttttcttaaaaccatcactactttttgttagtccaccacatctgtcccacctcaagtgtggcaaccggaaagtgacattctaatgaatgacactgctaatggcaaccctgaagaagcagctgcctgcagtctactatccaaaaatgactgctatctaatttctgcatctggtggcaaagtttcgttgttcaacatgttaaatttcaaggtatgtcttcttcagtcatgtaacacaataatctggtaatttcatgattgatctctcacaggtcatgactacttccggaaaatattttttatttcatagttgcatcgatcatggcctttcttttacttaactgattttgtggaatcactcacagaccatgactactttcatagcacctccaccctctgcaactttcctcgcattccacccgcatgacaataacatcatagctattggaacggatgactcttcgattctactctacaatatccgtgttgacgaggtgagtgttagccgtgcatctcttgtcccctgtttgcataaatctcaaaagtattggcaaaactcactatctatgattcccactggaagtgcagtacccattgtgaaataatatgttctcgtttcagactatatatctcctcatcttttacttatgtatcaggatctggtgagattctaaatgttgttttacatatgttcttttttacataataaattgtgagccttttatggtctttgaggagataccacaaggtacacgcattctatagctattttgtggtatctcttggcaacagtatgaagaaagtggtacccagtatgacccaaaaacctcatatattgtcagctcgacatttgaagatatgggaagtcataatgattgtagatttcataatctacttaagattcataatatgctaagcctaaaagatcacctaatgcggaatattaggggcgctaaccattgtttgaagccattgcacttgttgcgatttcctctcttggaaccggagtgaaagaagaggatggagtctcttgaactgctctggtgttcgttggcggcgtagtagtttaagcagagatgatgtggcaggctggcagcgtcctccggcctccacctgcatcggcctggactgtaccatgtttcccctccagcggtttagcttgatcgggattacgttatttttgtgttggtgagatttgagaccgagagaaaaagttgtcaccttcctctagggtcggcctcccattttattttgcactgaggggaatcgggggctttccaaaaacataaggttttgggcgctaccaatcaatgcacgtgattgcataattatggtaataatcatgagttaaaacatgttaatcacgcggcaatgggtggaaaacggcagtgcgcaattgcctcaaagttttcatgccgagagtcaattttcccaacaatggtaattgattgttcggttcttcctatgtggagtcctatacttaatatactaattaccgtttgtttatatttggcagcaacatgacaaaatattgacttatcttaatcgaattgcacaggttaaatgggtgctcaagggccatcagaaaaagataactggactggtattctcgctatcaatgaatgtgcttgtatcttcaggtgctgattctcaggtgtaaattctaatatatatcaaagatttttggactggcaattttgttgtttattgaatggatgctgagttaaatgtaagctcggtgcatataagcatagcttcaaaatccatatttatatgagtcccatttcaggccattctttagtccattttccaaaagataagaaattaaaaaaaattacatgcttgattgcatggaaaactacgtatattatacttgtttttttctgaatcatttttttttgtgtgtgcaatgaaatggaatttgcagctatgtgtttggagtatggaagattgggcgaagaagaaatccagatatatccaacctccatctaatcattctggagctttagttggtgatataatggtgcagtttcactatgaccaaaagcgccttttagtagttcatgagagccaattggcgatctacgatgaggagctagaatgcttgtgctcagtaagttgttcacaaaatttatatatcaatgtatttgcatctatcacttgctatatgcagtcttgattcggtcttgagtaaacatgttacatcatgctagcagtgagataaatatttatgatgctcctaaccttcacaatatattgtaatcatcactgatatttaacctttcattgattgacaatgtgcagtggttcccaagtgatccactctctgctccagtttcgagtgcagtatactcatcggatggcttattgatctacgctggattctgtgatggtgcaattggaatatttcaagtggaatctctcatgttacagtgcaggattgcaccttctgcctatataccatcttcagtttctaggtatatgcagtgtccaactccaacagtttaattctgtttttgtttcgagtctggtaattttaatgctggtgacctgttaatgctgccctcttgtttcatcttatcaactccagcggtggtgaaattgtgtatcccatggttgtcgctgcgcatccctggaagcctaaccagtttgcagtcggcatgagcgatggtgcagttcatgtgctggagccgttggacacacccgatgatatcatcagcaattcaattcagcaggggcgttttggtgacagcggatgatgtgtggacagggtgctcaatacggttggcaggctggatggcaatacttgcttggcctatggtgatagattatttttttcgccagccggttaagaaagcagaccaaatttcatcaagggaagaagtacttactacaaactagaaagcaaactggaaaggtagcccgcgtgaatgcgcgggcatgcttgttattttgtttaaaaacaggtctaccaaaataagtttaaattaatgttaggtatttccctttttaattgattgttcattgtttttttaaaaaaaaaatcttgagaaactcgtattgctcataaatgtatttttttccctaaatatacatatattagatagcgcttcttatacgtaggaccctacaatatttttaagaaaactacctagtcaatattagtcttacaacgtaatttagtaggaaacttctaatcatattgttataagatatgctattgattttgtattgacaccttataggcttctacgtgcaaagcgtggaactaagtgaattcgtttaattatcatttaccttcgtctcttgatgtgtcaaagtgaaatatgacttgtagagaagcataaatttaaaagaataaaatgttgttaggatgtaaaatgagccctttttttttctatagccaagagagtagatcgattcaatactacctttacgggttaagtactccgataaaatacttctatatgtaaaaccttcaacgctaccttgtgggttaagggttaagtactcctatgtctaaaaacattacaaaagttatttctaaaggtggcgcatgtgtcttaggcaaaagacttactaactatgaggctgcacatttgaggaacatgtggaaagaatgcttgcgaaaattatttgtgtaggagtgtgatgagcataattgttcattcaattaaaacgtgggataagtgacttaaaattgtcattttacattgattgattatgaaaataatgatatttgtacccatatcattgtttttcagcaatcaatagaacttgacagttatttttgtgttcctttaggtatgtagtaaattggctacatattttataacttactgtcctttgttgggatacacctactattatttttctatatgctagattgtctcattgtttattaatggatgccttgggtgcatgtgacactatatatatttcaaataaaaagccttctaaaaagccttctcgagtcttaattgatttcgcagtatgagagagctcattgtcgtgcagagtgtgtgagactccatatagcttaacaagaacataatttcatagctaaaaataactctgcatgcgtgattattatgtagtgtggtatgattgttttcatgatttaaatatttttactctaattttttttgttaaacattaggaatttgtatgatccaaacgatcactctttgtcattttattttagctaacatgcattgggcatttagtgattatatttatattgcataatcttaaatgctaagcctacaatgcttgccctattttatctgttttgtttgaaagaattagccatttatacaaacatggtagtttaaatactaggtttcaaacgtttaagtttctaaaataataggtagataaagcttttagaccagtcatcacctatagtcccaagttagtttgcccactcacgctttaggtccataggtggtttggccccagttttgtccgacgtcagggtgtccacgtcggcacctctctttcccctcttctctcccttcctcctctatctctctctcacttctttgcgcaggctggccggcggggcgaggcgggagaggagggcgtcggcggccggtgacgggcaacgcaacggcggtgactgtggcgacgcttgagaaggcaggaggccggcaggtcggtaggatgtcggcggggcgaggagggagatgaaaaggtttggcggctagcgagaggcgatgccgcagcggaggtgacgagggtataaatatgtacacccggggtcattgtaatttatctctcgatcaatactactctcggcgcatcgccaccctcttttttgaggttttacttaacaactggtggaatttggcacctgacgcggggctgcatcggttcagtttgatctccggcgaaggggtaagtcctacgttccattggtcctgaatctatcggctacattggtgttgttcaaggctgcatcgcttcgatctcttggatcgctctggtttgcttgatatatttgcctacctgatatctcaattctatctctaattgcattgtgtttagagatgcatcggtttagttgggactgtctagattaggtctgatcttctgtcttagccgatatatctctacaatcacaatgttgttatagatatatttattatatccatcacattagacagatctatcggctcatcgagtattagattatcatatataatctcgtgctgcatcggttagatccaacctactagattgttattgttaatataattcttgttaagccgataggttcatgctaatgttttatcagggtgctagccgataagttatctggatgttacatcttcttacaaagattacatacaaattgtatttagctgattgcaacaaaggtttcactgtttatctaaatcgattggattttatgacatcggatttttagctgatgtatgctttaaccatcggatcagtactgctctgattttcgttcgggattaaaaatcatttctagaaattatattaaaagttaaagcaattcaatcaagtgaaattatagagggaattaaaatttcctttaaaaatcatggccgggaatattttgtaatattctctgcgtcctaatatattctctcgaatttcctgcgaattttcggagctcaagaagtaattttaaagacacaaagttcatttaatcaattatattaaatagaaaacaaattaaaactccttctactctccttgggccattttcggcccaaatcccccttccctctcgcagcccatgccccccctctccccggccggcctatccctctccctcggcccagccctttcgcccccttgcaaagtctactttgcatccctcttccggactcctctcaccctccctcgccgataggtgggacccacggccccacctgtcatccctttccccttcctccagccacctcgccagcaaccgccagtcgctgcctcctcccacatcgccactccgcccgcgcgcctcgctgcctacttcgcgcgtgccaccgctatccccgccccactcttccactccgcacgcgccgcgccgcacccgtgaatcggcccggattcggttttccaatccg

SEQ ID NO: 10268 - DNA, 5817 bp, Oryza sativa
caacttaggtgacaatcatcctcattcatcaactcttccactaagccaccacataagtgatcaagaacctggttgtctaactcctcgttttcagaaaaaacactctcctcgacccccccccccttctaatacaacagacttctcaagatttgcactattgaatctaacaaactcagactttttaaaattatcaacagattctatcattaaatctctagtggcacctaggttcactcctatgtttcttaagtcatcaactacatgcgaatgagaaaaagaaaggaacgaatatttaaactcgttacctgttggaagttcgagattcttccaagccttcctcctctccgccttctcaagtgagggaagctcaccactgttggcaagcctctaactagcacgctttggtgtcaacaacacttccttaacacttgctagctgcaccaccttctcctccttcccagctccctcttcctcccttctctttcttttctgcccgtcctctcttccatccccttccacttctatattatcaaaaatctcacctaacaccttctccattgccacatcaataacctcatcagctatccctcccaaaaatacctcctcatactccctctctcctctcccattcgacatcgcctcctcgctatctccatttcctccctctttcccttctactaccatatcgtcattccttgcccttttcgggctcctcccctcctcctcctcctcctcatccctcatatccttctcattgtcttttgatccatctccatccccccccccttcctgcataaactcaacctcttccccattctcgtcaaaacctttcttctccacctcgaactttagctcaaaatagtgatctcctatcaccacatctaacttccggggaataattgtaggatctaggacagccacaaaaattcttccaaagtcacttttccttgtggtcttcatgtctaccaattgcgtggctccaacaagggaaccaacaacccacaaagtaagatactccctaagtctctttctcaggccaaacactcttatccagactttgggcaacaaacaaccttcttctttctcaaaccattcctcaaattgcactctaatcccagtgaaaactctaccttctttaacatcagccccccaaagttaatagccctctgaagttcagacttagaagggaaaagaacgacatataccccttcctcatacactttcggttcccagttccatttgcccggacagattctttgcagctactcaatcaatttatctctagacaaagatcctccaatcacctttaccagcgccatctttgtccccttcttgcttctttgcagcggcgtgtgcggtatatggttgaaacctaagccctccacggcataaccaactgcttgcaccgaaggtttaggtatcttaagaattgggcatctatgattcacatgactatcactgttgcaaatatcacaacagacctcaatagtgcaatcagccactacatgacctttttgagcacactttgagcaacctataaccttcgccacagaccttacatcatctacaacacacttctgatcctcaaacagagtgggatcatatcccagccctataatgccagaatcctccaccatgactaccttcttcttgccttttgtatcctccgatccgatgtcgttgtgaatggcgccgctgccattgcttgatcttgctccccctaccaactccttccctgcaccttcacgagttaccttcgaattgtgcccttctttcccactcaatcctccaacctctcctctattgtttctgtttgttcctgctgggccgtcgcctccctggctgaagcaagcgccgcccccaaaaccgctacgacctggtctcccaccaaaccccccacgccgagcaccaaagcttcgggaccctctaggccgaatgccctgacgaaatctcccatactcctgttgcaggtttccaaaatcccgctgagcgcctatacccgagccaggttgaaaccctagcctcccaccttcacttctaccagcaccatgatagaagtcttcctcctcctgctccctgaaaccccctccgctgctcccccagttccggttcccatggtggttccaatttttcccctccctccacaccatggtttcctctctcttttgctcgtgagttttcggccgccgccctcgcagcttccttgttctggccctcgatgagaagacgcacaggaaccgaagcgactcccttactcttcgttcctttaacccaggcatgatgtccagcccgcgaaagcaaacgggccagccccacagggaaattaatctttgttaactttgacttcccaagccaaataggcctggccggcccaactctcctctccaaatttgaactgaaaaacaacctatcgccatgttctagacacgccgcttcggtatccgcaccaatttgtctgttgtccgctgaccgcgtcaataacccaaccgaaaaggagggttcgccggtgatcctcgaaaacactctcacatatttcttgaaatttgtgtaggagttgccccttgcatgagatgtgattatttatctctcatctttcttctctcctccacctcatcatttagtcctatgtggcatcttagggcttgtgcttgatgcccatagtagccttgagaagttttacttctgaccttcacttccttccagtggaaaagggaagccatgcgaggaagtatggtgcaactgaacttagaggatcaaaatcaaaggatgtttgcatgtggagagtaatagttcacttttgtttgtctatctcaggcctaggcttgtattttgataccatgtaacctctgaatgataatctcttaaccacataagctctggatgataatctcttatccacataagcttctacatatctcttgattctgaatttagcagctaaggatgcctgttacacgacaaagattatatatatatataatgtatttcaggtttttgctagtgatattcttacatcttcactggttgtgaagagtaatacacagcttaacaatgttctgaacttttcataagtactctaaacatttaaaatggcaaaacatcaaacttgctagagaaccggaaagctcatttttattcataaaagcaaaagcttcacaaacaaacagttcacatctctgaagcctgaacttacaaacacacagttgacatctctgaagcttgaacttacaaaatgtcctctatggtcgtattttcacaagctactagttacatgtcacgcccggaaattcctgaatacaattccaagcagaatgtgcattaaaacccctgtccagcactggctagggtacacaaatgataatgttgacatacagatccacgtcttacaaacattataaaagtcttacataaatgcagcggaaaataaaaggataactggagctaagccttgacttggatagcagtgggagacatcattccacaggcatcctcgatggcacgaacgaagcctactcctcagagaagccaccatctgacgcatactcaaactctgggttgggagatagccaccatctgagtactacccaccgtactcagcaagtcataccgaaacggagagtatgatgcagggtaaaaccaaagagaggtaaaggagtttatttgcataaagctagcatttataaacagaaattgaaagcagtaaaacagttgtaataattatccatcagttaacccacttgctgctcagcactacaccacgttgagacaagcccaaaccaccacatgaactaatcagttccattaagctaagctaagggtgagactaatcacggtgaatatagttgaccgcccataaccacgggcacggctattcaaataattttactctgatcagaggtgtacaactgtaacaccccgattttcgttcgggactaaaaatcaattaataatgcattttctagaaattaaataaaagttaaagcaatttcatcaagtgatcagaggtgatacaaagtaaaactatggcaacaaaaaaaaggcccaattcactaaaaaaaattgtgtattctactagcacaaagtcaccgttctcacataaaaaggattatgcgcgtgtgcgttttataggactcgaacatgagagacctctcttcgtacacagtatcccttaccatctcacgatcgtcggaaatttattcagcttggtttgctatcttatgtggtgttttgaatctgctaaaagatgaagttgaagattaagtgtttcacgcaaaatgaggtggtaataatgtgtgattaattgagttttagttattgcaaacttgaaaaatggattaatctgatattttagatcaaccacatacaaagttttcgcacgaaacgcaccgtttagcagtttaaaaaacgtgccacgaatatccaaaacttaatcatttttttaagccatctctagtggtgttgcagacctaaccagaaagagagaaaaatacatatgctaagctaaggctgtgtttagataaagggtgaaaatttttgccgtgtcacatcagatatacggacacacatttgaaatattaaacatagtctaataacaaaacaaattacagaatccgcctgtaaactgtgaaacgaatttattaagcctaattaatccatcattagcaaatatatattgtagcaccacattgtcaaatcatggcccaattagacttaaaagattctgtctacatttgatgtcgcgactacggtgtttggatggtatggggatcgttggtaccagggtatatgcgagattgaggtaaaagagatggagacatggatttttatacaggtttgggccctttatctgataggtaatagccctacatcctgttggccgaagccggtgttgctctttattcatctggatcacacaaatacaatatttgggataacatatctggctgtcgtcgacttggcagctagataaccaactcgtagccgacgacaggggtagtcttcctcttcgaatctgtactcggcaagatcagagatggcgctagatccctcttgccggcttccgtaggcaccggatgaggtatggctaggctactctctgatgtcgatatctggcggcgtgtgttggcttgtggctttgtggctttttggtggatgtgtcccctctgcttctaggggggtttctatttatacccatagatgcccccttgtccaagtaagactagggagataaatatggatacgatacaagtagtccttgtcgtttccatatagaactattcttgtcctttcttatccggaactcattctatatatgaggtttatttccgtataagaaatggtatgtggtaggccccgccgagtttagttgattactattgggtatgtgttatccataaccctgacagtagcccccgacttcaatgcaaatgaacgagttgaggttctcgatcgaagactttggaacaactatcatcgtgctcgcttgaccgttatcggtgagatcagagatagtgctagattccttttattggccttttagacaccatattaggtttgtctagtttaatctccgatgtcggcaaagaaggtacggaacatgcgactaagtctgtcgtcttgctgtaattgagagtttggattgaagtcaagaaatttcgtctcggcaggcacaccattgcttcattccatgttccttgtcgaactccaacggtcgttctcggataatcgagaaggtgcaaagtctgcgacaaagtcttgaaatctgacttgactgttctgatgtctgatttcccttatcaacatttgtcgtactcgctt

SEQ ID NO: 10269 - DNA, 12017 bp, Oryza sativa
cttgaaaaggaatgaactctataattgaaatatctagatagctagccaatatgaatcctgttctacatctaccctattgtttcggtctcttagtttggaattacattaataagatttttgagtttcaacctactaaatttgaagtactggtactgatagtgctgttgtttgaactgagcaaaaagcacttgcagacttgagaagaatcaatttagatggtttgagatggtgtgtatttgacgcaaagggccaggttaccatttttctagtggttccagttgttaagcaaatattcatgggtaatggttttttaccaagcctttgtttgtgtgataggtccttggacggttggcgtcccaaatagctgttgtgcttcagggcaaggacaagccaacttatgcaccacatgtggaaaacagagacatgtgcgttgtgcttaatggataagataactgaaatgtaactgtaattattgttgtacacatctttactatggtgcttctatgtcttaattcagttaagttttcacactagaaggtatgtcttctcgttggtgaagtgataaagctactgttcattttattcattgtttaatgatatagactttttttttgcagggttagatatacacttatgttagcaaacacttggatcttttcgtgaactataaggatggttgtgacttgcgaagggtcttgcttcgtatgtaccctgtatgcttttagggtctggtttctgcagtgcctttgctgaactagtgatctgcttctatatcttacaattcctctatgtggtggggattttcatgagaactgtttatattgaatatcaagttcaacataccataaaatccaaccatttcttcttggtttcatattcaacatgaaaattgtatactgatatttatggtgtttctttgttatatgatttaattctgttttgtctgagaaatcaagttttttcctctctggtataatcaagtgtggtcaaaaatgtatattttcctacaattctcatcttcgaattgttaaagtagcttcatataacgctgttattgcttattaagcatgtactgttctgatcacaggacagggatcgtaaattgaggatattttctggaaatgagcacccattccatgatcgccctcttgaaccttttgtgatgccaccacgccaagtgcaggagatgcgtccccgggcaagacgtgcattgttaagggcgcagaagaaagagcaggacagagcagcggcatcaaccaaagatgatgaaaatgctaagaatgccaaatccgagatcactgcatagatgcacactcagatgtgtgttgtgtgggtggagattgttactactcctatattgcaagtctacctgttgctgttttttaaaggatccatgtatcttttatttctttgacatgtagcctgctggattcaatagacagtagaatcatataacctggaaatgagcagctcaatcttagtgtctttttgtgtctcacagtatgtaactcaaacctggtgtcgctaggaatgaaatccatctgctttgatttcctctgctgttggtcagtacaactgtacaagattcccatcataatatgttccttggaaatgctggaaattcctacgaagttttggattcaacttatctcgaaaacgaaggttgattcatggaaatgaggctaaaatatgttgaaaacaattgttagtaatatactatagtttaggggaaaaagagaaaagtttcatagtggcccaaaacttgtcaggccagtccaatgcgccatcaaggccttaaaccctagaaagcaagtaagaaacctttcgcctcccatctcgactcgaccagtgatgactctgcctccacacgttacagctaccaagccgccgccgccgccgacgatgatgagaagaggtggcggcgttcgggagctcgtgctctcctcttccttcgcccctccatccacaggcctctcccgccgccgccgccaccaccgccatctccactttgacccttaaccagagcgctaccacctccgcgccccctctcccgcttcctctcgtccccggagtccctgccagatgccaccggtggcgctgcttcctcatcctctgatcccaccgtatacaattatacaacagttaatgtatatgcctttgctctgaattgtgatcctgctagtgtattcatcctgccaatgattcctcataataccccaaaaaattatagggcatacagaatctgcagtgacatgctgattgaatggtcaaaaattaagtttttctgattatttcagtattgcagcgagcagcttatctgtgttcatatttgcactgagcgaagtaagctctatacattgtttacccttgaaaagaatggagtctataattgaaatatctagatagctatccaatatgaatcctgttctacatctaccctattgtttcagtctcttagtttggaattacattaataatatttttgagcttcaacctactaaatttgaagtaatggtactaatagtgctgttgtttgaactgagcagaaagcacttgcaggcttgagaagaatcaatttagatggattgagatggcgtgtatttgacgcaaagggccaggttactatttttctgctggttcctgttgttaagcaaatattcatgggtaatggttttttaccaagcctttgtttgtgtgataggtccttggacagttggcgtcccaaatagctgttgtgcttcagggcaaggacaagccaacttatgcaccacatgtggaaaatagagacatgtgcgttgtgcttaatgcaaaagatatcagtgttgcaggaagaaaaatgaccgataagatctactagtatatttctagctaatactgttgaataccttttggttttattatttacaattgcctgtttgtgtgctttttcaaataggcatattggccatttgaaggaatgaagactcaaggaccacatggaaaaagacccaactgaagtaattcgcaaagctgtcatgcgcatgcttcctcgcaatagattgcgtgatgtaagtgaaacatcatttctctttgtttctgattggagacttgatgctagatttatttggtgctatctatacactcatgaggacatcccagctacacttgatgtaaaccaagttaatggattatgtctcagcatgaacgatcaaacatatcttggtctaattacgtgcaaccgtgctaggaaaatacatcaagaggtgaactcactatttactcatcttaacccaaattttagtgagaattttatactacctaaatgctttatccttgtattgctaaggtttacacctgaggatatcatcactacgtcaagaaggatgagttacgttgaggacgacaagggttatgccgaggaggaatcaacccatgcccaaccagcagctgtctatgctaacaagaagatggtttacgttgtaaagactcaacttccaaggcttgtgcgacctagccaatcaagtgacggattgcatggcatacattgttggaaagagggacaagtctagtttccaacgcatcaaatcctacctcaatatctttatccaataagaagttatagcatttttaatgaaggctgggcaggaaagagggacaagtctagtttccaacgcatcaaatcccacctcaatatctttatccaataagaagttatagcatttttactgaaggctgcgcaggagctgaagggctatgcgcgaacccgagaaaaacactttgccttctcatttatgttagccttgaccaccagaacgtggcttcttatgttcacacctaagctaggagggatgttcctaataaaaatacccctctattccttccattagagaacttttattcaattgaaaacctcatgtatgcataagtgtcttacccctttgttcttgtgagttcttttagacttgttagaaggctcctctggtgccccctagttcgtgcttttggctctcaggcctcctgtgtggattaatcctggattgtggttctgtgattgctcggtttgatggtcggtttgacaggtcggagtacaggaggcctcggatcgttctcaccctcaccacttggtcgcattcaaccttggcaggtatcaagcagttattccggaagtggtcgcaagctagttattccggaagtggtcgcatccaaccttggctggtataaagctagttattccggaagtggtatccaatcttggcaggtaaaaagctagttattccagattatggttctgtgattgctcggtgtgacgggtcggagtccaggaggcttcggatcattttcgccctcaccacttggtcacatccgaccttgctaggtataaagctagttatccacttgctgctcgtagcttgttatcctcttgagtacggtttgcgctggtgctcttttgcttcaaacctactgccgtgaagattgggccacccctcgcgagtatgttcgcatcatatggtatcagagcttcgttgacacagtatgttcatcatccacgtatcattagatgttcatgtgttcttgttgattttgcttctttgcaatagtccagaaaaatccctacaaaaataccaagcctttggtagtactgatataccatgtctttcatttccatcatgttgttagttcctcttgttatcttgcaccatcatttttttcccgcccacccacccttttgtttcatgtttgctagctcgtgttgaaaaaaaaaagagcgagaaccgaaaaaaaagaaagttataaaaaaaaagagtcaagaagaagtgaaaaaatatatataaaaaagaaagcgaggaatattttgacacaagaaagttgtatgttttgggtggtgctgtggtaatcgcttttctatcctttggtgctttggacaacagcgttcacatcattctttgcatggtttacgtcactttgtatcagtactatagccttccttgttcgattcgcattctttcagtcacaaaatcacacttgagtactgccacattttgcacgctctcacagtccttgagattgcataacattggtgagtaagaggtgagattgtgtgattccataaatttacctattccactatattttttttagagctaacatggcagattctcaatcgagtgtccatggtgaaaatcatgacaagcccgatagtcctgtcacacaggctgaggtgcagcaaatagggaataatcttcttcaagggatggaacgtttgttgaatgcacgacttccggctgccggaagtggagtggttcagccaccgtttgttgatcccagggatgaaattgtggatgcacattcggcggatgatgttgctaattctgagctccatggcccgcctaatggtggaggtcatggttttgtagctgctagagcacgaggaggaggtgctcgcgggcgaggccttggcccccgtgcgcactttgacggtcgttttgagccccatggtcatcaccatgtggaggaatatggtgataatgatgtttttttttcgcaaagcatgatttggggcagcggcatgcccgtcctcaccgaggtgctgtccttggcaatgcaggacatcatcatggtcgccatgatcgtgatgacccagacaatgttgctcgggtaaagttgagtgttcccaagtttacttgaaaggaagacccggatgcttatcttgattgggaagaacagtgtgatcaaatttttagagtgcataatctttcatctcaaaggagagtaaagcttgcttcagtggagttctctggttatgctttcactttgtggaatcaaatgcaagaaagtcagcatgtgctgggtcgtgatcctattgaaacatgggatgaaatgaagcgtgttatgagaagatgttttgtgccttcacgttataggtgtgaccttcacaatcggctacaagtgttgagtcaagggactcgtacagtggatgagtattacaaagaaatggagttgctcttgatccgtgctcaaattagagaagatgatgagtcgaaaatgacaagatttttgcatggtctcaatgctgaaatttctgattttgtggagatgtttccatacaacactttgcaagatcttctcgatcaagctcggcgcacggaaaggtccattcggcaagaatggcgtaatcagtcctctagtggccgctccaatgcagctccatggcatcgcatgcagcaaaccactacttttgttggcgcttgttcttagggagcctccacacgagcctctccacctgctgttacagccaagccacaaccatcttcggcaacatctccagctgcatgcacaaattctcattggcctgctgcacctatagcatcatcttcgtcccgtagccgtgatattgtgtgtcacaaatgccaaggtcgtggccacattgctgccgagtgtcctagtaggaggaccatgcttgtgaatgagacgggtgaatgggaatctgcaagtgagacgaagggatgacagtttacgtgaagaagtgttgattaatgagcaagtggataatgataatggtgacaataattgtttcatttctcatcgcgtgcttagtgtgcaagttgcaaaggaagaacatggtcagcgacaatatttttcacactgatgatatcatcaatagtactgtttgccgtattatttttgttagtggcagctgcaacaacattgctagtttggagttggtaaaaagattagacttgaaacaacgacgtcacccaaccccatacaagatgtagcggttgaataattgtggtgcactccgggtgaaaactattgtgacggttcatttctccgttggcaagtatgaagaccatgttgagtgtgatgttgtgccaatgcaagcatgtcagttgctactcggaagaccttggttatatgatcgtgatgttcagattagtggtcgtgccaacaagctcgttttcatgtaccaaggtgttcctagaaaaacacggcaactcgggagatctgcttagctccagtgcaagtcaaggcctgcctagtgcgcttgtagggcgtgctagctagtttgatcctgcaaccaacaagaaacatgaaaatagagttagttgatcgacaaccgatcggctgataggccgatggcaattgcatctattaattaggatatcaggtcggtttgttatagatttggcaagagaccaccgtatatggtcttgtttgtattttatttttagaaaggtttgagtcgtgtccataatggactcgattttatactcggggtataaatatgaaccccatagcactgtaatgagggagacaatccaatacaacttcggcgcatcgccacccttttacttttcttcttttttggcgagttcttcgcaagaggtaactcgtctcgatggcttatgctatcggggctactatgtcgttttagacatattaatctcgttatcatagtcaccgttatcatttgtcttagttaatctagtcttagtatcacgatttagctttattagctgctactcgctttagggttaatgcgggtatcggctaaatcgtcttactaaattagattagctaaggcatctaccatcctgaaaagtgtttaattgcttgattgtttagactttaggtttctttacacactttgcgatgcatcatctctagtcctgttttgaaccctagaaactagcctgaaccctagaaactagcctgcacttaatcataataaggatagtatcggagtttcagccgattttacctaatatgcatgtttctttacctgtctcatgtatattcaccacttatattgatagatagttctatataaatgtatcaagttttatctagtatcagctaaatcattgtgctttcatgcttggttactgtttgatacgttcatatagatcaatctgtttatataagtttgttccaaagtattaactgacacattatcttttctgtccctaaacactgtcctatcggctattttcatggtatcggctaaaatccgttttaaacctactggacaatatcacagccgatatgatcctgctgtatcggctgggatcccgtttgccatggttagaaaaatcaaaattgctcctgtaaaatgtatgataaggcaatagttagagagtataaagttctctgctcctgttgagtgcacttctatgattactcggatagcaaaagggctaggggtcgttagcgaccaaattgcttttatcttagccgctcgtccacgtattgatgaggcttatctagtgcaagggcatattctgaaacatggagtagatggatctttgatatattttttttcccggttgtacaaatgaaatcccgttgccaaatatttctccgtggacaagtaagtatgttattttgctccagcataatgaaaataatttcctattgcaatgcataggtgagctgctagtttggaattaataatgagaagatgacatgatccatgcattgacaatttaacatgcatgaaattgatatcttctgtaaactgtcaggtaatgtagaattaggccccaattataaaatttaccagagtagcatttcttattaatgtctagagcgtattaactaaaacaaaattgcacttccaaacatgattgagggaacttcttattggaaaaatgaatttgaaccatattgagtaaaaatgcattggttgcacagatatttgatcaggtaaatataagagatatatcaaaaaacttccccaacaagataacttattaaagaattggtaagaaaactgtacctgtgaaaggagaggttgtgctccttccattatagatgcaaccttttcagccaaacttaaagcttttatcaacaccaatttgctccatgtctcttcctagacgggtaagaattccaaccattgcatctaagcttactccctgttgtcctttgatcctctctttgtcacagagaactaagccttctctagaacagtctgggtcaagtgggccaaccgaaggtgttgggagtggatcttttggtgtaatatcaatcattgtctccattacaagaccagactggttcacctcaaccaatgaattcagcccagaacaaattggtatcagacgtaatcttgtctacctacagcttcgatcaaagaatgcagcaaatgaattaatcaaagcagagcacactactaggaaaagcattatcgcaagcggtcgaaaagggtcttcgcaggcggggcggccatccgcctgcgaagataattttcgcaggtggacattggctagtccggtccgcctgcgaaaataggaatcgtccgcttgcaaaaaaaaaacttccgcctgcgaagataggtagaaaatattgaaatttaattataatttggccgtaaattacttttaaattatttattagaaattcttgcaggtacatatattggaagattatcaagcatttggtactgagaaatctacttatattgcataaatcaaaagtgttgccaaaatatatatattacaatattgttttacattgtcacttcaaataacgtcatttagttatattatggcatagcagtgttctactcccaaagatccttgaattcgtcacttgccgctagggcaccctctgggtcgaagaaatctcctttgacatgagagcactcatggtggatgaagtggcacagatcacgctgcacatttgtgatacctgtatcgtcaaagcttgttcgacattctaatcttggcaactgcatgcattgaaattaatcaatatattagtatcataaatatcaagagctgtctaatacatagtataaagacttacatcctccgcgttaataaggaattcgcacgcataatatccgcaaaggaccgttccttgcggttgcttgtgacactgcaggacatatcatagaaaaaagtagttataatttgcaattagtgaaactattggaatacataaagtgagtggagtattaccggccaataggtacgtaatagcagcttctcccgtgttcgggtctgttcttcactcttgaacttgtagtattggtatgcactgtatggatgtcataccatttcagagtaaggaggatatttatttgtaatacattcatatacaaatgcaagagtcataataacttactactgtaagattgttagaaattctttgtattgcttgtgattgtaatcgagaggatccaagactaccacggttccgtctttagggtggatgagtaaacagatataatgatcgctacatattaacaacattataattagttagtaacagctaaaataagacatatgtgtacaagataaatgtaccggacttacttaaaattataagcggccatgacgactctcttattttgaaagtgcaagaaggctcgtccaatgtactgtgcgacagtaatcaatttctccttgtgcaagcccttcttgtattctgctatctctttcagattcttgcccttcagctggtctgaccctggtgctagcgtaacgatatgctgtgtttggcagatccgagttggatccaagaagccgatgggttcttttttcttgttagcatccatgtattgcatcctacagaagaagtttgttagtaataatcacatggatttgtattgtacatatttttcatctaattaattaaaactcatactcacatgcaccaaacaccgacatagttgacgtccatcttatcccgacgatatatggcgtggagatctgagaaatctagccatacgtaacctttttcgccgaaacaatctgccggtgatcgagctgttatattacccaagcctttcttgctggcctccatatggaagttatgcaaccttctcatctcccatggtgcttctttcagtgcccattccggcaagagtgttttcccatgttcgtacttttccaggcaatcatcggttgcgaagtatgttggcccggctagctcagaagccttctgggggtcgtcatctctgagcttggcacgttccttaccccctctgaagacggttagcatgaacttctccttgttcgcatctttggacttggagtcgtggctcctaagcactcgtggcacctcgggttctttcgtaggagaagggtcttcaaatatctctggctctgtaccgtcccattccaatcctggtacttcttctttgtctgacccgactgatgccacaaattccacctctagttctgccactgtaatctctatgggcacatccggcactggaatctccatggctgtctccggcgatgcaatctccatggctgcctccggcaatgcgatctccggtggcacttccggcactggattttccttatccatctctagatcatccgccttatcagtcaccttcctcttaggaggcctcggaggttttcccaaccccggtttaggcaacacaggtttttcctcggcatcggtgcccaatccaaagaatatgtcattcttgtgccagagaattacaagatcgaccgcatccccaagtacggatatacaaaatcaaatcatcggcttattacaaaatactataactattttttgattgcaccgaataaatagatatttaaaattttttcctctctctatacatgacaagatctatatctagatctagaactaggtggtggatatgatagcaaaaaataaaaaaaatgagaatttatgttaccacattaaaccactacaacaagaggcatcaagtattacacatacatctaacataaacatatgaaaagaaataaaattaaaaaacatggagctcttccttcacaattttggatgcataaatccatcacaaattaaggtctaaaagcttaaaaaactgcatacctagtgtggaaatgagtagatctaagtaccatacaaaaatcccacgaagatttgaagttcaaaacctcctcccctatatttaagttactttaggagagaaaaatgtcggggagaatgaacagggctcggggaggaagaagactatataggggcatctttgcaggcgggccatataagcgtcgcctgcgaagattgatcttggggatcct

SEQ ID NO: 10270 - DNA, 17634 bp, Oryza sativa
caccttatgaaaatactacaaatctaaaaaaaatagaagaattacactaaattcttggacagaactatcattcaagatttcgttaacccgtcctctcctctgtcatgagtcatcgctcattttttccattttttttctcctctccccctaaatatttcggcagaggtagcggtgaggaatggactcatcggacgaagattttaagggtaggagcaatggaatcggtctaaggccattcactccgcagtgcatgttacctcttttgcatgactttaattgaggcgagctactcttcaggctacacatctcacaaatgcatgtgaccaagcctagcaaaggtatcccagcccaaggattaaattcctccaactaccctttctgcttatctggacacatcgcctcaagccctcgtctcctagtctaccatgccgcttcatctcccagtcagcgcgctgcttcgcctcccaatccactgtgccgcatttgccgaccactatgccccgccacagtcagttgttggcgatgaaactctagagtggactggtgcagctcctacccaggtataccccgtccaggaagacaagggcgaggggagaaagaaaaagggcaaggcggcgagaggagttgctagaacctcacgctacagtgctccgtcgacctcggctccggcggagagctcaaactcgttgattgagatgtggaccaaacctagcgtccaagttgtgattgacatcgacggtgtaccggtctgatcatccctgactgctggttggactagtctaatgccgcctgttggactagccccgtatatatgaaaggcacgggtcttttccaattaaatctggtcatgttttcctatttttgtttagatgctaaaatttggatgttaacaagagtatttctatatataatataaagttttatatgtataaactttggttgaaaagagaaagggaagtggggtgttcgtcttgagcgaacttgtctccttcgttggactcctacccccgagcccgtggggcccgcggaagctgagacgtagtgctagagctgtacacgctatcttttctctaactaaccgcgcgtcaagttcgcatctttgatctttccaaattccccgatgattaaatcacccaaccccgactaataaatataaacactagcaatcatcgtcatcatccacaaaaccctaaacccaccaaacccgcgaaggcggcgacggagcatctatcggcttctccgatcgtacctacgcgcgtgccctaaaaagctagcgccggccggcgcgccgtacgtacgtccgccatgttgccggcgatgccgtcgttggcgatgctgttcgccgtcctcctcctctgcgtcgccaacaccctcgccttctccttcttggcggtcaggatcttccgcgccgacggcggcccatccaagctgaccgcgtccagcgtccgcaggtcgaccaagtgcatcctcgtcctcgcctgcgtcgtcgaggtcgccgtcctcttcgcctccctccgactcgccgccgaccgtcacgccctctccggcgaggtcgaccacatgcgcgaccagatcgaaaccctgcgtgagtagattaattcgttaccaatttgatctatcgactttcttaattaattttagattgattaccaatttaatctatcgacttgctaattaatttagattgattatcaatttaatctatcgactttctaactaattttctcgtattaagtagttagatccaaattaatataccatattcttgaacactagcatatttaccacacgtattattatggttgcatgtaccttgggcattgcttgaaatagattactcaaatacttattgctatggatgattctgtagataaaataaatatttttaaaaataagcttaagaaataactttaaataatacaatgttgtagaattttttttaaaaaacatcaatttttagaggcatggagtaaataattcgcggatattatatttatatggtgaagtagccgaaaataattgattgggttttgtgttcttcttaattttgaatttgtagagcttaattacttgttctgaattatttaaatagaggatgagatgaatggtttgcatgtactaaatttattgggctttgtgtgctccttaattatggatttgttatacttaattaattgttttcacttttaacagaggatgatttgaaggttgttatacttaattaattgttttcacttttaacagaggatgatttgaagcagtatgagcaaccgttctctgcgttgagtgattatctcggcctcagcgtgctagagctgggtagcgccgttggacgcttacgtgagtatcatcgcatcgtttaaatagtttctccaatatgtatatggcatgccttatttaccttggcgcacttaatttgcttatataattaatcattttatgcttaatttgcattgatcatgattactacgacaagaacaagtacatctagaataaattggtttcactgagctattttatcttgaagagaaataaatacagtttcagaaatgacatgcagtccagtggttacagtgacctgagtaccacctaaagatctgagttcaaatctccataagagttcagattgggttatttgaagtctaaattccttgtttgataggctaagttcctaattttaaaaaataccattctctcttaaaaaagtacagtttcaggaatatatctgtaggttcagtggacatttagtcctgggttattatggtgattgaaaataaaactactatagcaaacactcgctatgattacatagttaaatttgtctgtgctctaaacgtttcctgtagctcctagcaaatacgcatgatcgagtattcgttgcagttattgatgctttattccaccatatgtaattattgtatatctagattagataattttagtctgcttgatatttattttacgttctttttttccttcttgtgttctttgattaattaggtgataaggaggaacatctagtcaaggaatatcgtgatctgaaactcgagattgaacaaattaaatctgatatacagtctctgcgacatgagaaggaagggagaggctaccataaggttttttctttttctgctttcatgtcgctttataaaactcttttttttccctcataccaatagctttttcattgtaattgttacacaggaaacattaggtggcacctcaaatcagcaaaaacaagagaataacgagaaaacaaagtatgttgatcagaccttttttgggggcaatttttataagttcctgttaatttattatttgagttacggatatgatatggatttataattggaataatgaatttgtctgaattttcatgttcaaccaggcaaccagcgatagatggtattatgaagtcattacgagcaaaagcaacaaagttgcagcaggtcaagataaggtagtctctgattgatgcgcattagcaatttaaccaaaataaatcaagtatataatacagaatgaagttaaaacattctttttacctttttttttcttcgcagctttccttgggagaagatgaagaaagccaagaatatattcagcatggatttcaagctacggccgtagattagtttaagaagttcccgaaaacgaatttaatctagtcatcaaacaagaaatgcagatgtgtaattgtgataattcacatttggatggtctcagtgtactttagtcagagttttgttatttatgaaccgtttttctagagtagatacctcgtggattcttcgtattttcatcctaattgtgttatcaagcttgttgtgcaaatggtatgcccttatgtcaagcataaatagctatactagaaaaaaattaaatttcatgagttgcaacggttgataacatttttagattgctatacattttactcttttattttggaccaaaagcttattcttccctttcttttcagtcctagtccactaaaatataagcaccaaaagctcattctttccttccttttcagtcccagcccactacttcagctcattctttccttccttttcagtcccagcccgctacttcttaaaatatattatttccttccttttcagtcccagcccactacttcttaaaatataagcatatgtcatatgtccagattcatagccaaaagttatgttttaggacggccaaaagttattctttcccttctttttcagtcctagcccatataagcaccagaagctcattcgtctcagcccactacttcttaaaatataagcattttctaggtatgaatctggacaactgtatgtccagtcctagcccactacttcttaaaatataagcattttctaggtatgaatctggacaactgtatgtccagtcccagcccactacttcttaaaatataagcattttctaggtatatgtccagattcatagccaaaagttatattttaggacggtcaaaagttatattttgggacggaggtagtaccttcctctgctctttcaccaaacccaaaacccacgaatggagccgtaggtccagcttgcatagctaactgtacatcaaatccctcgcatagctgactaaatctcgcatagctcactgaatctttcgtgtccatacgatgccattctcgatctatagggcttttgatacactcgatctcctctcaaatccatttatcgatcttctctttatgtttctattaaaatcggagcgattctccatctttagggcttttgatacactcgaagcttttgatacactccatctcctctttctgtttttatcaaaatcgatcttctctttctgtttttatcaaaatcgaagcaattctcgatctttagggcttttgatacactcgatctcctcttttgatttttatcaaaatcggagtgaatccgattctcgatctttagggcgatctttagggcttttgatatactcgatctcctctttctgtttttatcaaaatcggagcaaatcataggaaaaatgaggaggggtagtggggaatcgatgaacgcatggtttggtcgggcggcaaaaaaaaacatggcacataaaaaaacaaacaccgtgtacgcatatccttcggcgtgcgaaaaaatacagcgtaaaagaatagcgatgaaaaaaaaacaaaaccgaaaaaaagggtaaatcccggctgatggaaaaaaaaccaaaaaaggcgaagacaaaaggcggacgaaaaaaagccgaaaaaaagtggacggaaaaaacagcgaaaagaatggactaacggaaaaaaataaacagctgaaaaaaagcatacaaaatagacagaagaaaaggaaaaaaaggaaaaacgagagaaaaaaagggaaaaaataaaaggaaaaaccgcagcaaagaaaaaaggtggatgaaatatagaaaaaaaggacggaagaaaaggaaaaaaagggaaaaaagggagaaaaaagggaaaaaataaaaggaaagaccacgacaaagaaaaaagacggatgaaatattttacggaaaccttgtgtttttttaattaggtatatatatatatataggtatagatactaaaaatgtgacgagtggtctaacaaaacagttcatcttcccattacgataaaatatctcactgaatttatagtgaacttaattattattcttaggattacgaaaatgtacaaaacgatgatttgtaagaggaaaaaaggaaaaattaaacacatgacctgaatttgttgacaacaaattaagacttgaaaaattacatagcttatccccttcattgtgaaatataaacagttttagttttatactaagtcaaattattttaaaattaattaagtttagtttatagatgagagtatttttcctccggtttttttacaaagtatttgcaaacggtaaaaaggtgccttcctgaagtgtattagagcattaccaacagcttatcatcctatttccttcccaaaactaatttttagggtttttgtaaaaaaaacagatcaaacagatcctctaaagtcctgcactagttttatatttcgttttgtggattcgagggcgagagagcgactcccaatctcttgttcatgcgtctctcctccttccccatgcttctcctctctttctgtgtaagcggagaaaatttatgtagggagcgcgcggatgatcgcgatctctttctgcgagcgtggaaggaaaaaaaacaaaaattttcgttggtagtttaacagaagggtccagttttagtttttttttattgaatttaggctatgtcttggagggataagttttttcacttcctattttcagtttaggaaacccaaaaatcaatatgttggtgatgtcttacatcgtaaatggaagtataaaacttttgttccctttacactactggagaaatcatctttgctgggttggtaaaaaaatatattagccctggttccaatagtaaccgggactaaaaaaaacatttttagtcccggtttaaaactccaacgggactagatgacctttagtcttggtttaccctcttatagagtctctgccttgtcagagggttatcaggggctagggagccgagaatctttagtcctagttggtgttaccatccaagagtaataatgataaaagttaaagttgtcgtttatttaaaaatgagagattaacatgtaccacgtcaaataacaaaacaatgaaaacatataatcgatataatgattctcatttcatatcttaaccattatattttataaacccgtcgaaaacttacgatagttattttagaaaaaattcgcttttatattttaaggatagagggagcaccgttcttgtgagaatattggtaccggtagcctgggactctttattagtaccgatcagccaaccaaaaccttgtgttagattaggataattattcaagacggcgtgtcttgttagcctttcttcataaagctccgcccatggacatatcggccaggcttcttctgcgattgaaaacgacgcaggcgtctctcatgttaaacattcttttgtataggatatagcaggtgatttatcttgtacttaactggtagtcgaaattttggcaatataaaaagggtaacgaataagctataaagtggatgggttaggaggcaaagctctatagatactctataatcataactgactaggactacgggacatgatataaaagttaacataatacccgagtccttatctatatatattctatccatatgaactatcccctataccagtcggatagcatagccatatggatatacggtatccataatctctgatgtggataagggttctcggtcttccgaaaggttatcgtggagattatgactaccgtatatccacatggcaatgctatccgactattataggggatagtttacgtatatggaatacgtatagataaggattcgggtattatgtatacttgtgtatcaaggtaatgtctgtagtcccagtcggttacggctacagggagttctagaccgtaagggatagagttccatattgtgatccgagctcctctacctatataaaggggggtcgggacgtccccttagagtagatagaacatcatacacaatcatattttccatcaatacaaacacggtgaaacatctcgccggataggagtagggtattacttcttattgagaaggcctgaacctgtataaaccctttttgccatctaacccatccactttcttagcttgtacgcaaccccttttattattgccgaaatctagtttcgacagttggcacgccaggtaggggtagcgtcaattttttcgccgactagtgcgatgggatctacatcaggcattgacgaccttgccttacctcctggccaggcgtaccgcttcagcagcctcgacttcatcaccgacaacttcggcaagatatctcttctcgactcgaattcgaaccagtcaggaggagacgacgactcggctccgttcggtctcccgaactcggccaagatctactccaatacgttttctgccgagttgaccacaaaccacccaggcgaaagcatcaagacttcaactccttcaccaagcttcgtgggagacacgccagcatacccggagatcaccatgcgacttcccgatgatcttgcatgcatggtgttcgactctagaggatccccgcgctctcccccgtaggactcggtccgatctagcctcggctcagattagatctagcttcagggaagtcggcgtcatccttcagccactcaattcgtgttcatcgaccgagatcgccgagtacatcagcgagtctgactgtgacttggccacgaatatagaacacatcaactatggtgatttcgacgaccacttcgacttcgacaacttctcctgctacgacggctactatgacgacttcgacgacgactacacacccctttattttggagtgttcatggccgacaatgagacggaagcacagaaggtagcccgactagcggaagaagaatggcttaggctagaacgagaagaacaagagcactagctcaaggaagatgaagaccgccgacagtgagaggacgaggagcgtcgacgcagagacttggccaatcgtgggcgtaatgtccaacagcgtattgaccagaccatcgtcgataacaccaacgttttcctcacaccacagcagaatgcagttgctgctggacaccattatccctcaagccccggtgcatctcacgccaacactgaataggatgaaaactatgatcgctgcaacagtcccggatgacttaggaggcaacaggcaacctgtcgacgttagatgtcgcgattccgatatttgcacagtatgaggatcgttggtactaggatatacgcgagacttaggtaaaagagacggagacaaggatttttatacaggttagggcccctgaattgtcaggtaataaccgtactcctgttggccgaagccggtcgttgctcttattcatcataatcatgccagtacaatatttggggtagcctatctatatgttgtcgacttggcggccataaaaacatcccgcagtcgacaatagagtagtcttcctcctcgaatccatgtccggcgagatcagagacagcactagatccctcctaacagtagtcgtaggaaccgtatggggactactaggcttatctccaatgttgatatccggcggcttgtcttggcgtatgttggcttgtatgttgatcttgtgtcttgatccattgttccgtgtcccctctcctcctagggggccttgtatttatacccataggtgtccccttgtccaagtaaaactagggaaaccaatatggatacaatccgagtagtccttgtcatttccatgtagaattctattcatccttccttatgcggaactcctcctatatccgaaggttttttccgtataagacatggtatgtagtgggtcctaccgagatttagtcaactactattaggtatgtggtatccataaccctgacacaaccaacagcttcgacacacacacacaccttcaggaagccgactgccctccatacgctcgggagatcgccagcagcccgagtacagccggattgactcccgactgccccactcgggaagacaccattaggatcagtctgtacactcttcagctcgcgcgcgaaggaatcaacgagcgcactcggaatatcagagttcctcccgagtacctgatcttcgagacacactcaatgcacgatgccgagtacgacacgaagggtatcatcaccgagagcgacgccactcacccgacaacgacgatgaaggagtcaccgccttcacaagcgacctgcgtcgagtgaattggctagctggcttcaaaccaactggcattgagaagtatgatggcaagactgatcctgaatcatggctcaccgtctacacttgcaattcgcgcagcaggaggagacagcaaagcaatggccaattatttgcctgttgccctagccatctcggctaggaactggctcgttgggttaccgcgaggctcaatcagatcatggggcgagctccgcgaccacttcgttgcaaatttccaagggacctttgagcggccgggaactcattttgaactctacaatgtgatccagaaacctgacgaatctttgagtgattacattcgacgtttttccgagaagcgcaacaagatctccaacatcactgttgacaacattattgctgcattcaccaatgatcaactcatcggcaagttcgaacgcaaacctcctagaacggtcaagcagatgtatgaaggcaaaatttgccacaagacacgcaaagattatggtctttgctgtgggacacccgaagatcgtgtttttgctcgtggacaccgcaaaaatgtggtaattagctagaggacaccagccgcattattttattatttgtcgtcgaaacggagagagaaatagcgttgaaagtaccaaaatgcccctagacactgttcttcttccttctctttgcttctcttctcttcttcagcgagggagcataatccccaacttcaccggcacgttggcggtgagccgctcctggtgaactgtcgtcatcgtcatccaaccatcaccacaccaccacgtcctggtcgtctccaaccaaccaaattcttgcacacacacacgcttgcacgcagctccatcgagctatggctggagtgaacaacaacctcgtcagcctcaagcctgccgcggcggttccgcagtcggtcgcctcgtcggcgctgccaaagcgcgtgcacgtcgcgtttgtcacaccctaaaaatccccatgtataaattgttgtttaattggaattattagaaatgattttaaaagcctacaagaaaagatctaattttaaataataaattccaatataaaagtgggctagataaaattttattaaatacttctcttaattctatagttcctagatttttctgggatttatttgagccaagaaagtatttttaataaatggaattgcatttcatgaataatttaaattgaaaaaggttttaaaaatcttccttttggttttgggcccaaaaccccctccctctctctccccggcccaatcgcgcccgacctagtccgccgagccgagcagccgctcgccctcctctctcccgctgacagatggggcccacctgtcagggccgtcgttttcctcccgccacagccgcgccctaacgcgcgcaagccaccgctgccacccttccaaattcgaccgctccttttccgatccgatcgaatcaatagaggggaaatgatcctcgggatcccttctatcttttctcttttggaatcgtcgtctaaattcgtttggaaatcgtgggattcgagctcgattcggattcctttttccacccgaaccctaaaccttccatcgccgtcgctggtcaccgtgggcctccatcgccgccctctagccctttataaggacccctgggacctcctctgtccgccgtcaccctcgcctcagctcgtcgccgccagtagcgccgcctccgcgtttgcccttgcgccgtcgtcgccgccgcaagtccagccgtgcgccgccgccgctccatcgtcgtcgtcgctcgggaaggccaccgtcgggttcgccaggtcgtcgccgtcctcgtccacccctccgtttctgccaaggatcgccggagcaccgccgtcgtcgtcgacccgatcgtcaccgccgcttcaacctcgtcgtcgtcgccgtcgccgttcggttgccgtccgccgccgtccgtgcctcggtaaggttcgccgcgtcacccgctacgtgtagatgccctccgtttgtgccgccgggccgtcgatcgccggcgagcatgcctggccgagccgccgccggtggtgacgtcatcgccgacgtcattgtcgacgtcagccgtagaccgcggtagaccgattcgatctcggccgttcgtttccttataccgtcccgtgcacccggtccaccgtgaacccgagccgctgacacaataattcctttttccttttcaaaaataattctttattgcgtcataattcaattaaaatctatataaatgatttaatccgatttaatctttaaaaattcataactaattcatcttagctcggatttagttggttcaagtctctaaatttttctaatattgagatctacatgttaaaaatatccacatgtactgttcatgattgtttatgtgctgttttggtgatttttctcttttctgcttatattccgacattcccggagagtccgattttgcaggagaagactttgaagagttccaaggccaggaaggcaagtcacacagatcccaaacacccctttgagcatgttgatcccgtttaaagctattgtttctattcaactattgcatttatttctgaatgtcattgggtgggaataacctattgcttttgttatagcccttttgctattgattacctattctttgtcacttggttaataattggattagctagaacattatatggttttagctaaagtgattaggatgcttagccatgcttagagacactagctcatatatttgggataacttatgattcactattatttaatgatggcttaatgatagctcatgatggttgatcgtgatttgttaattaattaatttgtcaactaaaacctaataatggtgggttgtgagcacatggttttgatggtcgtgctcatgacaattaaggactggttcacggttttcggttgtgaaacattaaccgtgccaaccacaagccagcgtgggcaacggctttactttctgtatagtatggttcattatagagcaccagactgtgaagtggcggagataagcccacgggggtcgctggggagtccatgccttgtttacaagggggtgattatgatccgggaatggtgcactgctttgaattgtgttatgcagagggtattgtcacaatctctattcgggtacttgttaagtatcgcgacgcatggttgacatgatgttgaggttgtgtcttgtgggtacagtggtacacctctggctagagtaaaactattcgaatagtcgtgcccgcagttatgggtgggtctaacaatgtctttcgtgattagtttcacacctctcaccataataaatgatgctgtaattggtaataatttgtgtagctcctggtttggaatgttacattcctggtttggagatagaactgtgcagtcgggaatggttgttcagaatggttggacctatgcaacgggtatgttgtatagtgttggattaatattgtttaattaataccttactgttttattaaattctgaaatatttattaaatgccgtttatgcaaatgagactatattatgccatcctttgttatatcttgcatttgcatatttgctgcgtggcttgttgagtatatcctatactcaccttgcaatcattcatcagaggaggagtgctacagtgatgttgatggtgtagaggattaggcgtagccctggtcaagctgcttgtgggatggagtcgtctgcgccgtttatcttattttccgctgcttagaactttattatttgagaggaactatctacctctgtaatgacattatattcgcttattaattagagtaataattgtactctattatcaatctattatcaatttgttattgtgtgcctcggctaattcctggacaagggtttatacacatgtaagcgtttgaaattttggatagaaattccgggcgtgacaggtgccgcccaagctggagcagcagggcggcggcagccgcgccgcgctgctgggtctcgccgccatgttcgccgccaccgccgccgggcaggccgggcaagccagggccagcgtgttcgacgagtacgtcgagaagagcaagaccaacaagatgagaatgtgagattgatcgatgattcgttaagtctcgggttataattaattcatgatttcgctgcttcgatgagctgatccatcgatcgattgattgatcgtcaggaactgaacaacaagaagaggctggcaacgagcggcatggatctgcttgttgcccgtggccgcctatcgctcccgctccctgcctccacgggcggtcccgctcccgctccgtgcctcatgcgtgcctcatttagcagcaccgcccgtcttccagtcgcgcggtggcggggtacgcggcagtgttggccgatgcgtcgctctgcgtgcgggacgctgtcaagggctgcctgccacgcgctcgcgctgctcgtctcggacgccgccgccatcgacattgctgaggaagaagaggaagagagaaagagaggatttgtgagattgacaagtgggcccatgggtaaacttgtctttaaccattgtttctctctccgtttccaccgaaaataataaaataatgcggccggtgtcctctagctaattaccacatttttacggtgtccacgagcaaatacacgatcttcgggtgtcccacagcaaagaccataatctttgcgtgtcctgtggcaaattttgccatgtatgaaaaagccaatgaatatgacaaggtggatgatgtggtcaaggcctccaagcagtcggctggtagttggaaacccaagaaagacaataatcatggagctagtgggagcggaacaaaccacaaggattgcaagcgcaagccggaggacctcgtcggtaccacttcaaatttccaacaccagcggccccgagtcaatacttatgatgagataatgaacggtccatgcactcatcacaccaattccaagcatgatgccaaggactgcttcatctacaagcaatttgctgaacaatatgccgcccaatccaagaagccgactgatggagaagccgggacgtccactcggaagaaggatgacgcagaactcggacaaaggcgcttttcaggaccatagcatggagcttaatcatatttttggagggccactcgcctatgaatccaagagaaagcagaagttgactgagagggaaatcaatgccgtacagccgacaacaccatagtatttgatatggtctgaagtcacaattcggtttgactgctcggatcatcctgaccgagtggcccacccggggcggtaccccctggtactagacccagtggttcgtaatgtcaaactcaagcgagtccttattgatggtggaagcgcactcaacatcctcttcgccaagaccctggatgagatgtagatcccaagatctgagttacgaccgagtactgcgccctttcatggagtcatcccagggctgtcagccacgccactcagccagatcactctaccggtcacctttggcactcgggagaatttccacacgtagaatatttgttttgaagttgctgacttcgagacagcatatcatgccatactcggacggccggcgttagccaagtttatggctgttccgcactacacctacatgatgatgaagatgccgggtccgcgaggagttataccccttcaaagcaacgttaagtaagttgttacctgcgataaagaaagttgtgagttggcccaagtccgggagaaagaactcaaccgagaagaaatccgactggccacgtgctcaacacccgaaggagaaatgcctactaccaaatccctcaagacaggcgaaggcgatgcaaagacaaagaaaattccacttgatccctctaattcttctaaaattgcagtaattggtgctgagttagattgtaaataggaaagcgtgctcatcacctttcttcaagctaataaagatatctttgtgtggaaaccatctgatatgccgagtattcccagagaggtgattgagcattctttgaatgttagagaagacgtgttaacgaccaaatttggtaaatcacacattggatttgaagttagaaccgaagcggatttggaggagcttggcggttgcggaaacagagtgcaaatcggttgacaactgaatcgggtatagtgtacatcggctgaggcagaatcggatcaggatagtcgatgtagccgattccaataaggagaaggctggatcattgtcggattcggttggagtgcttcatgaggattgccatgtgcggattgagtccggagaaggcaattgtatctattaattaggatattttcttaatttccttatagatattgtcggttagagtttgtgttagggagttttccttaatttatgttgtaatagagataggagtcgtgtctgacaaggacatcttatgtaattttgggtataaaaaggacccaaggttgtgtaatcaaaataacaatcagttcaataacaatctcggcgcatcgccaccttttacttctttactttcgacaagttcttgctttcgagttgggctgcatcggcttcgatctccagcaggaggtaaaacttgttatggcgggttgtgttctcgggattagtgcttccatctttatgatactctaatcttgtttatgtaaatcgtcgagtttcatatatactatataatctagatgaatattgattatatgaccccatcggctagtatctactgtcagaagatagccgatagggttatatatcaatgttgttccagattatatagtgtatctaccatctcaaaaaggttctcattaacttgattgtctagatattgtgtttctttacatacttagtgctgcatcagttaggtttgatctactaagttgtgtttagaattataatctctagcgtgtttatggttgctaatagagatagcatcgaggtttcagccggtcttacctgatttagttatcttgttatcttgatatgctaaatctatccgttatattgagatcttaccataataaaatatattaagctttctgttaatctagttaggtcatcctaatatcagatcaatacttatttaatatattttgtttataataatatctcagtatagagtggtatcggagtactagccgatacatgttagatttgcctaatcggctatgttatgaataaatataatatctgccttaatgtatatttacacataagtgatttatactgtctcggcgccctgtccgatctatcccaatcacttagtttaagtatattttgagatttggattatattatattgatatctacagccgattgagtaaatttaatcttctttttctttattcatcatagccgatttgatacatgttatatcggcttaatgctcaatgatatgtcataagcaaaccagtcgatcggctatcattgaaggactcatttcgttttctttctatatttcttattggttgcaggatcaaaccaattggcatgcctagaacccgaaagcaatatttaggacctgcactagagttaagcaaatctctcaggccaatgtgtgtttttttgcatcaacacgcttttggcatgccaggtgggaccatttcttgaagaatttgctagatggtggacacaaagacatctgatgttagtccagacaatgtcattccaataacaatggacaaattaacaccagagcaaaaggcagaatatgaagatctgatgaataagctctaaaatcaatacttgcattcccttgttcagaccagatcaggaacagtaattcagaggtataaagtaaatcttctaag

SEQ ID NO: 10271 - DNA, 17890 bp, Oryza sativa
gaagtcaagcaggaagaaactcctgaagaattcaagagtttacaagacaggattgattatgctgtacacaatgctttgatcaatcaatcaggagtgcttgtcaatactttgacttatatgaccaagtctgtagttgatggtactattgctgaacatcatgccaaggggccaatattcttgccagagggagtttttccacaatacaggccattgataaccaatcagcaacaacccgtgccaggactagtgccagaacagccgatatcagcaacatcagctatgattaagcaggaggtgtcagcatcggcacagaatcaacctggattcaatcctcaagttctgatgagacaacaacctcaacacatagggcagaacattcctagagtttctcctaaacaagttgcagctatgtttggccctaatcagtcagttgttcagccgatcttgcagacaccaacaaggcagcaagtaccaatcccacagcagcaacctgtcaatgcccaatttacccctgatcaacaagcttttatggccaatcagttgcctcaaagtcacataaggggtaataccaactaccaatttcaacctcattcacctcaaaggtagtatcggctagaagcatcacctcagcctcagtatcaacctcaaatcggccagttcgagccgatgcagcaacaagtgcaaggaggacagaagccttgggccgatatgatagccgatgtaatgagggagcaatttggtctcaagccaaaggatggtgacaatctgtatcggcatccatatccagaatactttgaaagagtacctctgccaagccgatacaaagtcctcaacttctctaaattttcaggacaggacaatgtgtcaacctacgagcatgtcagccgatttttagctcaatgtggtgaggcatcggctactgatgctctaagagtcaaattattccctttgtctttatctggatcggctttcacatgattttcttctttaccatacaacttcattcatagctgggccaatttggaaaaacagtttcataaattcttctacagtgggattcatgagatgaaactatctgatctgacggcaatcaagcaaaaacatgaagaatctgtccaatattatattcaaaggttcagagatgtcagaaatagatgctatagtttggccttaacagactctcagctagctgatttggctttccagggcttattatcaccaatcaaggaaagattttcgcctcaagactttaagagtttggctcacttggctcagaaaatagcaacgcatgaacagaggttccaagaggccaagaaagcatttaaaaaggttaattatatcagcccttatgtctcttaatctgaagaagaagaggatcctgaagtagcaacagccgaatgggtgagaagaaagaaggtggtttcatgtcaatgggttaagaattctggaaatgaagaaagatatgactttgatatcaccaaagctgacagaatttttgatttattgctccgggagttatagattaagctccctgctggtcatgtgattccatcggctgatgaattaggaaagagaaaatattgcaagtggcataatacaggatctcacagtaccaatgaatgcaaagtttttagacagcagattcaattggccattgagctaaggtaaaatcaaatttgatgattcaaagaagccgatgaaaattgatggtaacccttttactgtcaacatggttaacacaagtaggaagatagccgacagaaagaaaaatcggcttgattctattagaatgattaacaaatatcagagaagatatgatcagtaggaggagcaatatttcagggatgatgacagtgttgatccacactggagttgtgaatttttcaggttttgctggaatgaagggatgagactgccatcagtacgagattgcccaggttgcagaaattctggggatcatagccgatttcattctagagaagatcggtttttacagagaaagttgcatgttcaccaaaggttgggccctattcatcaagattatctctaggaagaagttgctgaggaggttgcaaatccacaatggtgtccttctggtattttttccaagagtcagaagagaagggttcaaagaatgaggaacatggagcaatttcaagaaaatcaacaagatataggtcgacggctgaaaagagcaaaaacaaaacaagtttggcgtgttaaaagcaaagtggtgtcagccgatgagattaaagccgatgaagcagagagattggctaaaggaaaggctattgcttcttcatcggttaacatggtgtttgtgttacctgcagaatttggaattgatcaaaggcatgcagacatcatggaggaatcttgtgctcaaatgattttgtcaccagaacaagctatctttgagaagccagaagggacagagaatcggcactttaagccattgtgtgttaagggatttgttaatggcaagccgatgtctaaaatgttagttgatggtggagctgctgtaaatttgatgccatatgttacattcaagaaatcgggcaggagtgcagatgatctcatcaagactaagatggttcttaaggattttggtggcaatcatacagagactaaaggagttttgaacgtagagttgacagtcggtagcaagattgttcctaccacattttttgtcatcgatgggaagggttcatatagcctgctgcttggaagggactggattcatgctaattgttgtattccttcaaccatgcatcacagtttgattcaatggcaaggtgacaagattgaggtagtcccagccgataggtcagcaaatgttgccaatgccaatttaactgtttcggagatggatggtattgattgtttgtctggaaaaaatctggcaaggagattatttaaaagtgtctgattgtgatatccagctagttgaagatggagaaccccaattgttgctttgagggtgttgtggagggttcaaatttctacaccaagaacactgtagatgatctcgatggcaaattagggcaagctttcatgtcggctgataatttggaagaagtggatattggtccaggagatagacctaggccgacatttatcagtaaaaatttatcatctgaatttaaaaccaagttaattgaattattgaaggaacatagagattgctttgcttgggaatattttgagatatcaggactcagccgatcgattgttgaacatcagttacctatcaagccaggatattggccacacaaacaaccacctagaagatgtaaagccgatatgtatgatgcaattaaagctgaaattacacgattatataatgttggttttattcgtccatgccgatatgttgagtaggtttctaatatagttctagttatcaagaaaaatggcaaacttagggtttgtattgacttcagagatttgaataaagctacatctaaggatgaatacccaatgccgattgccgatcagttggtagatgctgcttcagggcacaagattataagttttatcgatggcaatgctggatataatcaaatttttatggtagaagaggatattcataagactgctttcagatgtcttggtgcaatcggcttatatgaataggttgtaatgacttttggattaaaaagtgctggagctacatatcaaagagttatgaattacatttttcatgatttgatcggcttgttggtagaaatttatatcgatgatgtagtggtgaagtccaaggaagtcaaaggtcatatagctgatttgagaaaagtttttgagagaacaagaaaatatggcttgaagatgaagcccacaaagtgttcttttggtgtatcggctggacaatttttaggttttcttgtgcatgagaggggtattgaaatgccacaaaggagtattaatgctattcagaagatcaaacctccagaagacaagaaacaattgcaatctttgatcggcaagatgaattttattagaaggtttatttctaatttgtctgggagattagagccatttacatccttgctcagacttaaagccgatcaggaatttgcattgggggcagagcagcaaaaggccttggatagtattaaagaatatctaagttcccctccagttttaatttctccacaaaaaaggggtgcctttcaggttgtatctatcggccgatgtgaagtcaatcggctcaattttgactcaagagtttgaaggtaaagagagggcaatcttttatttaagcagaaggcttttggatgcagagacaaggtattcttcagtggagaagttatgtttgtgcttatatttttcgtgtacaaagttaaggcattatttgttatcaaatgagtgcactgtggtttgcaaagccgatgtggtcagatatatgctatcggctccagtgttaaaagggagaattggcaagtggatttatgctttaaaagagtttgatcttagatatgagtcacccaaagctatcaagggacaggctatagccaattttattgtagagcatcgagatgattcaatcggctcagttgaaatagtgccttggacgttgttctttgatggttctgtttgcactcatggttgtggcatcggcttggttatcatgtcaccaaggggggcaagttttgagtttgcttatactataaaatcttatgttacaaataatcaagctgaatatgaagcagttcttaagggtttgtaacttttgaaggagattgaagccgatgctattgaaattatgggtgattctttattagtaattaatcaactagctggagaatatgagtgtaaaatgatttattgatgatttatcatgagaggtgcaaggaattgatgaatggatttcggttggtcacattgaaacatattcctcgagagcagaacatggaagctaatgatttggctcagggggcatcaggatataaaccgatgatgaaaggtgttgacatagagattgctgcaattacagccgatgattggagatatgatgtgttcaattatttgaagaatccttctcaatcggcttcaaggaaattaagatataaagctttgggatatgttttgttggatggtgaactatattataggacgattgatggagtattgctttaaatgtttaagtgccgatcaagctaaagttgtaatgggagaagtacatgaaggaatttgtgatactcatcaatcggctcataaaatgaagtggtttcttagaagagttggatatttttggccgacaatgctggaagattgctttagatattataaagggtgtcaagactgtcagaaatttggagctattcaatgggcaccagcatcggctatgaatcctataatcaagccttggccgtttagaggatggggtattgatatgatcggccagattaatccaccttcaagtaaaggatataagtttatattggtggcaaccgattatttcactaagtgggtagaagcagtcccattgaagaaagttgattctgaagatgccatccagtttgtcaaggagtatatcatttaccgatttagtgttccacaaacaatcacaactgatcagggatctatctttgtgtcagatgagtttgttcaatttgcagagggtatgagaactaaattgttaaattcttcaccatattatgaacaagccaatggacaagcagaagcatctaacaagagtttgatcagactgataaagaggaagattgtcgattttccaaaacaatggcataaccgattggctgaggcattgcggtcatatagaatggcttgtcatgggtcaattcaagttcctccttataagtcagtttatgggcatgaagcagttttgccatgggaacatgtcatcggctcaagaagaattgagttgcaagatgagctgacagccgataattatcataatcttatggtagatgaatcagaacatttagttcaatctagaatgcatgctctagaaaaagtgacaagagataaggagagaattgcacgtcattataacaaaaaggttgtgccgaaaacatttgaggagggtgaattagtttggaagttgattttactgattgggactcgtgataataaattcggcaagtggtcaccaaattaggaaggaccttttagaatttacaaatctgtgtccaaaggagcatacatgttgcaaggacttgatggtgaagtttttggaagggctcttaatggaaagtatttgaaaaaaatattatccaagtgtttgaattaattcatgattcggctgtgttatgccgatacatattagccgatgtgttgacatcgcctttagatggccggtatgtgtaatatcgtccttagttatttgttttattgcaatcggttgtgttctgctcatattagttagccgattgtatttttgtgatgtttctcccacatgacaaaattaagggggcatatatatacacatcattggaaaaaaaattatattgttgcattgcacaaaagggagttttatattacaaaacacttgttcagcttattacaagcttatgaatagtcgatattgccctttgcatgatttgttctacttcttcgattgcttgggcatcggctgcatctgtgcttgggatcggtttcacagtcttatttagttcggctaagtgcttgattgaagacttcagcttgggtttttgttcttcgatggctcttggcagatcggcaagcttatgttcttctaaagctagttcagcattacatgcttcaagttcagccagcaattcaatttttctgtttttcagccgatctatgttagattggataggattgggtccagagatcattgcatcaagcttagctttttcttcaataatggattgccgattggattgaatggtggcttcaagatcttttctttccctcctatcggctatcctttgtcttgctctctccagtttgtgccgatattgctcaaggaagactgctggagagatgatctcaaaccttgccctgattagaccacagtccgcaactagagcatccaaagaactttcaagctgatgagctatatccttaagtgtggttttcaagtcatcggctagaggagcttgtgttttgctggttgtttcttcctcttcatccataaactgcatgatgtcaaatgaaaacatatcagctaaggcctgaaagaaagaaaggatgatttattgatcaataaaatgttggagtagccaattttggattacaaaaattgtacaagtacttacaggaatggcaggaatcggctggtcttcaatttggtggctacctctagccgatggcgtatgtttacttgattcatgttggattggagttggagaccgaatccgctgaggaaaaggagttaagttagtatcaattaattgaaaattgaagagaatttgtaaggcaaaatttgccacaggacacgcaaagattgtggtctttactgtgggacactcgaagatcgtgtatttgctcgtggacaccgtaaaaatatgataattagctggaggacaccggccgtattattttattattttcggtggaaacggagagagaaacaatggttaaaggcaagtttacccatgggcccacttgtcaatctcacatatcctctctttctctcttcctcttcttcctcagcaatgtcgacggcggcggcgtccgagactagcagcgcgagcgcgtggtgggcggcccttgacagcgtcccgtgcgcggagcgacgcatcggccaacgccgccacgtaccccgccaccgcgcgactggaagacgggcggtgctgctgctaaacgacaggggcaacagccgccgccaagcacgcgagtgtcctgctgctgggccgaggcggcggcggtggcggagcaggcggggttgagatggtcgagcgcgcatgaggcagggagcgggagcgggagcgcccgtggaggcggggagcgggagcgacaagcggccacgggcaacaagcagatccacgacgagcgagtgagcgacaaggccgacacgcgattgacgacgaggatgacgagatggcgaagagcggcggtgtgaggaaccgcgacgagcagcagacctgcctctattggtgctgcttgttgatgcttctgttacttcaggggaactggcagctgccgaactcgacggtgtacgccctcgcgaagttggcgccgctcgtcgccagcctcttcttgtcgttcagctcctgcacgatcaatcaatcgatagatggatcagctcatcgaagcagtgaaatcatgaattaattataacccgaggcaatgaatgttggaattaatgaatgggccttagcccactcgaagattaattctttggaaaatcacaaaagcccacctcatgggatggcatgcatgtggagtttagtaccaccttgcttattctaggagagggggacctccttaaaagggaggatgtcctcctagccacttgaagcatgtgtggtggagagaagaggggaaacacacgcgcgcgctcgctcgcctggcctggcaggcggcgcgcgtgcacgatgtacgcgtcgaatggtccgaaaaattggctcctcacccttgcgcagatgcagtcttcttttgcagttttgttttgctgcaaattcggattcgtttttgttttggaaacgttccgaaaaatccggtgcgtgcaaacggcgtggagttcggataaggtacgcgcgacttatccggttcggttacgcgcagtagagatcgtgcgggcgccctgatcaagcgacccttctctatataaaccgacccgccgtcttcacgcagtatatgttacgcgcgacttatccggttcggttacgcgcagtagagatcgtgcgggcgccctgatcaagcgacccttctctatataaaccgacccgccgtcttcacgcagtatatgcgaaaatcaatctagggtttgcctcctactctgtactgcgccgtcgctcgtagactactccatcccgctcgccggcgtgcaccagcgatcgggagagcaggtctccggaacctctgcctttaacgtcctgcaccgggagaaggcggcaataaggtttttgggaagcgcttcgcgcgactgctccctgttcgttcgcgacggctcgccttcctcttcgctcgcgtgtttcgtgccttcgtagacacctgtgaaaagtttcgaccaagcagccggtcttttcgtcacctcggtacgtgttcaatatgttgcgcatatttgatctgttcatgttatactgtgtagtttacatgtgtagatctaatgatgcgttcatgctagttttcatctgtaatgtcatgatttatttatggaataaattaaatcattatatgcccataatctcaacaatccaaaaaccttattataggcactgtgattttactatggctggttttgccgatgcactgaggccggataaattcaccggtgtgcattttaagagatggcagatcagggtcactctgtggctgacagctatgaaatgcttctgggtgagtactggcaaacctgaaggagttcttactgctgaacagcagaagcaattcgaggaagccactactctctttgtgggatgcattcttagcgttcttggcgatcgtctggtcgaggtgtatatgcatatgaccgacgctaaggagttgtgggatgcactgaatactaaattcggtgctactgatgctagcaatgatctgtatatcatagagcagtttcatgactacaagatggctgacaaccgttctgtaatcgaacaggctcatgagatacaaaccatggctaaggaactcgaactccgtaagtgtgtcttacccgacaaatttgtggctgggtgcattattgcgaaactaccttcatcttggagaagtttcggtactgcactcaaacacaagagacaggaatactccgttgaggggttgatagcgtctcttgatgttgaggagaaagctcgggaaaaagatgccgcgtctaagggcgatggtggacagtccagtgccaatgttgtgcacaaggcccagaacaagagcaaggggaaatacaaagctcagcagaccaccaacttcaagaagcagaagaagaacaacaacaatcctaatcaggatgagaggacttgctttgtgtgtggccaagttggtcatctggctaggaagtgtccacaacgcaaggggatgaaggcacctgcagggcagacttctaagtctgctaatgtgaccattggcaacactggagatggaagcgggtatggtaatttacctactgttttttcagttaatcaatctactaatttgtgggttgatactggggccaatgtacatgtttgtgctgacatctcattgttttcttcttatcaggtcgcacggggttccaccgtcctaatggggaatgggtcacaagcttctgttcatggtgttggcacggtagatctgaagtttacttcgggaaagatcgtgcagctgaagaacgtgcagcatgtcccttctatcgacaggaatcttgttagtggctcccgtctgactagagacggatttaagttggtttttgagtctaataaagtagtcgtgtctaaacatggatattttattggtaaaggttatgagtgcggaggcctgttccgcttttccctttctgatttctgcaataagtctgtgaaccatatttgtggcagtgtggatgatgaggctaatgtttggcattcacgtttatgtcatattaattttggcttgatgtctcggctttccagcatgtgtttaattcctaagttttccattgtcaaaggttctaagtgccatagttgtgtgcaatcgaagcaacctcgcaagcctcacaaggctgccgaggagagaaacttggcaccactagaactcctacattcagatctttgtgaaatgaatggggtgttgacgaagggtggaaaacgatatttcatgacattcattgatgatgctactagattttgctatgtgtacttgttgaaaacgaaagacgaggctctagactattttaaaatttataaggcagaagttgaaaatcaacttgacagaaagataaaaaggcttaggtctgatcgtggtggagagtttttctcgaacgagtttgacttattctgtgaggaacatggcatcatacatgagaggacgcctccctattctcccgagtctaatgggattgctgaaaggaagaaccgcacactgactgacttggtgaatgccatgttggacaccgcgggactgcctaaggcatggtggggggaggcattgttgacctcaaatcatgtgttaaacagagttcctaatagaaataaggacaaaacaccatatgagatatggattgatagaaaaccatcactttcttatttgcgcacatgggggtgcttggcgaaggtcaatgtaccaataacgaagaagcgcaaacttggacctaagactgtggactgtgtttttctgggatatgcttatcatagcattgcctatagatttttaatagttaaatccgaggtaccggacatgcatgttggtacaattatggagtctcgtgatgctaccttctttgagagctttttcccaatgaaagatacacatagtggttcgaaccaaccctctgaaataattcccagttcaatcacaccaccagaacaaactgaacatacacatgaacttgtctctgaggaggatgtcagtgaagctcctcgaaggagtaagagacaaaggacggctaagtcttttggtgatgatttcactgtgtacctcgtggatgacactcctaagtcaatttcagaagcatatgcatctcctgatgcagactactggaaggaggctgtccgtagtgaaatggattccattatcgctaacgggacttgggaggtgacagagcgaccctatgggtgtaaacctgtggggtgcaagtgggtgttcaagaagaagcttaggcctgatggtactattgaaaagtacaaggctcggcttgttgctaagggctatactcagaaagaaggcgaagatttctttgacacttactcacctgttgctagattgaccacaattcgtgtgctactttccctagcagcctcacatggtcttctcgttcatcaaatggacgttaagacagcttttcttaatggagagctggatgaggagatctatatgtatcaacctgatgggtttgtagttgaaggtcaagaaggcaaagtgtgcaaattattgaagtctttgtatggtctgaaacaagctcctaagcaatggcatgagaaatttgacaaaacattgacatctgcaggctttgcggtcaatgaggcagataaatgtgtgtactatcgccatggtgggggtgagggagttattttgtgcttgtatgttgacgacatactgatatttggaacaaaccttgaggtgataaatgaggttaaatcattcttgtctcaaaattttgatatgaaggatttgggagtagctgatgttatcttaaacattaagctaattagaggtgagaatgggattacactcttgcagtcccattatgtggagaagatcttgaatcgctttggctacattgatagtaagccttctccaacaccttatgatcctagcttgttgcttcgcaagaacaagagaattgctaggaatcaactggaatactcccaaatcattggctcgttgatgtacctggctagtgcaactaggcctgatatctcctttgctgtgagcaagttgagccgatttacctctaatccgggagatgatcactggcgtgcgcttgagcgagtaatgcgctatctgaaaggtactgtggaattggggcttcactatactgggtatcctgcggtactggagggttatagtgattctaactggatctctgatgtggatgagatcaaagccactagtggatatgttttcacactgggtggtggtgctgtttcatggaggtcttgcaaacagaccattttgacgaggtcaaccatggaagcagagctaacggcactggatactgctactgttgaggcagaatggctgcgtgatctattaatggatctgcctgttgttgaaaaaccggtgccggctatccttatgaactgtgacaatcaaacggtaattgtcaaagtgaatagttctaaggataatatgaaatcgtctagacatgtgaaaagacgattgaagtctgtcaggaaattaagaaactccggagttataacgttggattacatccaaacagcgagaaacctggcagatcccttcacgaagggactatcacgaaatgtgataaacaatgcatcgaaggagatgggtttgagacccatgtgagttatactatggtggtaacccagtctatgtgatcggagatcccgtgaattagatcctgggaagaacaaaccattagtaaactagaggagagtatcaatatatataccctctccaagtgaagatacatgtactctcgtgagctgcaaggcaggttggctatgccttaatgagttctgttggctttaattagcgaagatgttgtcctgcagagcattcttgaaagaactcacctttgtgagcttgactgttggtcgtagtctatgaagattttgggtgaatcttctaggaagcttactaaagacctaggagtatgacttatacgctccacccgaggggtagtctacagacggtctagtaccagataagactttgagtgaaacttgcttgcacaagacttgcaattcaaggcgtagtccattgttcaagttgtgagtaagtgtagcttggagttctaggtggatgttcaaccttaattggtccccatcgaaccgctggtatataaacagtacattggaaaaggcaaatctcagtgagattttgagatttggtgggggattgttggaattaatgaatgggccttagcccactcgaagattaattctttggaaaatcacaaaagcccacctcatgggatggcatgcatgtggagtttagtaccaccttgcttattctaggagagggggacctccttaaaagggaggatgtcctcctagccacttgaagcatgtgtggtggagagaagaggggaaacacacgcgcgcgctcgctcgcctcgcctggcctggcctggcagggcagggcaggcggcgcgcgtgcacgacgtacgcgtcgaatggtccgaaaaattggctcctcacccttgcgcagatgcagtctccttttgcagttttgttttgctgcaaattcggattcgtttttgttttggaaacgttccgaaaaatccggtgcgtgcaaacgacgtggagtccggataagttacgcgcgacttatccggttcggttacgcgcagtagagatcgtgcgggcgccctgatcaagcgacccttctctatataaaccgacccgccgtcttcacgcagtatatgcgaaaatcaatctagggtttgcctcctactctgtactgcgccgtcgctcgtacactactccatcccgctcgccggcgtgcaccagcgatcgggagagcaggtctccggaacctctgcctttgacgtcctgcaccgggagaaggcggcaataaggtttttgggaagcgcttcgcgcgactgctccctgttcgtttgcgacggctcgccttcctcttcgctcgcgtgtttcgtgccttcgtagacacctgcgaaaagtttcgaccaagcagccggtcttttcgtcacctcggtacgtgttcaatatgttgcgcatatttgatctgttcatgttatactgtgtagtttacatgtgtagatctaatgatgcgttcatgctagttttcatctgtaatgtcatgatttatttatggaataaattaaatcattatatgcccataatctcaacaatgaatcatcgatcaatctcacattctcaccttgttggccttgctcttctcaaggtactcgtcgaacacgccggccctggcctgcccggccttgcgcagcggcggaggcggcgatcacggcggcgagacccagcagcgcggcgcgcctgccgccgccctgctcagcttgggcggtgccgcgacgtgcacgcgcttcggcagcgccggcgagccggccgactgcggcaccgccgcggcgggcttgaggccgacaaggctgttgttcactccggccatggctcgattgagctgcgtgcaagcgtgcgtttgtgcaagaagaaaaagagaagagaagcaaagagaaggaagaagaacagtgtgcaggggcattttggtaatttcaacgctctttctctctctgtttcgacaacaaataataaaataatacgaccgctgtcctccagctaattaccacatttttacggtgtccacgagcaaatacacaatcttcgagtgtcccacagaaaagaccacaatttttacgtgtcctgtggcaaattttactaatttgtaaaggtatgttaccgatggaggtggtgcaggtttctttctagcagctagcttctttttctgcaaaatgaaaggagtttaagttaaaatcggcaagaagagttttggaagaaattaagttgtagactcattgttggtatttcttacgaccacaggtaaatccgcaagcgcacggaataccgctatagcacttcaccttcgggtgaccccaaaagtatatcgaactcagggaacgtgtgtaatctacctaaggctaaaacaatccaaggacaacaactataggtaggctaggcaggctagagaggactttctatgtgttttaattatctaagctaagcaaaggtaatttcctatcggttgcttcaggcaccgacccctactggtctgccagtgtggttccggctatagctccatgatgtatccgaacgtggaggattactaggacgagattcagggctgtcaccacctgccgcctacctctgacaaatccgtgggatacacaacaaacaaaggtaatctctaacctagaaaccacgtctaaattattaattactactctaatacttgtacaggaacttccttctttatccagagtcatagtactagagcacttaatatgaatactaaacaatgaacccgcaaagatgaaaatatatcttactcagactaaataattaaataacataagaaaggaacagcttacctaatagaagaaggttctccgaacccggagcagagtgtaccgacagctccggtactcctccagaattcctcctaggaagctacactcgtcgagaaagaagtcggagagagcgccaaaccttccgggcacccctccagagctttccctcactttctaccttattctaatgtacaaaagatacaatagagcctcttgtaattcagctcaaagttgtgtgttgtgaagtgtgaaggagagctctatttatagcctccatatgacagttacagctatgggaattgtccaaaacaccctcaaccgtcattgggaaggcatcagcaacgtacacgtggagggccaggatgaggggtgcctgtggataatcagataagattatttatgatatgatgatcacttcaatatctgttcctaatttactactacatctacatgcaagctttgctcctaatttactacttctacaagtggtttagatttaacacctctgtatgttattatctttgttacccttacattacttccttaaaccattaacatctgaattctcttatgttcaatatatgttcctaatttactactgcgtctcttatgttcagtatctgttcctaaattactattacatctacatgtaatatttcttactaataatgtaattaaattatttttggtacacttccattgcttcctaaaaccatcatgacatctaggagtctcttcagtatgtggaatttctgtatttgtgtgtggaccgtgtactccataattaatatagatttatctgtattctagcttctgtcttgattcatttgctcataggcctatcttcttttggtatgtacagatgcagatctttgtgaagacactcactggcaataccataaggttgagtcctctgacacgattgacaatgtcaaggccaagattcaggacaaggagggtattccacctgaccagcagcgcctcatctttgcgggcaagcaacttgaggacggacgcaccctcgcagattacaacattcagaaagagtccaccctccaccttgtccttcgcctcaggggaggaatgcagatctttgtgaagaccttgacaagaaagacccatcactttggaggttgagtcctcagacacgattgacaacgtgaaggcaaagatccaggataaggagtgtatccccccctgaccagcagcgtctttatctttgctggcaagcagcttgaggatggtcggaccttggcggactacaacatttagaaagagtccactcttcaccttgtgcttaggttgaggggaggcatgcagatttttgtcaagaccctgaccggaaagaccattacgcttgaggtcgagtcttctgatacaatcaacaatgagaaggcgaagatttaggacaaggagggcatccccccggaccagcagcgcctcatcttcgccggcaagcagctcaaggacggacgcaccctggctgactacaatatccagaaggagtctacccttcacctagtgctcaggctcaggggtggaatgcaaatctttgtcaagacattgaccggcaaaaccattaccttggaggttgagtcgtcggacacaattgacaacgtgaaagcaaagattcaggacaaggagggcattcccccggatcagcagcgactgatctttgctggcaagcagctcgaggatggccgcaccttagcaggttacaacatccagaaggagtccaccttgcacctggcgctccgtctccgtggtggcctgtaagttctcggcagatttggttcacatgttcgctgcgcctggtggtctctactaatgaag

SEQ ID NO: 10272 - DNA, 15920 bp, Oryza sativa
ttcatacaaaattttatcagatctcgcagaactaaatcaaggaatactttactagatacggagttttgtaactgaacagcagatgtgaatatattagatagatttcagtgtcaaagaaatgaacttatttgttgtgatacatgaatgatgaagatcctaaggtcgaaaattttcaaatattcttttttaactgcccagagcagagcaagaaggaactgaactgaaagctgttgatctgctaccatttctagactttgttcgacggaacaatctgcagatggaattcttctctattggctcaaaccggtgtaagagactcacattatgaatctgaatcaaccgtaccactcatagaaacgtcaaacgctaattttatatttgttatctccagcaatattgtgattgccagttctgcatttacagatttggtcacctcaatccatgaacactggttctgtgctcgttgcgttaatgcagtacagccagaaggtgaaggtgttatagttatggagattggagcttacttgttagtttgtatgtacgtatctcattgttcaacttttgatttacagaactctaaataccaggtttcctttaattacttccattatacaaatgtgttcctgccaaaaatttattttactggcattgctatctgaatgcacaggtatgatggttctcttggttctgcttcacaagcaatggtggctgttgatcagtttgcatggcactttaatcgaagaactcactaactgctgatttttgttagtttcaggtgtgagatctgagatgagtctagacattgttgattgaaatcattcttctaaactttagtgtaactgcctaatattactgttctcttgggtttagttgtaatcgctattagctgttttctgtaagacagatgtgtttgaggcaatttaactaaacttattagggcatatctactcggtagtcgtaagtccacataagctttgtatattttgtgagaatgctttaggttttgaatatttgacctgatgtagtggcgagatattcaatggcatatcatttaatgttaaagctgaccatgtttgtaagaacgaaagggagaaaatatgtcagattttcctattcttgttattaatgtaggtgtgtctaggacataaaaactgaaccgaagtaactagtgaagtgaagagttttaatttaatatttgcctatcatacaagtgctaaatgtattgaatataattatttgtaaggtagtaccttgcacatatcttcatctatcggacctgttcgatgcactgattgtcgttaggtaatgaactgaactctgaagctagcgatatccttccaagcattgccaagtgcaaatgacagaaaacagcgtactccctccattttaaattattctaacttttaaaatttgtgtcaagatacttatcattctcacgttagaaagcacttgcgtctttctcttaatttgtaccctttatcaatgcaactatagtagtactttgaaaggaatttttaatgcttgctttaaaaagatgattaaattataattaataagggtatcttaggagatttactataacaagaagtaaattgaaaaggagggagtatattaagcggtgatgatcacaagaaaaagaggcaaaattggttcttgaacatttgcattaattggcactcattcaccaaaacataccacaatataattctcatattgcctgaaagacgctactctctctatgccaaaaatgcaatattataatatgttttatcctatcctaatttgttatattttaaaacggagtaaatacattttaaccaatctcatttataccaatacaaatacaaagcgattagaatgcccttcactttagcgaaattcaaatgtattgattgcttcaaagataaagtctttatggttaaaataaaatgtgctaaaaatataataaatcactaaggacaggaaatagtctaccaccacacttattttcttatggaagtctgaaaatcagccctaactatttctttcaaactagatactattcacccattgactctcccctctcccctcccctagaccttttagctttttacttatatagaagtctgaaaatctaccctaatattttttttaacctagatactctttccgtacttgtaaaggaagccgttttggacagtgacatggtcttcaaaacacaactttaacttcttgtttctataaaaatatttattaaaaagtgatatgtgtatgattttataaaagtatttttcaagacaaatctattcatataatttttacgttttcaaactcaacaacttgagagttatttatgatttatctcccaaggtttaacttaaacattgtcataactgacttcctttacgaatacggagagggtactattcaccgattgagtctccccggcccctctcctagacttttaacttgttacctatgtatgaaagtcaaccctatattttttttcaggctagactattaatcccttgacttttcaaaacattcactttacacccttcaacctaaacctggctgttatttagttataaataaattagtatatcaaatataaaatatcattcaaatacattctagcgaaaatataaccatacaactttcgttcaccatagttgaacaatttagaaaggattaagcttcacaattactccagttcaacgaattatgaagattaagctatcacggtccactgagtttatgggaattaatctgagtttatggggattatttagtgaagaaccaaccaccgagtagatcacttccgtgcaagttggttgacaagtataaaagcatgacccaaacaaacatacacttaaacatagattcagctaaccttaatggacaatgacgatgtaactgaactgcttcaagtgtaatcatgcatttgtctcccacaattaaatactaaaccaagatcaaatccaagcattaatgtctggattgagtgctgccttgtacatgtctccaacaacaagaagaaagtcaatattaacaaccccaactcttactcctcctcattggccaaatggtcatcactctgtcttctggacaaaacaaaaacaaacaaataaattatcctgtgaattaactatgctgctaattgcttcagctaccctataatgcatgtaattaattaacattgcaattaagcacataagttaatcacccacatgtacaggtgttactacattgcaaagatgaacatgcattaatttgggcatatgcacttgataatttttgagctagagcctagagggttagcatgttcttgtccgggatctcgccggcggtgcaccatgacctgcagccgggcggccgtagtccgtacgacggcgacgacggcgaccgcacgctggtggtgctgctcaccttcggcatcttcttctccttcgtcatcctctacctcgtcgccggcctcatctgggccgtcgtcatcaccgccgccgccgtcgtgctgtccttcctctacctcagggtccggcggcggcgcgccgccgtgggcggcacggcggcggcggcggcgcccaacgacgtggtcttcatcgtgggggctcatcaggctgctcggagcaccggcagcagcggcggcggcggtgatgtcgccgccgcggccatcgtgtcggcgatcccggcgttcgagtacaagagggtgaacggcggcggcggcgaggacggcggcgcggcggccgggtcggggtgggcgcagtgcgtgatatgcctggggctggtgcaggtcggcgaggtggtgcggcggctgccggcgtgcaagcacatgttccacgtggagtgcatcgacgcgtggctgagctcgcactcgacttgcccgatctgccgcgccgacgtcgtcgacgagctcgccgccgccgccgccggcggccggttagagctgccggtttgatcgatcagctcagctcagctgctggctgatgctgccattggagattagctagctgttgcttgttgtgtcagattatcatgttaatttagttcgagatgaagcttgacaagttgacataatgtacagaatgtttacctattgatgataatctaatgtgtatatatattcatgtataattttacattacatgatagtattgctggttccattttaggctttctctttctccctacggaactgaactaattcatatgaaattcataacagaattcctgtagaattgagaatttgagattgtatagatgtgcacgctattggcttttgcaagagttttcttagcaaagactttggtcgaaaaacaagaaaaagtcacgacgaggagatcgactgctaaggcaggttacaaaatgagatcattaattcaaattgaagtttggctggagggcgccactgcaacggctccagtgctgaggatgaagagtgcacatgttgctgcttcaaaaagaacatattccacttcttttgctagccttcaggacagcagtgcaatgcactagttttatgttgcttaatttgtgtttctttggactccatgatttaaactttgtaggacaccatggacttttttgagatacgtttcaccgttcatctttattaaaaaaattatgtaattattatttattttattgtgacttgatttatcgatttattaccgaatgtttctttaaggatgatttaaatatttttatatttacataaaaaatttaaataagataaatgatcaagcatcatacattaaaaacgaagatagtagttgctaaaactttgaacagactttcctacgaatgtgtgagcgaaggatgggatggcattcccagcgcatcattcagcgtatttcatgtctgcttttgtaaaatcaggcaaaggcttccttagcccacagttttaatcctatagctaacttatcatttgctaagtccctttgtaataaaataaaacaaaattgacttttgcaaggttagtcaccgtgattctttccgtgaggtgtgaaaagtactctcacgggttagcttgttaattttccccttttgagtggagaattctgacacgctccatctaataatgggcatgttcggctgccggggctacggctacgccacttctagcacgaagctgcactcccaatatataatgactaatcgtcgacaggttcagaatttaatggtggtttcatatataatctctatgtatgaaatcgttagttattcatcatattcaaaatttaatataaatataaaaaaataagtcatttaaattacctttggcgtgataaaacacgtaacaacaaatatatatacttacataattttaaactaataagacaaatgatggaatggtttcatatattgaaaaataaagatacggagtattatatttcttttttttatcagtgctaaaggatttgacttttttgagccatcgaccgtccgtacgtgttctagctagttcgctagctagtgttcgcgagagcgacttgtgactgaatttgacaatatcaaaattcggatatgccgtacatgtgcttttacacgtacaacgctgcaagaggatgacagaatattgatatgacgtgtcgaacacctggaagccttgagcaacccaacttataaccatcgttctttttatataaactaaaaaaataccggtatgttgcgaagatgaaggctatcttaatcttattattattatatggtttagctaaaatgaaattcattgtaggaatttgcttggatattgcttttacaagatcatgagctacaattaggagtccaatcatcttaaattagcatatgagttttttaaagagatctcttatatgactcttatattttcaaaagcaaatgaatttaaaatctactcaaatacaaatctgaaattccaaaagcgaatgaacttgaaaactaacttaaacacggatgacgtatcaaagtaccggcaaaaatatctttaatttttataatagtagagatatatgttagtaaaattgtagttttgttatactccctccgtttcaggttaaaagacgttttgactttgatcaaagtcaaacaatttaaagtttgactaagtttatagacaaatatagtaatatttataataccaaattagtttcgttaaatcaataattggatatatttttataataaatttatcttgggttgaaaatattattattttcttttacaaacttagtcacacttgaagcagcttgacttcgatcaaagtcaaaacgtcttataacctgaaacggagggaacggagagagtactatagtagaattttttaagtgataatcttgagactagagaactgatcatatttactatttctaattcatcagtcagacggagcgggagcaatagttttaattttaagttggttcaggatattattgttttaagttggttcaggatattattgtgcttggatatgatttggatttgctataattttttaaaattggtaggagataaggtctgacacactgactggtttaatatattagtaatgtgaataattagatctattattacttgttggatccaaccctcgtttcctttttttttttttttcatgtttgggtgactacgacaaatatcttggttgatgatgtaacagaggtaaagaaaaaaattgcttggagacaacacatttgtctcaacaattggatacagagacgcgtgtctgagttcacccaaccaaatcttcagtcaccagaaaaaaaggaaaggaaaatgtcgaactagcccaagcatatataatttctgatttttgtagcttgttcaagtacaaaccatgattctattttgtatgaaattgtactatcgctcctgtcatgttgctgattatatagatgagaatccaaagtgttgcgagagatttacacaacgaaatactacacttgtaatgtcccagatacatttgttttgtatgaaggcggattcgttttatggttttgtgcaagctatcttagatcaaccatggaaatgctaaataaaaaattaaattgtaagctaataaatccaggcaaactatgttaatgattaggttgccttgtgtcctttgaactatgtcaaaatgatgtggcttaaccagaagaaaaagagagatttcataatgatataccccatccattcaaaaaaaaaatccaatctaattaaagttaagacattaagacacaacataatacaacgaaactgaattgtcatgtcacatccttagctaggttgggtttttctatacggaggaagtaataaatactccctccgcattttaatgtatgacgtcgttgactttttgatcaacgtttgaccattcgtcttattcaaaaaagttatgtaattattatttattttattgtcacttaatttatcatcaaatattctttaagtatggcataaatatttttgtatttgtataaaatttttgaataagacgaatggtcaaacgttgtttaaaaagtcaacggcgtcatacgttaaaatacggagggagtaataaaggattggaagaaaaaaaaggaaaaggttgtgtaggacaactactcacccttgtacctaacattttagaccaaatgcagggctgagagcaacagtgataggaaatttgaagcaaatgaaattgtctatttacgtcatgacaacatttgcgaaaaaaaaaacctgtcaatttctcttgaaaccctcaccagaaagagacaataacgaattacgtatagctgctcaaacttaagagcatcatcaaaagtccaaatagccaaggaaggggaaaatgggatgatggaggctttgtttctgcgggtttttagcagttataatttacaaaaaaaaaaaaaatgcatcggtagcttttgctgttcaaagcgaaatcgacaataacaaacaagatgagatacagcaggcacctagattgttataaatcttacagctcattttatttctcggaggcaatacagatcgatcaaagcagctacccaactatatccacagattcaactccttatgcgctcttcatttgctgcatcaatcacaagaacaagatggaaccagctcaaagatcaattaggcgcacaaactcaaactggactagcatgtcatgtatgctcaaccactcaggcaatggagtttcacttagaagatcaagatataagctaaggtcgttcgaattgtctattgaatgatgttcttttccaaaccccaaaacaggacgtgcacatatatccatattaatttcatttacccttcaagtgatgtttatttgtaaaccccaaaagatgatagtggaaactcttggtctttctttttttacattttgtgctttcatgcttggctgtattagcaaccaaagtatcttctgattcttgccatgttgaaaaaagtttacaaaatttccaaacaaaacccaaaaattttcaggttgcttcaaatgtgtgtactagtgtagtttatgttactttcagttgcaatggttcctctaaaaaaaagaagtaacgttagggtgcattgcaaatattgagatttagaatgtatatagtatacacacataccgttttctcttcttcaatcttagccttgatataagaatagagtgcaacaccagctatggcaatgcaagtgccaattcctgtttgtgtggtgatcttgttgcctgttcaacattaagttcaccaagtattacacaaaaacatcagatcatttgcacactaaaactatgtatatgaagttctacaaaaaaagagtacaacacttgccaatggcaagaacaagaatatgcatactgatcgacaatcattatgaaagattaaaattaaaagtaccgaatgcaatgattgagaagccaatgacgaagacacgttttaacacattgccaacagcatgtgttagaggggtcaccctttctaatgtgtttgtagcaacctggataaaagagagaataccaactatcatcacaaaatggcagaaaatttatccatatttgcctaatactatgatttatttctatatctgaacaactataaaaagttttagtttcaaaatattgatagttacgaacttacgatgtgggaaatgcttgtttttattcttgacatgtggactaagttatttgaggatgttgtttgtaatagtgattaaagttgtttttaaccttcatctataaaccatgttgtttcatgatattcttgatctatgggcaaattatgacattaagctatttacctggttataaaggtgatagaacaagcccaccacaaggagattagaaaccaactttgctaatccaactttagcaatagcatctttgaatccatgctgcactagttgaggtccttcaatctgcaaaatttgtgttataaagaatcaacatgaaagtcaatgataatgcgtaggtgactttaaaggtatcttgcggacttaagaaatcatgagaaagggcatgtagcctagtggttgcagtgacctgagtagtaccccaaggtcttgagttcaaatcttcataggagcgaatttcagattgtattgtttgaggggctaagttcctaatttaaatggttatatatatccgattggatatagaggccgggtaaaaaataccttctctaaaaaaaagaaatcatataaaagaattttattaaccacactactatgggctaaggccctgcgggtagctgagcatgccttcctacagtacggttagttcacatgagcagtacctacatctatggtttaaccttgccttgcctcaagagcctgtaccacatcatgcaagggacctgccaatagctagatgagtgggaatccctacccttgatcctcacaaccagtacattgtaccatcagtccagggactaataccaaagacaaatgcataagacatgtacaggcgaacatcaaaattggattaggccacttgcaggcctgtcaaccatacatacacctatacaaacagcatataagcatgagcacatttctaaacagacgttccaatttcctctggagggacagggagaggccggtacaggccaggttagttagcagggcaggaatacaaaacatattatttggtttgtccaatttcctcccaaatgtggccaccaaccacagctaattaacaggaagctgtgacatcagtttcaagttttctcaacctcacaagcagagtgattttcatttcttagtagtcaatcatgatgttcaaattactttagtagcaaggttacagtggatctccgattattttcagactatttctctaccgctctgcgctttggacccagtttgaactttgaaggcattgtgctctgctgcaacatggaatctggaatgagaaaacaacaggagctttgcaaaaagtaaactgctaaaatcactttttctaatatgtattcgcaaactgtaataaatggttattatcagggttatagaaaaacaacaacaattttgagtaaaatcctgctcctaggctggtattccacgcaggtaatatcttaaatttctaattttaaaagtaaatgcagttacttgcttactgcaaaagatcatgtgcaagcacatgaagcgatgtttcgtgatggaactaaattttcaaatgttgtgcagtttttcaaagggatagaggaacagtggtttgagcatgaaagggaaaattggattttaccatgtcagaacacatgattagggtaattagagaaatggaggtgttgcatacactaggtagttttgaccttaggaggaaaatcaggaattgttgtcaaatgaatacaatcattgtgaccatctttctttatgcccccacattagtctgaattgaaaaaatgccttatattatttaccaacaaacacaagagttgcatgcatgcataaatcacaactacttgcaagagtattgcaaaacatggttactcacaacaatgaactcctaaaaattgctaaattatgtagtggtttactggtttatggatcaaattctatccttggtggttggcaattgtagaacacatgcatgatattctttcgtagtttcttcaaattcatataatcaaaatttgccttttttgtaacatacgcaatatggtcagtgcacaaaatccaggccaggtcagaaaaactggtaactactagttactagttctctccatggattcgaactgtagactctggtcattacactcctttacttgttttcctacatagtgaatactgaataattttctactgtatttcaaatcctctccaataaatcaacgacaaaatatcatcagcacagtgataaacaacaagatggtgagaacttgataaatatgctatgcttaacatcggctatgttgcgatatgcctttttaggtatctatagacctatatgctaccaacagctgaagtgttaaatatgtaacaaacatgcataaagataaaattagacttacaataattgcaggagggatgcagacaaggagagcaattattgagatgtacgcatacaggttggtgctatccatgtcagtctgtgataaagaacagcaacaaagtaaaaaaatgaaacgggagtatcaaaaggaagagtgaatatgcatgcagatcattagaggtaacaagcaaaccatagccttcttggaataaacgctccgtaatgtgaaggagatattagaaatcatggcattaacgaaaccagtccaattgaatgaaagttcagtgagagatgccattgaaacacctgattatttcaaaacagaatatactccaaatgattaccaatgcacagaagtagagatgctatagagacaactagaaagtcctaaaacataatatgcttgaaatgattaaagatgcatggaggctgtgaggaatgttactgagacaactgatagtaaagagtatccctggttccctggtcatcttatataatatctagaatattaatattaatttcctatctaagcatgtcatggaggaatctgtggaattaagcaataaacagtgaaataatcaaactgtagtttctccaaggttcttcaatctcatctttagtctgttccctcctcccgaataaccaaggcagctcagcctaccccccccccccccccccacaaagcccacacacagagttgcgtttatcgcacgataaggtaggtttcattaagcatgccatcgtgtagcacaccacttattgatatgccattgtaatatcatgatgaccagaattcaggagaaagaaatggtcattacgctataggaattagagagaaataagaaagaaataaagaaggcccaaggcccaacctactaggaacatgtgtccactctgcacaacagaaaggactataagtatcaatttggctctttctcatttgccctcatcataaggcaaggcatctgatcatggaaatgttactggagtgcttggatgctgaggcatcacctgcacaggggccttgacaaccatgaaacctactttcatatgtccttatttgcattgatgttaagatacaagtgatgtactgctaggaacacaagcaaaaggcataatgagattacctatcacaaccggagcaagagataaccacagcgtcaatggaacttgctggccaaggataaactgtgaagcagccgcattgaaaaatggttcaagagctgcaatcattttatttgcaggaaaaatctcagcataaagaagaaacgcaaaaggccaaaaatacaaaaataaaatcaagatactgttgcagtacctttaatggtgtgggcaaatgagacagctacagcagcaaaggacacggtgcttgttacatgaccaatagcatggcagacagcaactgggaacagtagcttcagaaccgttgagttgatcggctacaaaagttcaaactttcccaagtttgactattgccttccagaaatgatatcattaacgtaaaaaattttggatatgaaacaactgatgatacatacaaatatacaactttttcagtatgtatactagcttgatgtatttagggagttttttgtggattctactttgataagtttggcaatttgttgccaaacttgggatgccacactttcttaaccccatgtccaatatgccattgatacaagttctcaaattttgcgcatcaattttcttgccacaaaaatcatggtatgccacattattgggacaactagaagtgcgcatatgtgtttagacggaaatttattttccttatactaaaagcataaaaaaaactaattttccaacaggaaataagattttatatatgtatcagtaagttgatgtgaagtcggagcaaggatgagaatgtagaacggctatcaccaccaattactccaatattaaaagtagagaaagagtggcaaactgcagcaatttaccaaatgagcccttaggctgtgttcgcatgtggtggatgggaacttattccctccgcacagaaaacggagcggtccattagcgcgtgattaattaagtattacctaattgtttttcaaaaatggattaatttgatttttttaagcaactttcttatagaaactttttgcaaaaagcacaccgtttagcagtttgaaaagcgtgcaagcggaaaatgaggaagaggggttgggaacaaggggttgcaaacacagccttaaccctttcttttacaagtgctcttcacatgattttcatcgacatctaaagttcgcggacaccagtagcaagtcaaagacttgaaatctagtagctggctgccgatcctcccttcccctctacaaggtagacatataaccaaaatacttgaaaatgccctaatgtaggagatcaggtaatattgatcctaattgaacacaaacaggtaaagccacagaaaaaaattattcctggcctgtttaaatccaatttacgtattcgtccagaacgcttgtcagtcagaaacatcacacataagaatgaataagtgattttgttatattttgagggccataaagcatttcattataggttttcagctaatggagatgtaaaagaccagcaattttgctctatcatggctgcacattatttgacaattgccattggcaatgatatatgttgaccaacaacccctaataattttgtgtattcatgctcattattgaaaggaatcatggttgaagaagggcatgggcatgagaataccgcgcgctttgggagaccaaaactccagccgacaaggcagtacaagactcctaccaaaagatggctcaccgacacaaaactatattaacaagaaagaggttttagatcatgaagatgcatgttgtcacatgaaaggaaaaagaaaaggaggcacacatataaagcaaacgtactatggataggggaagtagtcgaagatcttcttgttaaggatgttaaatatcacgttcagaaaatacctacaaaatcatattgtgaattggcaatagctaaaccacattaggcagcaacttctcagttcgctcacctgcaattgtaaattctaaagtgcgctcaggtgagtaagcataccacatgaagaaaaagaaaccggtgacaagagcagggtatctctctgcaaatcccacaggctttgcttccctgtaaagtgtaatagcaatttctcagttcccgaaattgaagttacatatacagggtggtgagaagaattggaattagttcaaatagagaatgatcacttaaaagtttggcacggttcttttgtttaggaggcgttgtccaactagtgaaaaagttaccggattcatagcttgtccctaattgctgcaaacctatcttcctagctcttaactttccattaatgaaagagcatgctagcctattgattcaaaaagaaaatgcatatctacaaatatccactgagaataaagtaactccatcgcctagactctactgtcttaaaaacttgccacaatcagaacctgtgttggaacatatgagaacataacaagaatataaatgcagaaaaaaaacaaaacagaagatgagaaagcatagaaacttggtgtttgagacacaggaattgttatccatcattccaatggaatatttcccttgtcttcagttcatttttattttcctttgtgaagtacatgaaagagcaaaacttcaaaggaatctggcctattcatccattccaattgctacaatcggtgaaagaacacttatccgagaggggaaagcactatatgtttgtgtctttgtgatatgggccatttgtccaacaataattataaatgagtggatattttgcagtcacaaataaattggaccaatcatcagatgtattcatgaacaatgccaactttccttatttgtttctttttaaaagtattcatttttcagtaaaggactcatgtgctatatagaaattatggttaacactaagttaatgtaaactccaaaacagaccttaaaaagtgcacacgactctgaaaaactcaaatcagccttatctgacctccattggttcatgatggaatacaaatagaaatcacgaagggaatttcaaggtcccaaatgcaagtaattgtccatgcatagcctagcggcatattttgccagctactctaaaatcgacccatacattgttccttgccagttatctaatttgaatgctcttttagttagtatttgactcttctcctaattcaatagtgaaatatataagaaaccaattcctcatacatatatttggtccagtaatgaacatcgctacactactcattcagcttagagtaaagtccatcaccggtccctaaacttgtaccgttgtgtcatcccagtccctaaaatcgcaaatcgaccgttcaggtcctcaaacttgttcgactatgtcatcccggtccctaaacttgcagatcactcgtttaggtcctccaacttgttcagctgtgtcacaacggtccctaaacaggacggtctaaaaactttatat

SEQ ID NO: 10273 - DNA, 41620 bp, Oryza sativa
taatgttgcagcaaaccaatagttttgtcactgaagttgcagtttttatgaaatttactctatttcagtatgttgcttcattattttttataatatcctatgtacctatttagttcatcttcacttagttgttatttctcccttctctaattaagccatataacatcaattgcttttagcgcttaaatgattaatctatggtccaattatctccctccttttcttctctcgttaagttatatcacctcaattgttttaagcccttagataattaaaatatggtccaaactatctccctacttttattctctcgtaaaaccatatcatattacttttatatttgaattatcattttatataatatttaaatttaaattatcacaaaccacatcaacttacataatcttatatagtgtaactatcttacacattatttttacttattgatatcctactgaacttccacagcaacacacaaagtttcacctagtttaactaaagctaggtgacagtggtgacatgtggtcacattgttatggacccacatattagtgggtcaagggcacctaccgttacgatagaggagctgcttccggaaaattgaacacactcaaatagtgtcaggttaatttctttgtactagctatcatcgttaacactgaaacatatcaagacaaaattataaaaattaaagatgtttttgccggtattttgctacgtcatccgtgtatgagtcggtttttaagttcgtttgcttttgaaaatacatatccgtatttgagttggattttaaaattgttcacttttgttaatacagaaagaattatataagaaatttatttaaaaaaactcgcatgctaacttgagacgatcggagtcctaactgcagctcatgattttctaaaaaatatatatccaagcgaactcccacagtgaatttcatcttaactaaaccatataataacaagattaaaataaattttacccgttgcaacgcacatttttttctagtcatcaagacaaaagtaaaacaactactatagttattaatttagatccagacaaaaatgaaacaacgcccatagctattaattttattaacttgtactccttcagtactaaaatataaaaatctaaaatcggattggatattttttaatttcttatattttgtgagggaatataaatttatagagttacatatagaatactgaagtatatactagttgcgtaattgtgacgccccgattttcgttcgggattaaaaatcatttaataaggcattttctagaaattaaataaaagttaaagctagttaatcaagtgaaattattgagggaattaaaatttcctttaaaattcatggccgggaatattttgtaatattctttgtgccctaatgtactctccggaattttccgtgaattttcggagctcaagaagtaattttaatagcacaaagttcatttaaccaattagaataaaaagaaaagaaaaataattttccccttccttgctttcgggctcggcccaaattcctcccctccccatctcgggctctctctctccctcggcccagctcgccgctcggccctctcctccccgaagtctactttgcctccccagccggcctccctctcctctttggccgacaggtgggacccatgggcccacctgtcatccccaacctcaggccggcaactgccgttgccgccatggccgccgaaaaccgcccacgtcgccaccattcccggcctcctcgagccctctctcgcgtgggaccgggagccacccctctcctccacctcctcccccgcttttccccaaattttggcgccgaatcgagccccacttcgcccacgatgtcgcccacgtcgccggccgttgccgcttcaaatccgccacatccggccacgatttctcctccccgagcctataaaaatgatccccgtgccatcctcccccttttccccaattttcccgaacccgctgcactccctaccgctctcccctcgttgctcccgcgctctgctgctttccggcgagctccggctgtacgccgccgtcgctgtagccgccgccgcgccgcgccgctgcaccgtcggctccgccgctctttgccgcacaccggccaccgccccgtttccacaaaactccgccgaaacaccacatccaccgtgcacccgagccacagccgcctctcgtcacctccagtcgcgcgccaccaccgctcccgtcgctgccgcgctgcgctaccaccgccatcggcatcgccgttcctcgccgcaccccggcccctactccgtttcccctccctgcccctggaacgccgccgccgcgttcaccatctctctccgccgccaccgccgactccagccgcgtcgcgccgccgcttcggtcgacgtcgactcgcgccgttgcctccctcagctccgcaaggacgaggaggacctcggccgccgcccctcttcgccggaaatccgccggagctcctccttcctcggtcgccggtgagctctacctcttgtcatcgccatcggccttcgtttccagtcaccccgcatcggtcctcccctccctaactccctcttctccttctgaaggtcaagggcgaccccgtccgccctccgtcctcgcaagccgccattgggcaatcgtcgtcgccgtcctcttcctccgcgtcggccgccgcttccggtaaggatctctcctcccttccttttttttcccgtccccctttcttgccgaccgccgcctcttggggtgcgtcgccgtccccgtgcgcgccgctgtcctccggccgcccgccgccgttccacgtcgccggctgctgcagccggttgccgcctcccccttgccgcctcccccttgccgccgcctcccccttgccgcctcccccttgccgccgcctcccccttgccgcctcccccttgccgccgccgcgccatgtctcggccgagccggcttcatgccgtgcccgtgccccagccgcgccgcctcgtggccgtccgatcggctttgggccgatccgggccgtcggttcctgtggaccgcctcggtggtcccagtccacggtggaccggcgcccttgtgccgctgaccggtggggcccgcttgccggcgccgcccctcccccttgatgacgtcagcgagttccatttcctttgtaaaaataaataataattgcgcaataaatcgagtttaattctagaaattcatttaaatggctcaaaacttctaaaattcatatctaattcattcgaactccgaattgagccattcaacttgcaaaattcatctaaaattgagctctacatgtttgtttactttttatgtactgttttcttggtttttattagagtttttcctcgttttgcgtgccagcgtgtagaatccgttgtttcggaagtccgcggtcgcgaggaaaagagttcggaagattgttttgaagaagcaaggcaagtcacacattccccttgagcatgtttatcctaatttataaatgttttaccgtttacaaataaatatgcatgttttgctaattacatgggatctgggtattacctatctgctcgcttgtgccatgtttacttgatatctgttctttgtcaaccttgggtaataaatcgactagctcatgttacttatgtgacctagctagaactatatgcttagccatgcttaattactactagctcagttgatgggataattacagtattagacctttttagtatcagaatgagctatgtgctcaagacatctggccatgcttcatggttataattatccaactaaaatgcgactgaatggtgggctgtgggtgcatggttttgctagtcgcacccatggcaattaaggaccggttcgcgggatgccctggaagaacttatcgtacttaccacaagccagcgtgggcaacggctgggcttgtagtgtagctttcctctagccgacgcatccaggcaagggtgggcgtgatggagtttggatgggccctgcgacggcctatgcggcttccggattcacctaggcacgagaggggactgcccgctgccttgcgaggagtgggggtgaaacctgaggtgtggtgtgcttggttagagggggttatgcgaagggtcctgtcacggcctctttccggtatgtcgtggtggcatgtcggcgcacggaaacgtgtcgtggggctgtgtcttgtgggtacagttgtacacctctgatcagagtaaaactattcgaatagccgtgcccgcggttatgggcggtcgaccagattcaccgtgattagtctcacacttaataaatcgacccaatgcactgtagtacaggtgggttggttgggcctgttcaacgtggtgtagcgttgatcagtggagattttaatgttactttaattactcaacagttttactgttttgttcaataaaatgttttacaaccgcctttatgcaaatagccacaaaccgtccttgtgttccccttgcacgcctgcatcgttggtgtggcttgctgagtacggtggttgtactcagccttgctattattccctcttttcagaagtgtagtgcttctgagctgaagatggagttagaggaccaaggctcagaccccagttgagttttgcctgtggagtggagctgaagccccgctaggatcgcctttttccgctgctgctgcttttgtttcggtgtgaggactaagtgcctcttctgtaagtattttacgctttatttacgtttgggactgtgtattacttgtcgttttgtgtaccctggctggtcctggacagggatttaatacacaaaatagtctggaaatttgggctaaatttctgggcgtgacagtaatcatgtacgactttgcattctagaacccctttatcccagtagcaccatcccatttgctgcccatgctaacctctcctcagacctagcttccatctctacctccgctggcgcaccgccctgaacatcagcctcctcttgctcgtcgacggcatccccattcttctcctccggcaaagcctccacaaccgctaatgctcctcccgatgacagcgacgatgatcaatttgttagtgtgaacgcaaatatgatcttgcggctaaaccaagtcggcagagagatttttttggacgatcgctacagtgatcgacctctcaagaacatccctgatcgggggatttaccgcctcttctagtgccggttccccctgtgtatagtggctataaatagagataaatacctaagtattaaaccctaagttttcctttgctacccgatcaagcaaaacccactgaaaacacagggaagaaccgagacacgattatctctgtgcttccaaacgaaaagagaagaaagaagaacaaaagacagagacatgggaactcctggagatcaaggtatgacccaatcccattccaatttgtagttccattttgtgccaaaccgatccaaatcatgcaatccaacaatggtatcagagcaaggttggcctcaaattggaactcagtaagtgttctgtgcaatccaattaaatttgttttagtgtttatgttcaagttgttcttcgtgttcatgcccaaatccctctgttaaagttgaattgagcccaaatcatgcaatcctgaggtataagaaacgaaattaggcctactagggtttcggcttgaagaaaatagaagaaggggaaggcaaatttcatgcaaatctcagaaattccccaagaaccaaaaccctagcaacagtaaaccccccccccccaaaaaaaaattccccaaatcatggtaccctaaccctaaaatcatggggaaaaggagcgcggcgggcttacctaagggccatggtggccggtggcaaccaccgtgtcgccaccgacgctgtaagaggcgagcgtgcgctcgaggacttggtccccgagcggcctcgtgacccgccgtgctggcccggctcctccttgcatgcttgctgtcgctgaggtagccgttgccggccccgtctcgccgtcgctgccgcagatctcccttgcgcgagcgaccggcgggtacattagggcaccgtcgagcaacgctcaacggggatgcgcgccagctatggcggcacgcagccccggcgagcaaggctcggtggcaccatcaccgaccccgtcgtgcgccgtttcgccgccgtcgtcgtcgtctcgctcacgtcgccgcgggtgtgagagaaagagaagaggagagaatgggggctagggtttctcggggggcggccgccgcgccggttttgtcccgcgcgggagcgatcccggccgtccgatgagatggacggctcggatcggctcgctcccgacgcaggctgacgaggccgtgcgtaaggggtcgaacgccggcccaggcccaggttgttgggcctggagcccaggcgggaggcggcgcggctgtgatgggccaggccaaatgcggcctagctcggggaagaggcccagctaaagtttcaataaaaaaattaaattatatttggtttaattcttaaattggctgcatagtaacgggctgcatagtaacgtgtctaagaaaaggattgggctaaaatgatattacaattaaatttttctttttaaagaattatgattatgattattgtgtttaaactttaaatatattttataatgctttagttaataataataaaaataataagtgactttattatatggtaaaattctcttttatttatctgtttattttatgatcattacattatgtttattacttaaagttattattattttatgcattgtgagtttatttgcgctgcaaataaatattgtaattaagtgtgacaaacaattgtcattctggccaaagctgattgaattttatttgatcacaaaattttattaattcaattcaaatctggccaaagttgttctgattgaattaataaaaggagttttttttaaacaaattaataaagtgtggtttgtatttattattctggccaaagctgttatggatttgaccagcatcttatgcctcacaaattgctggaataatgggcaatattgaacaacttaatggaagtaattatgcttcatggaaggagaagctggaaattactctagctctgttggatattgattacgccctccataataatcctttgattgagcctagaccggaaaatgagaattatgagacccttaaaaaggaatatgatgaagtaaaggcaaaatgggatatttcaaaccgtaaattccttatgattatcaagagctccattattgacgcaataagaggagcagtcccagagactcagacagccagagaatatcttgctaaagttgaggaacagtttaaaggctcttctaaagtttatgccaccactcttattaaaagattggtcaatgaaaaatatgattttactggaaatctgagggaacatgttatgaagaaatgtcacgtggcctttaagcttaaatcaatggaaatgaaaatctccgaaggtttacttgtccatttcattatgtcatctctgccccaggaattttctccgtttacgatcgattataatgcaatgaagatcaagtggggcattgatgaattaatagccatgtgtgtgcaagaagaggaaaggcttaaggcagaaagagttgatcatgcgaatctatttaaacactccgagaagaaaaggtataaaaaatttaagaaagagtttttgaagcctaagcctagtcaatttaaagaaaaggggaaatgttcaaatcaatcccagtagaataaatctggaggaaatccctatacagaagaaaagggaaaagaaaaggatgggtgctacttttgtggaaagagtggacaccgccaaaaggactgtattgggtttatgagatggctcagtaagaaaggtactgatgttatttcttttgttgatgaatccctgaatattgattatgccatcaattcttggtggattgactcaggagcaacaattcatgttgcaaattccttgcagggattcactatgaggaggaccctaagaagaggggaaagaagaattaaagttgctaatggagttgaaactgaagttaaggccattggagacttcattctcacacttcatactggcttcaaatttcagctgcatgacgtcctttatgtaccctctatgaaaaggaacttaatttccgtttcacgtttagataacggtggttactattgtacttttggaaacaatagatgtataattatgcatgataataaagaggttggtctcgccgatgggcaggaacaactttatcaaatctccgtgtgcgatgccacctataatgttgactcctccttaaatgcaaatgtcagtaccaaacgaaaacataacgataatgagacttcttcgaaattatggcactatcgtttgggccatatttcgagggggagaattgagcgtctcattaaagaaaacatcctctatcctttggacttctcggatgcagacattgatcactgcattgattgcatcaaaggaaaatattcaaagcaaatcaagaaaggtgcaaatcgaagtatgggagttttggaaatcatccacacagacatatgtggtccatttaatgtaaagtcagtggatggatttgatttattcataacattcaccgatgactactctcgttatggatatatctatccaatcaaagaaagatctgaggcattagacaaatttaaaattttcaaagcagaagttgagaatcaacatgattgaaagatcaaaattgtaaggtctgaccgtggtggtgaatactatggtagacatactacttatggtcaaattcctagaccttttgcgaggttcttacaggaaaatggcattaaggcccagtactcagcaccgagcgaaccccagcaaaatggagtagctgaaaggcgtaatcgcactcttatggatatggtacgaagtatgttaagtcactccattctgccggtaaagttatggatggaagctcttcagacagctgcacacattcttaacagggttcccagtaaattagttcctaagacacctaagacagctgcacacattcttaacagggttcccagtaaattagttcctaagacaccttttgaattatggactgggaagaaaccaaccctaaattattttcatgtgtggggttgtcctgctggagcatgagtttttaatccaaacatgagaaaagttagacctcaaaacaatcagttgtcattttatcggttatcctgataagtcaaaaggcatatagattctactgcccaaatcagtttacaaagtttattgagacaagacacgatgtgttcttggaaaatgacataatcaaggggagtatgacacccagagaagttgttctggaagagaaactgaattacgttccaatgcctctaattgaagaacccgttttctcaacacatactcgtgttacaccttcaatagaaagaaataatgatgcaacatctgctgaagctcctgcaactacttctagtagtatatcaaatgatgagaataatgaggatactcagcagccccaagttgtgatagatgagcaaaataacgaacccgtcagaagatcacaacgagttagaaagtcagcaattccaagtgactatgttacttacatgaataaagaggtgaatgaacctatgagtgaagaggtgaatgagcctatattagacattgatcccatctcatttaaagaagcaatgaagagtgaacattcgtctgaatggttaaatgctatgaaagacgaaatgaagtccatgagtactaataaagtctgggacttaatagaaattcccgaaggagccaaaacagttggctgcaaatgggtctataagactaaacgtgaccctaagggaaatatcgaaaggttcaaagcaaggcttgtagcaaaatgatttacgcaaagagaagggattgattataatgaaacattttctctagtctctactaaggactcattcagaattattatggcactagttgcccattatgatttggaattataccaaatggatgttaagacggcattcctgaacggtgatttatatgaagatgtatacatggcacaaccagaaggttttgttactaaaggaaaagaacatatgggatgtcatctaaacaaatcaatttatggactaaagcaagcatcaaggcagtggtatctaaagtttgaccaaatcataagacaatttggttttaaagagaataaaaaggataattgtatatacgctaactttaaggagagtaagttcatcttcctaatattatatgtcgatgatatactcttggccagtaatgacaaaaatatgctactggaaacaaagaaatttatggcctctaagtttgaaatgaaagatctcggtgaagccacctatgtgttgggtatagaaatttaccgagacagatcgaatggtgttttggggctatcctagaaagcatatatagaaaaagtactgaagaagtataatatgcataattgttcagcctcgcctgctcctataatgaagggtgataagtatgaaaaattccaatgtcctaagaatgagtatgaagctgcacagatgaagtcaataccatatgcttcagctgttggaagcataatgtatgcacaagtgtgcactcgccctgacttagcatttgttaccgggatgcttggcagatatcaatctaatccaggtctagagcactggaaattagctaagaagaccttacgttatctacaaggcactaaagacctcatgctcacatatagaaagtctaaaaaccttgaagttgttggttgttcggactctgatcttgcagggtgtgttgatgataagaaatccacgtcaggttacattttcacccttgcaaggggagctatatcatggaaaagctccgaacaaagagttactgcatcgtcgacaatgcaggctgagtatgtggcatgttatgaagctactggacaggcaatatggctgaagaattttatcctgggattgagagtggtcgacagtatatcaaaaccactcaaattatactgtgataacaaaccagcagtatactatgcgagtagcaacaaatcaagtgcttctgccaagtacattgatatcaagtaccatgttgtgaaagaaatgattcaggatcagacaataagcgttgaatatataaacactaagttgatgttagcggatccactcacaaaaggcctaacacccgttgtatttaaagagcatgttgccggcatgggtttggtagaaaagcctttgatcctggaataagaaggaacctatatggcactgactccccataaaactaaggcggactcattttgaaattaaataggaaccatagtcacttggttcagtggtgcttaattgattactgtaatctaatgtcttgatgtactgttttaatgaaaagtgagtccataagtttgtatatgcctaatgtaataagttcaaagagctcgtaagattaaagaagtttattttaaaatataatggtgtgctatagtcactggattctgttatgctttatattggtcactgtaatcttttatcttggtatgctattatgttgagagatggacttataaatttagcctcacgattaagggggagaatgttagtgtgaaagcaaatatgatcttgcggctaaaccaagtcggcagagatattttttttgggcgatcgctatagtgaacgacctctcaagagcatcctttattgggggatttaccgcctcttctagtgccggttccccctgtgtgcagtggctataaatagagataaatacctaagtgttaaaccctaagttttcctttgctacccgattaagcaaaacccactaaaacatagggaagaaccgagaaatgattctctctgtgcttccaaatgaaaagagaagaaagaagaacaaagacagagagatgggaactcctagagatcaaggtatgacccaatcccatttcaatttgtagttccattttgtgccaaaccgatccaaatcatgcaatccaacaccattctcctccttattcttcttcttcttcaccttcgatgatgacgatgacgatgatccagtctcctccttattcttcttcaacttcgccttccgcacctgcattagggcgtcgtggacgttcatggcagcgtcggcgtgcggggcgtcgcctctgaatgcattagggcgtcgtggacgttcatggcggcgtcggcgtgcggggcgtcgcctctgaagtagtgcaccatgaccagcccgagccggccgtcctcatggccatccacgccatggctcagccaccgggaacggaacgcccacagatcgatcatggcttcgttggccatggcggcgttcttgtccttgacgtcaaggtggttttctttaaggaattcggaccattccaggatgagccggtaggcgtcgttgcagttgaggaacttgcacttgaggtcgtagtcccggccggtgcggtcgtaggcctgcactcgcaggccctcgtcgccgtcggcggcggccttctccgccggcgtcaggagctcctcgaacgggaacggctcgtcgccgccgcggtgcgtgttgtgccagcccttgcacgacatgagcagccggtgctgggcgacgctccggtccgtgaacgtcatcttcttgccgtagacgcgcgccggcggccgccacggcgaggcgacgaggtaccaaaggttcgcgcggaggttgtcgtcgacgacggcgatgttgtcgagcgtcgcgcccgtgtcggaccccgccgaggtcgtcgacgccatgtcgtgccctagtgcggtccagaagaacgcgcggtggtcaggcttgggcttcttggctcccggcggcggcgtcgcctcatccgcggcgacgtgcggtggtcggccggctcccaggatggcggcgccgccgatgagcttcttctcgacgggacggggacgccggcgcgcggccggagcggcggccctcaggccggccagcttgcacttccggacattctctttcatgctcggcgtcatcattgcaatggcgtcttcttgccgtcgaacacccaggaggagggtgtcagtgtcaccgccgggaggcaggtcagccggtgcgccgccgctgacgctcggcgggctctggtcctcggcgaccatcttccccttccgcagccggccctcgcccaccaacgtctcgccgccggtggcgcacggcgcgctctggtccgcggccgccgccggagctccaccatctggattgccgaccatggacggcgtcgacggcggcggcgcctgagtcacagtcgccatctcctcctccaacgccgccgccggcgatgtctcccgccgggagaccgcgtcgaacgacatcggaaagacgaaaacctgaaagaaatcgacgaacgatctgggagtccggaagaatgacggtcggtgcaatttatttataaactgttatgcgtatagataccatttgtactggtaactgtagcagatgcgaactctatctcgttattttgtattttaaattttatagatagaaaggtttagagattcaccgggttatcttttgtcgttttatattccaaaaatattaaaacataaaagtaaattaaagtcacaggtggttccatggtctagcggttaggacattggactctgaatccagtaacccgagttcaaatctcggtggaacctgtttttgcaacttttttttaacttttttttccagtggtgtaacgagcatatgatgtttaaatttcattgtcaagataaatctcctatgaaatcgcaattctcaagctgattatttcattgttaagataaatttcctatgaaatcgcaccgaattttctcaagctgattaggacccctttgaatcgcaggattgagaaaacgtaggattttataggaatataagtgtaaaacataggattgcaaaagcacatgaataactattcgattgaaccgcaggaaaaacacatgaattggatgagaaagataaactcaaaggaaagttaccaagagattgaagctcttactaaattttctccaaaatctctatagaattatccattccaaaggaatttcaaaggattggatagaatacaatcatttgtttcaaaggtcttcataggaaattttcctataggattgaaatcctccaaaattcctgtcacagcctgaatttcgtttcaggatttataaattatttaataaattattaatagaatttatattaaatgttcattaatttacaagtgaagttaaatgtgggaaataaaatttcctaaatataaagcatggttggatttaatttttattaaattctccatgattaattatactctctggaattttcttggattcttcagagctcaattattaattttaataatacaaagaacagtttagcaattatttaaataataaattaattattaaatgatctggatattattatattaaatactttgagtgtccaagtatgttcaagatttttcttggaattatttgagcattggaagtatttttaacaattgaaagatcatctcattagttaatttatttggaaaagtaaataaaaatcctcctcctcagcctgggccgaatccagcccattccctcctttcccctctcccttcctctcagcccagataaagtctgtttaacctccctggcgctacagtactccatcttcctcctccagccgactgtctcccgtgccgtgcacagtgccgccgcctcctcccaccaatccgacctccccgttgctcctctttccaaattagttgcgggaatggaatcccctcaatctcctcttccttttccccaagaaatccccaaaattttctatggaaattctttccaatttcgcggatcaaatccttcctttttccggcgagaaccctagactttcccgagtttttcccgtcgttgtgggcttgatcccgagctcccgtgcctatataaaggaccccctagtcgtcctctacccatcccctcaagtcccgtccgccgtcgtcgccggaatcgctctccccgcgctctccctctctctccacctctggcagccgctccagccgccgtgcgccgtcgacccggccgtcgccggtcagtgccgccacttccctcggtttcgcagtgaagagctctaccccggccacccgttcttttgcgccgaaccccgccagaagtcgccgtccccgtgaaggccgaaccgttgccatgttttgatctccggcgaggccctgctgctcatcccgtcgtcgccttcggtcgccgtcgcctcctttgggttggcagctgcgaggtgatggccgtccacccctccgttatcgctgctcgtcgccggaaagtcgtcgccgccatggacagtacctcgccgcccttcgaagctcgttgtcggccatcttccgtcgctgtccgtcgttgcgtaagtgttggtaagaatcgccgtcgccttctctacctcccggtgccctccgtttgcatttttttgtgccgttgttcgccggcaaccgccgctcccatgccgttcgccggtgtaggtttttccctagggtcttaatccaatataatctaatccgcggtttgtctagcgttgtcgtctccatgtgttgctatcggaacgttgtcatcatctctccctctccgatcattttggttcggtgagacttctatccgttttccctcggtttagtttttaatctcccgtttttgttgtcgagtagtcgtcgctctgccgtagccgtgtgccgttgtcgctgtgccgtcgccctaaccccagccgcgtgtctccgccgagtcgccgccgcctagccgagccaagtcgccctagtgccgccgtgtcgcagctgtgtgcctcttaaacctagccaccggtttagccgcggtcgttgttgagtcgttcgctcgttcgttcgaacgaggtgttccccgtgcttcgtccgttcgtctgtgttgagtcgtcctttagtttagagcctttcagagccgccggttccgttcgccggtttcggttgatcatttgggtgatcccgtgtcacgtagaattgactcgttgagtcggtatctcgtgaggttcgcttgcaagattaatcttagccgtccaaaattgatataaatccgttctttcttttcaatgacatattattcctttttaatatatgtcatctaccaaatatgatctaatctttttccggaggatgttttaatcttctgtctcagctataaatcatttgtaaattgtttaattaatttggaatagtcttttctttaataggtttaattggaatttaatcttgtaaaatttgtaactaattcatatgaaatcggaatgaggccgttcaagtctctaaattcatctaaaattatgatctacatgtttgtttactttttatgtattgtttatttggtttttattagtctttttcttcgttttgcgtgttagcttgtcgtttccgtcgttgcgaaggttcgcgagtgcgccggaagtattcaagaagattaattgaaaaccgattattgcaaggcaagtcacacagatcctaaacacaatcctttgagcatgttgatcctatatttaaattctttatttatttcaactgtgcatttattttcgaatgtcactgggtggtgtgaatctattcctttgttatggcatgtttgcattgattactttattccttgataccttgggttattataacatgactagttgggctatatatattggttcagctagatattagatatgattacttagccatgcttagaaacattagcacactattgggataacttatgactcattattatttaatgatggcttaatgatagttcacgatggttaatcgtgattggttaattaattacttgccaactaaaacttgataatggtgggttgtgagcacatggttttgagagtcgtgctcatgacaattaaggaccggttcgcgagctactattgtgaaacattaaccgtgccaaccacaagccagcgtgggcaacggctttaccttttgtatagcatgattcattgcggagcaccagactgagaagtggcggagataagcccacggaggtcgctggggagtccatgccttgtttataagagggtgattatgatccaggaaaggtgcgctgtggtggattgtgttgtgcaaggggtattgtcacagctcctttccgagataccgtggtggtattgaggcacatggtgacatgttgtggggctgtgtcttgtgggtacagtggtacacctctggccagagtaaaactattcgaatagccgtgcccgcggttatgggcgggttgagcaatgtttttcgtgattagtctcacacctctcacaatagttatggatgttatacctagtaataatttgcttagctcctggtttggagttagatctgtacagccgggtatggttgttcaggatggttgggcctgtgcagcatgggtgtgttgttcagtgttgattaaaatttctgattaattactccactgttttacttctcttaaatgttttgctaaaagctgcttttgcaaatgagccaatattatgccatcctttggtatccttgtgcacttgcatatttgctgtgtggcttgctgagtatgtcatatgctcaccttgcaataatcaatcaacctcagttgaagaaaaaggatccagaaggagaagacgtttggcttataccccagttgagctgcctgtgggagtggagccggagcttcgctagattttattttccgctgcagttttcttcatggtgaggactaagtgtctcttaaggaagtatttatcgttttagttaatttgatgaatctgtatattaaattgtcagtttgtgtacctcggctgattcctggacgaggattttatgcacaaataagttcggaaattactagtgaatttccggacgtgacaattcctatgtttttcctccaattcaaatgggcccttagtggatttgctcctcgtcaatttgctgacactgatagagagaagagggaggagtgaggataacatgtggggcctaccatttttaattattttgtgtgtcgctgacacgtgggcccacggttttattatttttccgggatcaaattgccacataagcgccacatcaatgccacgtgagacgaatacctagtcaaaagagccacataggtgcaacgtcagccaaaatcaccttgggacttatgttgcaccggttttgaccattgagggacccgttgtatctggttttctggttgaaggatgaaataagtttagggaccttagatgaacttattcctttaaactatggcagaatatatttagggaaggcaacgggacgggtcgggggtgggtggaggtagaatgcccccggccctggcccagcattcttcgccccgcccccgacccagaccaagagttcggggcgaaatctacccccacccccgccccaggcgggtccccggaacccgaccgggcccccgcattggatgcacaacagcaaaggagaacgatgggggcagcacaacgaagcttgtgggcggaagacgttgatggtagtggggaagcagcgaagagggttggagctgtgcttgacctgcacgttgggggacgatctcaaccatcatgcatctgagggctaggaatcaacaaaagacgtcggtcttcaattcacgcgagcattctcttgtttgaggctaccctttcaggcttcaactcgggaggaataggagaggagaacgtgcgccgagggcacaacgacgtggtgcggcgccgggcgcaaggaaatgcgcggtgcggtgccggacgcgattgcgcgaggagcagtgttgggcggttgcgcaacaggtatgcggcggcaggagatggatggggattagggttgaggtggattgcattgcatctatacctgctcgtgtgggcttctttgggctgattttttaatgggctatcggattgctgctggacagattatacaagtttgtcttaggctggattttcctatggtctactggatgtccgggtccccatgggggcccgcgggtgaactagctgccccgcccccgtccctgcttgtttgcggagccccgccccccacggggtcatctttcgccctgtccctggccctgtaggggcgggtccccacagggaaattgccatccctaaatatatttaaaccatggccctgcgtttgggtttgcacgggccgaaagaagggagaccccaacagcaaaactcctgaaccacaaacgaaaggggaaagagaagagtgatcgcgtcatccacgtagcagcgaccaatcgcctattaggacatgtacaaccaaagccactctatggatgctctcactaactgaagccacttaataggacacacatctcccaaagtcatatacttacagctggggcttcaaaatctcaagcaactgatgaagataccctagcccacaatggggtgccccaacccacgtagccacatatatgatttccttccctacccctagcccaccgagcatccaccgtcttctcccttctcttctcttttccttcggcatttttttcaccgattttcttggccttatcccctcgccgcttctcctctccctcctcgcccagatgcgccgccgcctcccgctctctctcccctccgtcgctctcctctctctccctctctgactcgtcgctgctctatccctctctatcccggtggccgtcgccgtttctcctactctttcctgttgccggtcgctgtccacctcaccggcagctggatccactctcccacatcctttctctcccgccgcctctctctctctcttgccgccactcgtcgtcgccgcctctctctctcccgtcaccgctgacggagaacgacgcgcagggctcggtggccgacagtaggggtgaaaacggtacggaaacggatggaaacgacctttaacattttcgttttcatattttttccgaaatcggaatcggaaacaccggaaacgaaaatggaaacgaatagtatcgaaaccgaaaacggagcgaaaacgaaccggcgcggatacgataacgaaaatttatcggaatacaaaaacccctcaaacttttgtcaagtccaattctcaagtctcaacagtcaacaattcatcataaaacacaattatatcaagactaattgtttagtatcaacagcaaaatatattcttctataacttcatataatttgcataacaaatattctaaaagaatacagcaaaacacaatggtataaggtatacacaattcaggtgctatactgctatcagcctatctctccaggaaatgggtttgagaacaacaacagaacatcagtccatcaatacttagttcatcaatcatcacagaacagcaacttctactcttgccactgcacccacatttgtggtaggatctcctacatttgcaagggttggttgtgatgctggcaaagctacaatgcccgcattgcatacacttgcactgctgctacttgcatttgatgattccatcacaaatctgcagcataaaagaaatcaaatcaatggtttaggctcaagaccacagtctgtccttagctggacatagtagcatatattatttttcagctgcatttgtattattccccacaaacaaagcagtatttctataattggagtgcttggcaaatggcaatagagcatattaataacttctacaaaattaacagaacaaaataaaatccagaagcaagaaggcataaacatataaagaaaataaaacctacacagtattcaagctccctacacagaatgtaatataaccaagctccttagtacaaagaaaataaaagacatcaatcattcaacattcactcaaatatatagagcctacacagtaacactaacacagagtgacagaggtggaggttaaggaatgaggaataacacctgctggttgctcagttgctgccgctgggctgctggctactgcgaggcgaggagtcgtcggcgttggtggcggtgaggaagagtcgccagtggggcttgaggtgtcatcggtggtggtggctgtcgcgtcgtcgtcggtggtggtggcggcggtgaaacggcgagacgtggcgggacggcgtcgtgagataacggggaccgagcaggccggcggaggtgcgagatggtggcggcggccagcggcgaaacggcgaagagcgagggcggcgcgagatggtgggggcgaggataggacggcggaccaggtggcgagcggtggcgcgggcggtgggcgcgggggcgcgcgatgccgcgatctggatgcaccacagccgccgctccgccgccggctcgcgtttgcgtctgtctgtctctctcctctctagggttagccggttagagacttgagttagggtagatgccgcgatttgggttgcgctggaaagttggggatgaattatggactattgaatctatgggcctttttaacttcggaaattccgacaatttttccggaatgtttccgaccgtttccgagttccaacggaaactgctattatcatatttgattccgtttctgggaaaatatttctgttttcgattccgtttccgaaaaaatctgaccggccgattccatttctgaaaacatgaccggaatctggaaaaattccgtaccattttcactcctagcagatggcgagcggaagccaagcccgtcgccgactggtggccggcggcggccgcggcgcgaggaagccgtctccgcccgtcaccggctggtgaccgacggctaccgcggcgcgctgtggccggatctagtcgtcgtggatccttgtggccatcgcagatctgtcgacgtcgcctctctctctcatcgccatgccgctggtgaggggcaagaaggggaaacaccaggggaggaggtaggggacagggcactgggtcgccccaacgcgtagtctcgaggaagtgtctctggaaaagagaaaaagagagctgaggagccagaggcgtgcgttcccctcgtgggggtcgcgcctccctacagggacacgccgcgcggacgtagaggtggccaaacgggcggcacggcccggcccggcacgggcacggttccggcacggcccgtttcggcacggcccgttaggcacggctgatgaaacgggccgtgccgtgccggcccacgtgccgagccgccggcccaagcacggcccgtggatggccgggccgtgcccgtgccggcacggcacgcccgcggcccacgggccgttcggggcacggcggcccgtgtgcacagtttttttttttaaaaaaaaagcaaaggaaatgtgtaaggaaaaaaaaattaaaaatggaaataaaatgtttaaaaaaaagtaatgatttactaatgttaaaaaatgaaaaaatggtatttaaaaaatggaaataaaagttttttaaaaaagtaatgatatgctaatgttaaaaaaaagaaaaaatggtatttttttgttgtgttgaaaaatttaaaaatatagattgtgattcattattatgaaataatttaaaggtaaatccacacttgcgaaaatattgcaaaagaatttgttaaaaatagtaatgacctttattgatgtttatatcattacaggatacaatgatacatgctgcctcgttaaaaactttgtcatgtaaaaactcataggggaaaatgagaaaaccatgacaaagaaaagagtacagctcaaaggtcagaactacttctaacaaaattctactggggttggtctggatccaggtagagttgctcgaagtgggcggccaattcttggttgtccgcagtgtattgggcatgttgtcgagcaagctcccagtctttaacgcttagtagcatttcgacgtggtcgctgcgcagagtcgtcctccggtcttcgatgattcggccgcatagactgaaggccgattcggaggacaccgtcgacacgggcaccgtcaacacatcccgtgctagttttgaaagcacaggatatgttatcttgtggtcattccaccacccgaggacgttgaaatcttgtgcttcgtggtggatggcgtcgctgtccaaataaccggacaactcttcggccacaacatgcgaagaggcgtctccacttgtagccgacgaactgccaccaccttggattgaacttgaagacgatccaccccaaatcctaccccactgtatcttcttcttacctgtagtggggataggagggggtctccgctggcgaacttcctgaaactttacttcatatcttccaaaaacctcatataatttacgtctaacctcagtataaaaagaactataatctacacctatagtatctccaacaagtgataaaatagcagacaatccccttaatttacacctaggatctaaaacaaaagcaagagcatacaacataggtatatttttccaatatttcaaatatttttgtttcatgtgaaagacaggttcagttagaacgtcatcattttcgtattctttaaataaagtaacaatttcaagaaggttgtgcaaaattatattagcagttggataataaacatgtgacaaagttagagtacaatcataaaaagtttctagaaattggtaaaatttttggacaattgcccaaacatgctcgttcagtactgaagacccgtcactgtttcttgggccaccacgtgactgaacaaaatcagaaagtaaactactataaggtaaaacaacttttaacattaaatacgttgcattccaccgatgctctgcatcggtggcaaacttacgagcttccacaccggccgcattgcaaaacctcttccatgcagcaatccgcgggttagaagcagttaaccacgcgattgcttgacgaacagcatcgatgtggtcacctaccctcttcatgccagtcttaacaatcaaattaattatatgacatgcacaacgctgatggagtagaaaagattgagcatacacacaaaataaaggttgcaatatttcaatagctctagaattagcagatgcattatctagggtgacagcaaatattttatcagcaagattaaattcattaattacttccctaattctttcagctatgttttctcctgtatgtgagacatctattaacctaagccctaaaactctcttttgtaattgccaatcatcatcaacaaaatgaacaactacgctaagataatcctctctagctctactactccatatatctgaagtaacacaaacagagaaagtacatgtactaaacagttccttaagtgcagttgcttccttgtgataaacattctctaaatctctagttgatgtttgcctactcacagctttaaacctagggttatgagattgctgaatgtaatgttcaaaagcaggggactctccaaagttaaggggtaaatcttgcctggcgattaaccggacaagagattcccgagcaaccatgggatcgtactcccaactgcgtaccgtaccgtctgggtttagcataagttgctgctgccggagttgtattccttgcttcttggcacacgactccgcatggcgcttgaggtgacctgtaccaccagaagaacgagcagataaaatttgcctacatattctacaacgggctttcgatacctcccttccgtcggggcatgtttcctttatctcgtcgaagctttgccacacacaggaggttctcgatctcttcgagccggtgtgtgtcgaaacacttccgctcgcggttccggaaaatccttccgaagctgtcgcctcctgaaccggtacctcctcaacgacagccgtatgaaccggtacctcctccacagatggtggagttggagccgatccggaggtaccgtcaaaccccgacatgtagttggggtcgaaatcacccaaggtgaacgacggcgactggtatggaaagttcggatccattctgaaaatttaaaccgacataaacaaattttcgaatatttattgaattcacaaacacaatacaaataatacacaaatttgaatattacttacatctttccaaccgcgagctcttcaaacctctgcgatcaaactgttgaactacgaaactaattttgatttttgacaaaatttgagcaaattttgtcaaaatcaaaaaaaaatgcacacttgagaacaaagagagcacttaaaacacttgagagcacaagatgaggagtgtgggatgaggagaaatggctggggttcatgccctatttatagggcgaaatttgagattttttggaattttttcggaatttttatgaattttttagcctcccaacggttattttcaaatttcaacggtcaaatagccgttagtgccacgtgtcgccgtcccattggaccgccgcccgcctgccgcgcctgacgggccgccgccgtgccgtgccgggccgtgccgtgccggcccgctacagtagccgtgccgtgccgtgccggcccgcgtgctcggccagcggcccaagcacggcacggccaaacgggccgtgccggcacggcccgttactgtagcaggccgtgccgggccgtgcctgctacaggtccggccgtgccgcgcgcggcccgtttggcccggcccatttggccacctctacgcggacggtgtgagctggggaacgatccaggggcacgcattgaacagcccttaggaatgcttcctgtcacaagtttcagctgtaccggataattctgatggcacttagcatcaatacaggagctttggaagagtttccgctcagtaccgtacgtcatcattcttagtgttagtctacagataattagaatcaacagaaggaaatttactagtcacaactcacaagtcataaccatttgtcttagaggccaaaagactgggcaatggcagccaaactaagagtttacaatcactcatccaggagcatcagtgcatcactaccgagttcaggccagatctgaacactacatatcacagtctacagcaccaaaaattgcttattctatgagcagaaagggggtgaaacaaacaaagaaaaaaaaaacagggatgtaaatagtgtacacactacagactacattagccatcattgcattggcctcttcaaacggagctgctttcttctgggagtggcaagtatatgaagacagcgactaacaagatcaggaatgccacggtgatgtacttccagttcagcactgacggctgtatggtccggactgcctcagcagtgccctccccgccagagtcatcatcctctgaagacctcgtcttctcttcctcattgctagggtctacaggtttctcagcctgtacacaatttcagtaacgcaacaagagtttgaaaacctcagaagtcggatcaagatattatccatgttctaaaaggcatttagaaataatcaatcaactatgataatgtcttgcgctgacagctacgtctgagatctcaaacagatatgctgcttacaaacttgtgcgtctttattagaaagaagaaagcggaattacattgcaacagaaccaagagaaaactgtttcatacatctgtgtgttaatccaagaaatttcaatacagttgtacaattaattcatgtaaacataattatataactatagctcaattgttaaaagaagttttactacacaatattttaaaagtaatgagatagactgacttgagtacatacaaatgcgtacttactacgaatgagagattgactgacttgagtacatactacgaaagtgtagttactaccaatgggtacttgggcttttagttgctaacacaacccaagtcgtacctgagaggttgagcccaatctggccatcttacacaaagctcaacctaaccacaaacttaaattggcaggttcagcccaaacccaagctagacctaattacttcaccacagcaaatgttaacttactaatggcatgagtatcaaatagttgtggatgatgtcgaccaagcagcagcaatttataccttttttgtacagtatgaaaaagagaatcaactaaagataattttcaccttagtctgtgatgaagaaaaatcaggaactatttcctccgctaatttagtagaatgaagctcaacatctttgccagtaacatttttgctcaattgagtgtcatccttaacacttcctttgcacttctgagccaatatcttgtttttctttgtcaacaacgaaatctggagccatcagaaaagaaatcatcaaataaatatggaacagcaacagttcaacttactgcttaacatagattaattcagatttggtagaatatgagttcacactgtatttagtgtagcacgagtcatacgaaagttttccttcctaaaataatccaaaacacttaccattgcttgaattggaaaacaaaacacaccatgaaaatagtatcatgtcagcttttttccaccacaaagttttagattttctgtttacattcaaaaggtacatgcagatctttgaactttgatgcactaaagctaggtcacaatcccccactgtctaagtctcactcacatcatgtattgtcttgtttacctttgtcaacaagaataaccaaactttgcaaataatgaaaatggttcatcggtctaaacacaagcatggacttcgaacatagtcataaacagatatttggatttacttagaatactaaaaggtaaggttaacatctagtcttttttgtatcaactcatgtcttgctaaatttggaagcaagaccaatccacagtgtcattcaacacagtaaaattaaaaggtctaattgaagatttgtatctttttcttgaatcatgtgtttccaaactatgcacgagtagcatgtatatataaaaaagctaaagtattgacaacggcaacaaaagtgtattcggtcgcgtatagacctgttgatgaagtcgttctctttccaatgcaagttttgtgaccaaatcagtaattatttttgttctgattccaatatccttgacggtagacatcttaacatggttggcttcatgtaatgagttctctagactttctgctcgacccctcagaaacgatagctcctcactaagttctaagttagtgtctgttaacaatgtacacttagattcagcattctctgctctggtttcagcttttaaaacctttcccttcagatcatcaatcatatgttccatgtccgacattgtagatctcagcatactctgctgttcaacagtggcatcaagagatgcctttgcatgctctaattgggtatgtgactccttaagtttcctctccaaaaggctagtcttttctgaaccatgacttttaagagagtttagctccccattaagttctatgttagcttcagttagctgcatgcaccttaactcagcattttgtgctctactttctgctcttgagacatcttctttgagactcttaataatgttttctaatgtgcttatctcggcatgcagcacattctgctcctcctgaaaagtttctgctgatgcctttgccaactgcaactgtgaatcagattccctcaactgtttttctagctccttaaccttatcctgcaaggatggcaattcaggacttggatgagtttctgtgcctccactatgttgactcccttcttgaatattctctgcgttgacttgcagtgaagataatcccatcaagctttctcctaacttcgactccagatcacccttcctacatcttgatgcacttagatggcactctacggtactaactttgtccacaagttcctttgaagttcccaagagtacctcagaagcgttttctgctgcaaatgttttcccacataatgattcgatagattcctccaggaaatatttttcctgatcatgatgatggagctttagtttgagttcttctataatacatcttgattcagagagcttcttttcaagatccagctcacttgctatcgattgttctaacatctgcaaaacatttcttcgttgatcctctgtcctcatgctagtgtgggatgacacaataccattttcatacccagcgtctccagtaatgcctgtataattgtagttagaaaagagtgctaattgatgcatataaaacccagggtaactgagcattaccttctttgtcatggggaaactctatggctttctcaaacttggctgactcttttctgatatcagaaactaattccttcatctgctttaaagacaccatagcagcatctagcctagctttaatcttgcctccagattcatcttgacaaaccatatgctcaacattttgaatatcagtctcaagagtactgatcatgtcatctaactcccctacttctgcatctagaaaaccatataggatgtccaattcaaaagcactctcggcagtttcagaagaaacagattcgtcttccaatgtaggaggctcaaaatcagtagccttgcgagctatctccatcaccaacatctctagatttagtaatttctcagaggcaaatgcaagctcaagttccactctagtaataatttccatacttcctccttctacattcattccatctccattacccatgttttgttggaaatggtcatcatccatactgttctcaacatccataactccttttctgcctgctacacatttggttatacacaaaaagggagacatgtgagatacaagaaatgcacaaataggaatattaaagaccaaaataaataaaatgaaaaagaaacaataaaaaaaattatctatcataagtgacgtttgtagcttctggttcatctgatggaccaaaggttttaagagctaatagcattccaaaaacacctaagagtgtttatattaaaaaaaaatcagaaaatgtacacatcagaaaaccaatcatgttggagcctgattggacaagaacattatgggaaaatcaagcttatcaggcatcggtccaaaatgacataggtaggtagaaaaggcccagcttacatgttcccccgatatcgtcaaccaatttaacaagcattaacctcggtaaggactgggacgcaatactactatttgagagaaaaaatggagggacagaaagaaacacctccccgaatgaactaacaagaacagatcagaaggaaattcaacctcatgatccaacaccaaatagaatgacaattcgtcctatgtgctccattcagcacaggaaatgctgaaattgggcttctcctaactcgggtcagtaatcctgatggattccccctctcctccaagtcggatttgctgttcatggtcactatgaccgtacaaaagtgctctgctttcgtgcgcactacatcatacaaaaccaaaccaaagcgccgtatcagccgttatcccaattcccaccagcaccagctagtccccccacccacggggtgatccagattcggcggccctccgcgcgcgagcggttgacccgaatctctcgctgctcgcagctaaaagcaacaacctacctaccagtgaaccacacggactagactacagagcaggaggcatcctcacgccgcgcgcgagcaggaggcggcgagatgggagaggttgcctgcggcttgccgttacctgggctcgtcggaggcagcttgccgccgccgccgccgtcgccctcgcgatctccgccgggaagcgaggcgagatgatgaggtggccggattcggatgctgctccactcctctgcctcgcctcctctttgcctttctctctcctccctttccttttcagaaaattaaaaggaaatggaaaaaacgaaagaagtgggggagacgtgcgtgccaactaggcgcacgtgcggcccagaaacggacgacgtggaaacagcccacgggccggagagcccctttgccttcgtcctcctcagcccagaacagccgatagagagacgtccattgccgccgagaaaattgggtattcctaatgggcgggtgatcgccgagaatgctaatgctaataggcgggtgatcgctcctccgtccgcccagcgatcacccgcccgccccctcccctataccgtacacttatccctcctctccctccttcctcctccccttcttctcttcctattacagtacaccacataaaatttttttaaaaaaataaaaaattagaaaaatttatgtatagaaatacttatatataaaaattttgaattcaaattcaaatttaaatcgggtatataaacttttgacttataaactttgggtctataaactttaggtgtataaactttagatgtatagaaatactatatatatagaaaatatttgaattcaaatttgaatttgaattcaaattcaaatttgaatcgggtatgtaaacttttgacttataaactttgggtctataaactttaggtgtataaactttagatgtatagaaatactatatatagaaaatatttgaattcaaattcaaatttgaatcgggtatgtaaacttttgacttataaactttaggtctataaactttaggtgtataaactttagatgtatagaaatactatatataaaaaaatatttgaattcaaattcaaatttgaatcggatatataaacttttgacttataaacttttggtctctgaactttagatgtgtaaacttaaggtgtataaactttatgtgtataaatttactaaaataggaaagtaatgcggtgccaaaaaagaaaaccaggtggaggggtagagggagggaggggggaggggatcgatcgctaccccagtatccgggcaatcgatcgcccattaggatcccccgctttgtatgccatattgtattttgatctctctaaattactattttcaaatgatgtttagtttggtctatccatagaaaaacagacctataacctatacagttgggtggcacacgtctgataggatgtcaatggcatgctagttagacgatgtacttctccatatccctctcttgcagcacataacgacgatgggccaaacaaataaagtgaggccaccggagttttagggcctcatcttttcgtgtatgctgcttatcagctaaaatttgaattttcaatcttaaatttgaaactgattttgagatttttttttatcaaagtttacttttcagcctttgattttagatcgctaagaatacgtatataaaatttatattcagcatttgcaaataagccatttcgtttattccgcaaagagatgccaaagtgcattatcttttaaagtgataatttaatgaagccaaaataacccgtcgttgaagattgcatagcaattttctcatggccgccgcggccgtggtggattggttgactggagggagctgttcgtctttgacgccttgacgggttcccgcgggtaaggagaagtaggggccaagaaaccctaggtttccagttgattggagggtttgactgctttgcagcgagtacaaaaactgggctcgacggcggccatgtcgcagcactctttccgcctccaaaccactggagcagccgcagcaagcaacctcttcttcttgttctttcgccgcctcacaaatcacaatccccccggtatgcaaatgcaattcctccttgttcaaatgttgaggatgcgatacttcatttttgtttaaatttttttagggttgaggggattatgtcaagtactgtagtaacattttggtttgcgttttttttccatgtgcttcatcagggtgtaaatgaactaaggggaaggaagggttctagactggagattgcattctggtcatataccaaggtactagatttttgctttgattgtgataaatctacaggaacgaattagattgtagataagaatcacagttttcaatagcctctgtttgcctgcaaattatcatttaaatatcaaatctcgttgtagcaaacttggaataatcccataccttcaattgtttttgaaaaaccaacctctttgcatgtatttcatcagaaaatgtttaaactcaggtctgagttattatttcagaaattttagtgaattagatatgaaaagtgaaatagggacgagatggctaatattgaagtagatatggactatccatataaacgaatagatatttcaaaattgaaattcgaatataatcttgccattaaaactagactaccaaatgtgctggggatggggatctgaaggtttacagcagtgtggccaacttccaaaaacaaaagctttaaaatttaaaaagcatgacaacctgaaacatttcctgaaaggcatgtcttttctgtgatagttgtgatttagtgagaactttcaacaaatttgctctgtacatattattgaatcaaaataatctactcatagatggtattgtctgttaccctccttgctttgttggattttgctactttgcatcaactatagctttccatatacttcacaagataactatttatctgatctgtttcatgcgactttctttgtcttgcattatgcaaataattctaacttttttgccacaatattctgttattctgttgtttactctcagtaaccactttattttctatcacaaatcaaagctgttcacaagtacagtttatttgggggttttgcatactgcattttaaatcaatctaccattggaccatacactggattcgtttgtagtttgtttcaggttttttgtacattacaaaaaatgtttatttctgtatttaacacccttttgttggttcattaggaaaagagaaaatgtcatctagttatgatgaagggaaaagttttgctcggagggaccttttgcttaagatccaatctgaagtgcaaaaatgttgggaagagaacaaggttttcgaagcaaaggctggtgatacacctccaagccctggtgaaaaattctttgggaatttcacatacccatacatgaatggcatgctacatttaggccatgccttcacactatcgaagcttgagtttgctgcagcataccacagactccatggctcaaatgtccttttaccctttgctttccactgtactggaatgccaatcaagccatcagctgataagcttggtaaagagatacaacagtatggaaatcctccagtgctcccacctgccaacaaaaactcaaaatttgagttgacaaatgatagaatttatggccagaccactgctagtgcccaagataagtacaggagcaagagatctaagtcagtagcaaaatctggctcatacaaatcccagtgggagatcatgaggagctttggcattgctgatggagagattgtggaatttcaaaatcttcatcattggttaagctactttcctccgctggccatggaagatctcgaggattttgggctaagttgtgattggaggcgttcatttataaccactgatatgaatccattttatgatgcttttgtccaatggcagatgagaaagttgaagaaaatgcacaggattgtcaaaggcaagcagtacatgatctactccccattagatcgccaaccttgtcttggccatgatcgggcatcaggtgaagaggtcgagccacaggaatatgtactgattaagatgaaggttattccgccatttccacccaagttgatggtcctggaaggcagaaatgtgtatttggccgcagcaacactcagacctgagacaatatatggtcaaaccgggggcgaagctacaggtaatcatcggggtcagtagaccccaacgatgttttgctaatgtccagtacccctcttattttaccagctatgcccccaatgaagagctaaactagaccccagtgacatccttgattgttccatcaaagagcaattctatactagtggtacctcatggtacctcctcaagaaccgtaaaattgctctccatcaaagctcaactggttactataggaacgagatactagcaagcagcaaatagaaaatgaactagcagttatgattatacaatggcccaatatgcatatacgattgatatttgagcccataaataagatcggaagacactactccacaaattccctggttgcatcatcatattcctcgttgtattgcatcggcatcgcacgtcctgacatcatatttatcatattttattttatttccagcataatggaaggcaaataattagtggttttgataatctttgatgcatttggtgtcttttacagcttgtaaaataatccaataatgtacatgttttaataattttatcgacagaagctgtaataggcaagatgtaacactactacaacaggagttggctttattttaataattttgtctcgtagtatgtagtctctaattacaagctgtaataattatgtagttttatttccgatttactgttggattccaaccagccgtatggcatttttcgcaaaaatttgattaatcttgatcaaattttggtctacttttttttattcaaaaaataattctcgaagaccattcaaaatttcactcggaatctacttttgccctgcgtggaaacatcaaaattgcatggttttcgatcggttttggttgaaaacgtaaatcctgattagtacgaatactgaccgcggtaactatttatcctggcttcgcccctgggtcaaacaaactgttgggtcctccttgatggaaagtatgggccttttgagataaatgaaaccgatgtttttatattgacagcaagagctgcacgtaatcttgcttaccagatgctatccagagttccagaaaagccaacttgcttagttgagctgcttggcacagatctgattggtttgccattgaagtcacctcttgcctccaacgaagtcatatatgttcttccaatgcagaacatattagtagataaaggcactggaattgtgactagtgttccaagtgatacaccggatgatttcatcgcattacaagagttggtaaaaaatcaagattttagagtggcatgtggagtgaaagatgagtgggttttcccctttgaagttataccaataattgatgttccaagttttggaaataaatcagcagagaaggtttgttttgatctgaaaatggatagtccagatgagaaagaaaaacttgctaaagcaaaagagatcacatatttgaaaggcttcgatgatggcataatgattgttggtgagtttagcaaccgaaaggttcaagaagtgaagccattgataaaggaaaagctattgaaggcagatatggctgttttgtactatgagcctcaggagaaggtcatttccaggtcaggtgatgactgtgttgttgctctcacagatcaatggctcataacatatggtgaggctgaatggaaacaaaaggctatagaatgcttggacaagatgaatacattctcagttgaagcccgtaatagttttgagcacacattgaactggctgacttcacgggcccgttcatgttcttttggactaggtactcggattccatgggatgagaagtttcttgtagattctctttctgattcaactttgtacatggcctactacaccattgcacatatactgcaaaatggtaacatttatggatctgacaactcttatataaggccagaacaaatgactgatgaagtatgggattatgtgttctgtaatggtccggcaccaaaaactagcatcccctctactgttttgacaaaaatgaagcaagagtttgagtactggtatcccttcgatcttcgaatttcaggtaaggaccttatgcagaaccatctggccttctgtatcttcaatcacacaacacttcttccaaaacatcattggccccgcggattccgttgcaacagacaccttctgcttaattctgagaagatgtctaagtccacaggaaatttcaggacccttcgacaggccatagaggaattttcgtctgatgccactaggtttgcacttgctgatgttggtgacggtatggatgatgaaaactttgtctctgagactgcaaattctgctgcactaagactgacaaaagaaatttcatggatgaaagaagtttttgatgataaatcttcctttcgacttgggccaccatctacttatgctgatcgcgtctttgctaacgagataaactttgccatcaaagacacggaaataattatgatgcttccatgttttgagatgctctaaaagccggattttatgatctacaggcagcacgagatgagtacagattttcatgtggagcaggaggtataaaccgtgaattattgtggcgttttatggatgtccagaccaggcttatcactcctatttgtccacactatgctgagcatgtgtggcaaaagatactgaagaatgaaagatttgtagtgagagctggctggccgattgctgatgatccagattctactttacgaattacaaacaagtacttgcagtcctgcatagttttgatgaggaaatcgcttcataagcaggaatcttgtcacaaagtggccaagaagggagctgcagcctctacaacatttgcggaaaataaattatcagttggtctaatatatgtgaatgaacactatgatggctggaaagagcaatgtttgagagtactccaggacaaatttgacactgaagcaagatccttcactcctgatgaagacattattgatgctctggtgaattgctcttttggacaggagctaaacttgaaacaaataaaaaagttaagtgtatgcctttcattaagttcaagaaagatgaagcacagaatgttggttttcaggccctgtaaccaaatcttccttttggtgaaatggagattcttgaagcgaacaaggaacagatcaaaagacagttgggtcttaatcacatagagatattgtcatcctcagatcctctgatgaggctggtgcaaacagagctggttcatatgcttccgtgctcaggaaaaatccaccttctcctggaaaccctattgcaatattcttaagtaaactggagttccagagtcaaacttgaaaatcactcacttggtttcggtaataacagaacactcaggttgctcctaacttgtcttatgcagataccactcatgctgcctttcaaacaaatagtttgttgtgtataaaatttgtcttacagtttagaaagcacaaactgtatatgaacctcgtatagaaataaatcattgtctgaacattgtacagaaatgaaccttgtaaataagtgtcattctatctgaaatttgtaaaggaatgaacctttgttatgtagactttgtttttagttgtatgtagtatgtactgctaatcattgcttcttcagtgccttgtgttcatcgtcccactgttgtttagttattagcagtagaagttccttaatttgagagaatccattatatgccactgattttgtcacacgtctacaatttaccatcgactttatcatgttctataatataccatcgacttttgcttaaattctacgatttaccatcaccatccggttagcctccgttgtactgtacaattttgtccaaataaccgaaatacccctaggacaaaaactttcaaaatttggataacaaattcaaaatatcatattataaatataagattgtaaacatccaaaatttggccaaaaacataaaatcttatattttagaatttttatccaaattttgaaagcttttgccccaagggtattttggtcattttgacaaatttgtacactaacggagactaaccggacagcgatggtaaattgtagaagttaagcaaaagtcaatggcatattatagaacgtgataaagtcagtgacaaatcgtggacgtgtcacaaagtcagtggcatgtaatggattctctcttaattttaacagatactacatgctgtctatctcgttgtggacttgtggtagagttcgctaaagaagtacggagtactaaattgaacaaattattggtctgcattagtattctatatttttgtatcgtactattgtagtagctcaaagtgatagccggacacagtggaatgctgccggtgatctcaaataaaacattagagatttttatagactacaaccgcttaggaatgtttttttttctttttctttttcttttttttaaaaaagagcatgcatgttaaaatatgtctcacagacaaaagaatgaaaaaaaaatggtcatatgtatctctactattataaaaattgaagatgttttgccggtattttggtacgtcattcgtgtatgaatcggtttttaaattcgttcgcttttggaaatacatattcgtatttgagtcgggttttaagttcatttgcttttagaaatacagaaggagtaggataagaaatctctttttttttaaaaaaaaatatcgcatgctaactttagatgatcggtctcctaattgcagctcatgattttgtagaaaaatatatccaaatgaattctcatagtaaatttcaccttaactaaactttataacaataataagattaaaatagcttcctttgcaatgcacaggtattttttctagtattaaaaggagagaaaaattaacgtgcttttttataacctatgtctttatcttaaacttcagttaacactacacctagtttgaacttatttgcaacacatggattttgcagcacttttatataaattaaattgattcatgaatgaatgctttatatatagttcttgcattctaaagaatgcctttggtatgatctgaaaccattcaagcgaattgcgccctcaaatttccttgaatttatttctgaaacaagtagttgtaaattgttttgataaaaatatatatattgagaagtaataggcaatagcacttgatttcccaagaggtgagttcaccatcaaatggtagaggcaaccaaactcaaccatatgcaagtacccaaacacattctcagcgcatctggcatcccgtccatctcttatacaaccaaccaaacactatcttacactatccagcctcatatgatacagacaaccaaacactttattttgcactcactcatccaggctcatgtcagcctggatggttcatacgggtcagggccaggttggagtggtgcaaacaaccaagcacacccttatttactggatgacatatactgcatagaaatattattctttgttggctaattactctcacacgtgggccggttgttgaaggacaaacttaggacaagtatgcgtataaaaaagagtaaattacacgaaaccactaaaattatagtgcaagttacataaaaatatacaaactagatgaaaccccgcgcattgctgcgagaatttaatatgataacaataaaaaaaatagcgtgtaagatagctagataacattaagattaagtaaattaatgtgatttataataatttaaatttaaatagtatgtagaatggtgattcaaacgtaaaaagtaaggtggtatgactttatggaagaagaaaaatagggggatagtttggaccgtagattaatcatctaaaggctaaaacaattgatgtgatatgacttaattagagaaaaaaagaagaaagataatttggaccatagattaatcatttaagcactaagtgaggatgaactatataagtatataggatatcataaaacataacaaagatatacattgaaacattatgtgaattatgttggatgataatttaacatatttgtatttgaaaagctcttaaattataaaaactataaagatatagcatgtttgcatgatgtttaaatgtgatgattgttagtggataatgatgtgacatcttgttaattagtggataatgatatgacatcttgttagtggatgatgatgtggcatctttgcaggttaagcttaacgagttagtgggggataactttatattaagataggatttggtaagtagcatataatccaatatattatggtaaaatttactttgagacacatttgattaccgatattttactttggattactgtttaaccaatgatttcactttggattaccatactctcttctgaagcatatgaacgatagtttgtcgactcttactaatcaatgaacttccacatctatatgtacgaccatttctgatttctgtgacatatgataaattgaacgtagatggataaaatacttgaggatggtccaaaatgccacaaaggtaaaagcgcctggttcaaaagtgaaaatattggttaaagggtaattcaaagcgaaacatcgataataaaaaggtgatccaaagtaaaatctactcttcacaaaatcatataaattgacaacttctacttaaacctgacatgtgggatgatagttttatatgatttgacatgtcgtagatgaaaactcttacatgctgcaataagtatgatagatgaaaaaactggtaaactccacatgtcaaatttgggttaaattgttttgtgaaacaatacacagaattatgtgttgcatgctaaaactcgtatggttttataaattttggacctaatatttttcactttcattgtataaaagtttcgtggcaagggtcttcactagtttttcatagccataattttataagaaatatatagtgtaaaccataaaagtttactcatcctaacgtgcataaatctcatacgtctattttggatttttcaagtttcaatatggaatatgatttgcactattcttttcgcaatttaatcattcacccaaatcgtttggttcg

SEQ ID NO: 10274 - DNA, 7608 bp, Oryza sativa
gcggaccagccgcagcgctcacccgctgctcgcccattgccgctggcctcactcactgaagaagagagagaagagataaaagagaagagaaggagaagaaaagaaaagaaaaagattatgtaactgatatgtgggccctaagtacttttttaattttttttttctgactagtatgccaccactactgcacaagttatctttacctccggttcgtaactgcctgttctcccggttatacaaccgggagtccaaatccgggactaaagatatatctttagtcccggataaaataaccgggataaaagttgatctttagtcccggttgataacaccaatcgagactaaaggggaggaaagcggcagcctggttgccatttttttattgtttctttgctagatgcgtttttcattctattttcccccaaatcggatgggatcgatgcatatccccccataatcaaatcccaaatccccaaatcaaaatataacatctcaaatcatatatacattcacatcacagatccaaaaaaaataccacaaataaaatacatcttagatacatacaacaaatcacaaattctaaaaaaaattacacatctcaatggaatcacaaattgcaaaaaaaaaaacaaaaaaaacgaatcgaccaccagccaccagctcgccgccgggcgggcccgcctactaccgctggttgcggccccgccggcccctgccgccgccgccgccctccgcagccaatgccgctcggccacaccggtgcccgccgccagccgccaccgctcgacccgccgccgctgccgccgcttgggcacgccggcgcccgccgccgccgctcgatttgcatgcaacgagagaaggcaggaagggagaggatgaggctagaaggaaggagaggataaggcaaagaaaagaataagagagtaaaaatagaagaggagtttgagaggataagtcataggggttatatacggtacattgaaatttagtcccggtttgtgttaccaaccgggactaaaggtcccggggatatttagtcccggttggtaatataaaccgggactaaatataagatctttagtcccggttggagtctccaaccgggaataaagatccggggggggggggctgacagcacctgacaacacatgaaccgggactaaagatgatgtttagtcccggttggtgttaccatccgggactaaaaaacatatagtcccattctgcttataaaccgggactaaaaaccatctttagtcccggtttttattggaaccgggactattgtgatttttggctgaccaggcaaagatggtttctccagtagtgcacgtcagcgaaaccacccacatatactaccatgggatcttttttgaatgttttgtgtgaggttaggggtatacattttttgttttgtggttaagggacctcaaaaaatctcgttgttaagttgagggacctccggtgaacttattccattctatgctgggagatgcgaatcacattgggcccaatatgatgcattcagcactaaaacatttttatttagggcaaaacgtacttgctttaattggtagtgttatcatctctgctgtcggatgatgaagcaccaggtcgagcaatcaatcatcattgcgtcaggatcttgagttcttgtcgattttgggtgcacgctctagctcctgattaagtcaatcttgtggactgattttagattaattttaggggttctctttgtcagtttctgtgctaagctctccttttatgattgcttggaagataaataaaacaggatgactaaaccaaacttttaaattttggattgttttgggatatagtactaaaaaagaacgcctaccacttgagtgataattgaactgagtaattaaaagcacgtgagctgtgtgctacaccctggtatacttggcctcaaaaaatccacatttcacatttcagcagtccaaaatggaaagccaggaaagggacagaaaacagcggtaaaaatggcggccgccacttggctgccctcgctagcggcgagaacgctccgctcttctggcttttatacccagccctttctaatgaactagacgacgaacttcgttcggtgaaaagtcagtacaacatatgcaactagttatccgaagatgcaagaagccatgaactatatatggacggccgggatggtccagaatgtgcgtggtcagagcttgtgtttaaccatgaatggctgagaaagttactccctccatctcattttaaacgcagccataagtttccgtgtattgcatgtcttatttaaaatttttataagattggtatttttattgttattaaatgataaaacatgaatagtattttatgtatgacttttgttttttaattaatttttaaaaagttttcagatcagataaatgattaaagttggacacgaaaattcatggttgcgtttaaaatgggacggagggagtatgtctactgatgaaccgaatttacttttttttaagcaccacaccatttttattctttttaactttatacacctaaattttatacaaccaaaatttatacactaaaattttatatgcctcatttgatttcggattcaaatatagagtacttatattaaaaagtttatatacatgtataaggtctataatacgttcacatggaaagaaatatatacacggacatttttttagtaaagtggataatttttatttagtttgtatttcttttcctattttagaactttttgtgaaatcaatacgtgagaaatgcgcgggttgtttcagcaagggggaggggcgtgccgtgaccccacacgtggttggtcacccattagatgtacctaggaatggttgaggtattgacgtctactatcatcgaaattctgattaatttcaccattaatttattttatcaaaataagtttatcagataaggcaaaacatttttaggaccaatgtatgcatacattattttgttttcaaacgaagaattttaaattttattgatggtcaaagatgcgaaagtttgactaaaaaaataaatgatatactatatttgtagcccgaggagttataaatttggttgaaacccgaaagctgtggggtttccaatatatcataaatataacaaaggcgtagctagcgaaaacactatgattttaattaatctacaggaattttttgctatattgtactcttagggagtgtttgaggagaaggggattgaggagattgggaagatacgcaaaacgaggtgagccattagctcatgattaattgagtattaactattttaaattttaaaaatggattaatatgattttttaaagcaacttttatatagaaattttttgcaaaaaacgcaccgtttagtagtttgaaaagcgtgcgcgcgaaaaacgagagccaatctcccctatcacccctaaacgaacgatgccttagcccttcctaaccagctagatgggttacacgcgagattcaacacaaaaaaattcacacatgagactcaaattgattcgagtctatatctgatatctctatctctacttgaattcgtttggttttatttttcatactacgtaccaaattagttgttgactatctagctaagttgaaaatccaatcaaataggagtatatcacttctcgatctaatagatgatggttttggttgacatgcagtacgtgtgttaagtgttaactggtaagctcatgttgtagcaagtgcacgaggctcgcagaatttccaatacaaagacaaaaacacattatgatacatatgctccctgtttttttggtcaaagaatatgttgcatatggtagcatatctccacaagggttgcaaggtggtaagccggccatccgcattacctcaatatatcagatttatccggttaaagcaccgtagtatttactagcagtcattttcttttgtacatatatatcgtgcttaagtgaaatgcttgcaaagagaatatacaaaggactacctagcaaatattcgacagtaaatagcactgatttttttaataaaataatacaatcataatataattacattgcaactagcatgttttattataaattaaaaatgaatccagcatacagtactacaaacgtgatgggtaacatatgcatgcttccgatcgatcgagagcgtcgaaagaacatggttcgttagagtgaactcgctagtttttagagccgaacattttaaaattcgagcaagctgcaaacatagagctacagagattacatgagatcttacaatctttcaccccgagagacgaaccagacaaacgaagaaatgagaaaggctcaacgttaagtttaacaactaaacagatatatgatgctaattaagctacctcccggagctgtctctccactatgggatgctatctggaaatgcagagccccactgaaagtgaagttgtttgcgtggctcctggtcgaagacagtctgtccacaaagaaaaatttacagaagaagaacattgttcccactggcacctgtgacatctataacgaaggaaccgaaacgaccagccacttttgttttctatgcccgtttgcaaaaagtttccgggacaaaattggagtgcaaccgatgattcaagatgtgcatctgtttcattagctgaagctagtacatggagtgcctatacttcattttcagattttctacctcctatgtttctgggcaatgtggaatcacagatatgatgttgtttttagaggtcaagccccctcgattgcttcctggctgcaacgttgcatgcgtgaggctgctctgtggacagaaaacataaagactgaagatcgacatgtaatttctgtttggaaagaaatcttatcttccccctacaaactctcaattcaatataatgaaccttgcatccttatattcaatgaaatgataaattcgggtggggaagctctccccccgtgatttagtaaaacaagaaagaatcgagcgcaattcgccgtgtccgtaaaagaattaatcatcaaagatttaatcaatcttacaatagctagtctttataaaaaaatcaaagaataaacagacaccgtggcctgtggggtggataattgatggatcgacgccgcgccatcggcagggtctcatctcacgagtcatgccgtctggccgccggcggcgcccctccgcagcgcgcactcgacgactcgccggaaatgcccggcgtcgcagggcacacgcagcacgcccggctggccgaacccgtactgctgcgccgccatgtccagcagctccgcgatgctcgggtccccgagcagcctcaccggcaccatcacgcgctccccgccgccgtcgccgcagtcgccgccgccgccggcgaccatcgggacatgccctctcgggacctcatcctcgccgttctcgcggcacggcgaggcgccgccgctgccgccgccgctcttcctcctccacaccatgatgatatgtgatagatagtatatatgtcaggtttagcaccctggatcggagctggaggacggtgcgggggtgcagtcgtttgattcgccggcgtgcgctgcggaggagacgagagcgagtaggtgggaaatttatagaggagcaagctagcaagcagcgcaggatcaaggaagctagggttcatgaccatgcatgacgatgactgacgtctgaagattgacgaaacgaacttgtgtgtagacgatcaagccgcgattccttgacatggatggtcttccatggcgactggagagatggagactagcgtggagcaccggaacccgcgcgccgcccaccgcgcgcgcgggaagcatcggggacgttcgatctgcgcgcgctggacggacggacgtactgttcgctccataactagctcaacacgtactattgattgaccgattctgctaggaatatgctttattaatacggatttctcttttttaaaccaaagacaaatggagacgctcgcaacatatgcacactcactcatataaacatacatggtcgacagaacaaatgcaaccggtggacaggtctgagtgcaagcactccaaacgtaggttatggatggatgggagtagaacgtcgaagaatcatgtcactcaatccagctgcttcatgaggcctcttgtatagaaaatagactaaaatttcaacatcggaaaaagaattggttaagttgcataaaccaccccacctatcactctagttttgagattacaccacataaattattttgtcataaaaacccaccaatccaagactgtttacgaccagattgtgtcctctatgtgcacagaagtagttgattcggtccatttcttccaatataggatcgctgccgatcactgcctctgatcgcttcccacttcgaactagcatttgaggtcaggtgggtacagccagctctttgtgatgttcttaatctcgttcttgatgtggaattgtgaaactgtgtagctgcatgttcttgtttttagaaaactatgtcatcttgatgtggattatatgtgtaaacttcattcttgtgacttgttggatgtcaaggatatattcttgatatgtggttgatgagtcacgttggacttgatttttttatgaacatgttcatgatctgtgttgattaggggatctccagatatttgaggtcaggtgaccgctcgttgaatcggctcgatgaatcaatggattcatcctgtcgactaatttatttgtctcatggaaaccatcagtgtcgaaaagcttaatgttggttcaatttccagcactaataaggggttacgaattggcatagaaattgtgctctgttacaaatccagcactcataaccatgctggatgagtgatatggtccactgtaaatccacatcaaaacaaatgaacagaattagcaccggtggagaactggtttttactcccggtttgtaacccctatataatcccggttttccaaccgggactacgaatccgggactaaagatcgctatctttagtcccgggtgaaatatccgggagtaaaaatccatttttagtcccggtaaaacatttttagtcacggttaatgttaccaaccgggactaaagaggctagattcggttgcttctttattcttttcttttcttcattgtttttaatatattgatttcaccccatcccgtccctaaaatcccaaatcaatcattctcaaattgcctccaaatccacaaatcgatcatctcaaatacatcacaaaatcttaaaaaaaaattacatcacaacttctacaaaattcatcacatattcacatcacacacaaatcaaatacatcacacaccaatcccagatccgaatcacaagtttcccaaaaaaaacaagaaagaaagaaaccgccggcgcaggccgccaccaaccgccgccatgccggtcggccggcccaccgcgccccaccaccgctcggccgccagttgccgccgcgccggctggccggcccttcgcgccccgccgatgcagtagaaaggagaagaagaggaatagataaggttgaggagaggagtagatacctcgatccgatcgcgcacgcctctccgatctccgtgtcgatctttttttccggttgg

SEQ ID NO: 10275 - DNA, 17796 bp, Oryza sativa
aggtatttaaaactatctaaaattcggaataaatataataaaattaaaagtagagtttagagtccgtataaaaatataatttctaaataactaaaattcaaaattaagaaaaacatgggaagaagagtttaaagtcaatataggaatacaatttagaagtaactgaaatttaaaattaaaatttaaagaatattgaaatatgagtttatatagaaatacaatttacaaatagctgaaattcggaattaaaaaataagaaatattagaagaggagactagagtccatatagaaatacaattaggaaatagttgaaattcggaattaaaaaataaggaatattagaagaggagactagagtccatatagaaatacaattaggaaataactgaaattggaattaaaaataaggaatattagaagtagagtataaagcaaatacaattaggaaataatagaaattcggaattaaaaataaggaatattagaagtagagtatagagtccatatagaaatacaattaagaaaaaaatagaaatttagaattaaaaaataaggaatattagaagtagagtattgagtccatataggaatttaaaactaactaaaattcggaataaacataataaaatgaaaataatgtttagtgtccatataaaaatataatttacaaataactaaaatttgaaattaagaaaaacatgggaagaagagtttaaagtcaatatagaaatacaatttagaagtaactgaaatttgaaattaaaaattaaagaatattgaaagatgagtttagagtccacatagaaatacaattagaaataataaaaattcagaattaaaaaaaaagaaatattaaaatacgagtctagagtccatataggaatatatataatttacaaataactaaaatttgatattaaaaataattaataactaacacgtatataaaatacaatattaatattacacattagtagtttcgtagagttattacaaaatttaaaattatgttgtcattgtaatatattttaataatataatgagaaaacatatatgctattatataagagaaaacataatgatgctagccgcgcaatctgcgcgggccaccatgctagttaaccgaacaagacctaagacctaaggtgggggttgtggaagtggggatagactatgcccttttacggagaaacgcgaggcttgaagttgctgcggaataagcacaatccaatccgagttacggtataggcgtggacgacagaatggcgggatggttgggtcggttgggttgagttgagctgggaaggggtgtgtgatagttattttagattcacatcgatcaaatttgatacaagcgacttacaaccagctaaaaatcaaatcaaacacagactacgcaccaaaattttgataaaaatatctcaaatttttataatagtagagaagagataaacactctaagattgtgttctgcacggaaatgtggtggcttattaatgtatgattaattaagtattagcaaacacaacttaaaaaaaataaaataatacgattctgaaatcaactttcagatagaatttttttttaaaaaaaacatgcacgcgaaaaacaagaaatatgagttgggaatggaaagggaagagtacgggtggggatgctttggagttcactccaactccatccgaaggatttgatgaaatctctgtcatctctatataagaatggttgggatgaagtaactaattcctaatagttttttttctgcatcttaatatttgtaacaaatctaacgaatactatatatatatctagagaatatacaaactgattttacttgcataacctagaaatttcatggttcatccacagtataaaaatcgtattgggctttgtggctataatattttagcaacatttttgtgtgtatatggtttatgtatgtttgcacgtactaaatgtttaacatagttttttatacatgaccatagcttcttatttggagaagagagcgtgcatactttgttaatgttgttggcagaaacatactcactaggaacataaaaaggaagaaaaggtaagtaattttcattcaagcatatgtgattgagggagttaattaggacaagttaataagtggcttcatcttagccataggaaataattgatggtatggatttagtcaaatccacctggtggagttgtagctaactctagggggatctggacccggaagagcaacaccctaatactcgtaataaaatagcaatgtacgttgctaatgccaattcgagggtgcgatttgttttgggaatacgaaattgagccctataaattgtccaccctataggccgcagattcctcaatccttactgcaagcggcaaagccctcctcttcagctcttctgacggaaaagaccacagcgatggccaattacacatggataatacaatttaagtagtgcacgttggcaatgccaaatcaagagatgcaattgcactccacccaaccctacaaatatccacccgcagcttagctcgatccttgcccacttcaaagttcaaacaacaaagccgtcctcttctgaccaaaaagaccaaagccatggcgccttccctcgccacctcttccaccctcgctctcttcctcctcgtcgccgtctccatcgccgacgccgcgacattcgccatcaccaacaggtgccagtacacggtgtggccggcggcggtgccatcgggcggcggcacgaagctcgacccggggcagacgtggaccatcaacgtgccggccgggacgacgggcgggcgcgtgtgggcgcgcacgggctgcggtttcgacggcagcggcaacgggcagtgccagacgggcgactgcggcgggaagctgcggtgcacggcgtacggcgcggcgcccaacaccctggccgagttcgcgctgaaccagtggaacaacctcgacttcttcgacatctccctcatcgacggcttcaacgtgcccatggccttcctccccgccggcagcggcgccgggtgccccaaaggcgggccgcggtgcgccacggccatcacgccgcagtgccccagcgagctgagggcgcccggcgggtgcaacaacgcgtgcacggtgttcaggcaggacaggtactgctgcaccggatcggcggccaacagctgcggcccgaccaactactcggagttcttcaagcggctgtgcccggacgcctacagctaccccaaggacgacgcctccagcacctacacttgcccggccggcaccaactaccaggtcgtcttctgcccatgatcgaacgcgcgcgcgcgcgcgcggctgatcgatcgatctctgatgatcttgggatttgtatgatcgatgcatgtgtggatgtaaccgtgatatacgtacctaagaataagtttgcacgcgcaaacgaggataagtttatgttatcgatctttgaataagtaaaaacaactgggtttatgaattgatatatatgaacgatgactttcagtaagataaacacggttaattacgtgttcgatcagccatatgttattatgcgtgtaactatggaaactattctaactataaaaattaagaagatgtattaatatgtgatatatcaatcaataaatatgtaagtgtaaattcaacttctacaaatatcaaccaaaaaacaaattaaactatatctagacatctagttaatgtatattcacagttaaatttgttttttcattgtgacatgtagatgttaaattttaacttgcatatttttgagtaatatattacatgccaatatatttttttaaaaatctttcatgactatttaagtgacatgtaaataatgagaggatgtttcctcgagagtttaaaatacactatagtatatataactatgcttcggagttcaattctatgatttctccaacatttccaaattccagtcgaggacgtgtacggttgtaaattaattgagttatactagcatggcgcgcgattaatacatttggacgaacacgcccaacaaataaccatgaccactctatcacggcgcattaacaagaaattaactgtgaacagtagtcaggtcgaatccttaaaccttagcggtttggacaccacatgctataaccttagtgcttaagaacttttaagaataccatagctctgttaatagacctgatccagcactggatttatcctaaatccaatatccaggccaaaagcggtcagcttgagtggacccacccaatacttgcaacagcactcaatcgactacgcatgcatggaaagtcaaggattttgtaattagattccacgtgccaaatcggaatggaattaactaacccaagcagatatataccctatccatctcaaaataactcaaccgagaatgagatatgattcatcttaaaacaaagaatctgaacatcacatctcattttaaattaagttattttagaacggagggagtaaactacattattaaattgtgcgggagaaagtcatcatactttcatacattcaagcggtcaagagcctccactatcattatctagagtagtggaccgagcaagcatagatcctctagcaaattaatctgtcaaagaacttattattatatcacgaagaaaagacttccattctgcaaaaaaaaaaaaaattctagagacgtgcaacaactgagttagctggcacgtagtaccgatgaaacagcagagtggagaccgcacaaaacagaaaagagatgctcgcgtacgtacgcacgatgcacgcagaagctacccgtgcacgcgacctcctcctccttgttcctcgttccctcctgcccgggaaatgcatggccagcagcagcggcagatcgggtcatcgaggcctgcgttgcagccgatcttgaacggatgacggaaatcttaaatgaaattccattcaacgcgaataatgggcgcacgggagcacgcaaccgtccggctcgaccgattttggaattctaaattcttccttggttggttctggtcctcgccatccaagtctgaagaattcctcaccacgcagagtcgcagctcgcaggttcgaactggtatgtagagagagcactttgccttctgtttcgtttcgctccacctataaaaggaataagttcatctgagatctcttaacttgtcaacgaatccgattttcgtctctcaaccgaaaaaccaaacacaacggatttctcaactatcaaaactagtgcagatgaggtccctcggtgattttgagggcggttttggctgacatggcgcctacgtggctaatttgacctgatattcatctggcatggcactgacatggtgcctaagtggcaattcggtctagaaaaaataataaaacccgtgggacccacatgtcagttccacaaataaaataattaaaaaatggtgggacccacgtggaccccacatgtcatcctcactcctcactcctctctctctctctatccggggcggagcggctggccggcggagcagggcgggcagcggccggtgcagcggcgaggctggatgcggcggcgcgacctggcgaccgggccgaggcaacggcggtcgggcgctagtcagcccagcgcggcagaggcctgagggagagaaggccggcgcggtgaggagggagcttggcggcagggggaaggacagcagccgctggcggtgctcggagcgggcgcgtcgacgtggccgtgcccggctgacggcggctgggcggcagcttgccttgcctgaagaacaaattcaaagacacaactcactagaactgttgtattgatttgctataagaacctgcatgttttgagtttctgcaggaactctggagattcaattcctacaatgctaaaactcctcaagattcagttcaaatccaaagtggggaagaaaaaaagcgattcgagaagagcagcaatgtgggtcttagataagcacaacgatatgagaaaaaaaaattgaagaacagaagcagaaaccaaaattcaggccaaaaatcatcatcatcacagtgggaactctttccggcaagagaaagatttatgcgcattggctaatactagagattaacagggaagggggagacaatggtaggtacctaacctcagacgctgctgcttccatggtgatggagctccatctcctccaaaatttgcaaagcggagagcctctctctgttaatttggagtttggagggagcagagcagaggcaaggcaaaccaggtgcagaactgtggactcactctggtctcggcctctcgggtcaatccattcctaccactctcgtgttcccctctcgccaccggacacagtgaaccctagccggctagccgccatggacggcgtccagccacttcgtcttctgctcctccccatattgccgcatacaacttcgccggccggcgtggctggctctcgcgccggccttctctccccattcgcctgacactgcctgggctccctcaggccgctaccgcactgggccgactggcgcccgaccgccatcgccaaggctcgcgccgccgtcgcctcggcccagtcgccaggtcgcaccgccgcatccagcctcgccgctgcaccggccgctgcccgccccgatccgccggccagccgctccgccccgcccgtttcccgcttctaccagccgccgctggccccgctccatcggccggagagagagaagggagaggatagagagagagagagaggagggaggagtgaggatgacatatggggcccacgtgggtcccaccatttattattattattttgtgtgtgaaattgacatgtgggtcccatgggttttattatttttccggatcaaattgccacttaagcgccacgtcagtgccacgtcagatgaagaccaaatcaaatcagccacgtaggcgccatgtcagccaaaaccggcctcaaaaccgtcgagggacctcatctgcaccggtttgaatagttgagggactcgttgtgtctggatttccggttgaggaatgaaaattgggttcgttgacaagttaagggatctcagatgaacttattcccctataaaagggcagactgtacaacaaactcggcccgaataaggccgcatccagcgcaacctcggcccaaatctctactgtgtttttttttctttttcaggggaaatctctggtgtttcctgttttcacttttgggtgtgaaaaaatcggtgatgctgcccagcccttgccccaagcagtgacggagctaaaattttctcaaaagtagggctgaactagtataatttacattagtttatctttttatcttttaattgttttcaaattttaaatcacaatttcaatgggtatttaggctaaggagtagaggctctagccctaactaccctactcctatatccgttcctaggcctaagtgtggtcagacagtcttacagcttgttcgagtattagatataactattagtagagctcaagccagcagtgttttggaggcccaagagactgggggaattgatcgatgtgacatcctgacttaattaggatttggcatgtgtgaactataagagcagtgcacgcacatttaataccacgttgctagtttatcaaggctggaaccaatttataaggcatcctccctccaaccataccacaatcgggttaacccttttacacgaaacgaagatgaaaatgtaattgggatgatatgtgtaagtgggaccgtccatcggttaggctagggcatgtggggcacatggcatggcatatggcactagtattggatgtacgaacgtatacatgtgtggcaaccatactactcataggttaacccttttacacaaaccgaagatgaaagtgtaagtgggtctgcctgccggttgggcttggctacgtagttctggaggacccttttacacaaagcgaagatgaaagtgtaaatgggtccgctcgtcggttaggcttggctacgcagttctggaggacgagcgattacaatcgagaactatgaggatttaacaaaggaggcttcgccgagctcactagcatgacaacatccaacgtcttcccccatgcacaactgatcccttttatttgtgtgccacaaagcccccatagccacaagaatcttaatgaatgaaccctcatgtgtgacaaacaaaaacctataggtatgtgcgggagcaccgtcgtggctcagccgcagttggtaaacaacggtgtgcaaggtcattgcatgggaaagagcgtgaccagctaggacaatgggtagggaggttgctgtggtgagaagacggtggcgctattggccatagaaggtgggagggggtagaggaggagggaagatgagacaaatagctcacctagttgccatgactggctagccggaggagaggtcgtcatgagatttgttagcattgcatttgcgggaattgagtttgccaacttttcactgttgaagaagagaagatgacaagcactggagggtgagggtagagggaggagaggtgggagactaggagcggggaatgttttttatgtcagcaccatcgcaatcgccagtcatcttataatctcagctgcaacttacacgtgaagattgtcttgaactatggacaaaaagtataaggtggaggggctcgcgtgcaatttggtttactcacgcttgctcgtgtatttggagccccttataatcggtgattttttttctttgaacaattttaattttttattatagtaaaaaaatattttcttttggctatgccacttcgtctagcgtgacgaaacaacacaattatattgtcaatgtattttatatcaccacactaccacaccaatgagactggcgtgactaaaaggtttatattaatttttaaaattttaaaatgttaaaagaaattcataacctgccctgctctgctatatgggactctacacccacaccaatcagatcgtacgaagagaataattctccatgtgagctgataagtgaaaggattgatgggacaatatatttgttctaaaactaatcccaccaatagagtatagtactcttatacagctaatatgctgcagttaggccgagtttagggcctgtttagtacgcgaaaataaaatttttcaatgtcatattggatgtttgaccggatgtcggaaggggttttcggacacgaatgaaaaaactaatttcataatttgcctggaaaccgcgagacgaatcttttgagcataattaatccatcattagtatatttgggttactatagcatttatggctaatcatggactaattaggctcaaaagatttgtctcgcgatttcctccctaactgtgtaattagtttttttatttatctatatttaatgcttcatgtatgtgtccaaagattcgatgtgatgtttttggaaaaaaatttggggaactaaacggggctcttagttacaaactttttttcaaacctccaacttttccatcacatcaaaactttcctacacacaaacttccatcacatcaaaactttcctaacacacaaactttcaacttttccatcacatcgttttaatttcaaccaaacttcgaattttagcgttagctaaacacacccttagttttgttttaacttgacaagaccaaaagtccctgaatcacgcggagaaaacttcccaggccagcttctaatgtgactttttcttcgttgtggtacatttcttgctacactactagatgccaaggaaagagcacctaacaaatcgaaaacgtgaatcacagtaatcacaggatcatacttggattctttgctcctcttttgtccgcgccaaatcggtcaatcctacgaaattactgaaatctagcactaaatcatactcccttgatctttaaaacatatttcttttattatcaagattaaggagaaattaacttatccatcatataataaaaccaagaaactatatgcatgtatatttcttttatcttttattgactttgacagagactgaagatataaatcatcttcattatctaaacaatatatatagatgcaaccaatgagtattaaaataattttatggattctgatcaataatttaatttaacacataaagactaaaaatatatctaactcatttgaaaaaaccaaaaaatgaaatatgtttagacttttagatagagggactatgtgccgtagtgaatatacctttcttactgtagttaaaagaaaacctttctatataacttcatttctagacaccccgaatcaattagatatgcacaatagcataagccccgtaatgggctcgtggcaccaatgaattttacacatacctgtttagagcgaaacaatttgattcccgctgtggcatcaggaagaatttcctcgaacgtaccgtctgtttttttttttttgagaacactcaaccgtctggttcgtggtgaaaaaaagaatcaagagtagactttgaccagaagaagctgcgctaatgatagaaaattccgaataactccaaccaaatctgccgggatcaccaactctaccatatttcaacccacgtactacccaatcaccggccgtaactccatggagaagaaacgcgtagcccaagaaactccaagaagaagatgtcatgtttgtttggcgagagaagttataataaaccgctgacaaacatgagtgttgctgtgtggctaaactagaggtttccctccaggatcagtcaaatggcagatgctagtagctgatttcactttcttttttccgaacgaatattaactgattataaatttgcacaagaatgtcccctatcggcgtcagcgtctcagcggtgctgctaggttccctcgtcgatcttccaaatgtctgcaccagtacgtctctccgagccaagcagtccacagcaatcaacaaatgacgacggattcagaatttcagatcgcccaaggctgtgtgattagctgcaaccaaacggtgacacgcataaatcttctctttttatttttgattttttttctcatgcaattggggggacattcttgtgcatagacagttaacagtacggctggaaaaacgggcttcaccactgggaaaagtccatttgcgacttgcggcggcatgaatgccagtacaagacccagcacggagagtgacgagacacggacacacggtgccagcccggccgggtgcgcggctacgcgttctcacatgagccctctcctcgacggctgaggcctgaggcagaggcgagaagccgcgcgaggtggctttcaatttggtggtagcgaaaaactagtgcagccgaagcccgcgaaccggggcggctgctgcctgcctgcctgcctttgcttgccggctttggaatgatggcgctcccaggcttttcccctgcgcgcaggctgcagcattgtggtccacccggccgtcggatcagatggatcccatggagttctcagcttggatcatggggaccggccgggatgatgccgaactctgcagcttgtgcttgtctcactagccagcactattttactctacgaccgagtgaaacccataggccggcggccatagcagcagtagtagcccatcagtactcctgttcagtgggacggtgctgtgcaatccaatgcagcttctgatcatcgcaagtcgcaacagccatggtcgggatgggtgtgtttagttcacacttttagaagtttggttgaaattagaatgatgtgataaaaaagttggaagtttgtgtgtatagaaaaatttacatgtgatgaaaaagttaaaagtttgaagaaaaaatgacgaaaatgttcacgattgccacttgggtaatcgtcgattcgacggggaggggtgttccgttgaatggcagcgagaatattcttgcatcacataaaaaaaaaaagaaatagtgtatcatcaacaacactagtgcagccaccaacaacaccaaggtcacatttaaatcgcagaaatgagaaaaaaaacaaaaataaaagaaaaacacataattctaatagaaataaaagtgtaaaacagaatattacaaaacataggataaacacatgaatgactgtttaattggattgtaggaaaacacatgaatcaaatgagatagatagactcaaagaaaattttccaaaagtttgagctcttactaagttttcttcaaaatctttataggattaaccattccataggaaggattcaatcatttgctttaaaggcattcataggaatttttcctatagaattgaaatcctccaaaattcctatgtttttcctatgatcatgagaagtttcctcctcccgtcgctcccacctcagggctgacttggatggtgaaaacttgccacagtcgccccctcccccctcccattcgcctcgccaccgcccgagtggctcatcgacaaagccgaacggtcacaagaatggtaacagagaggtgcttccccctcccggagaaagcctgaacagctggggtccgtggttgcaccacccaaccccggttctccatcagagctagtgagaagtccagtggaggaggctttggaggagatgtggctgcggggtagagggcgtggaggcggtgtgtgcagagggacgggcaggaggtgggggagaggtatgcacggcggatcttgtgtcctctaccttagatccggtgcccaccccgcggttccggagatggcagcggaggagaggtttgtggcaggaggtggggaaggagcaggcgcagtgacaacggagcgtggatccggccccaatggctagatcgaggcccttccacaccagatttggccggaagagacggatgttgttgtggcagtgggcgagggggcgacggtggcgaggctaacccggtcggcgaggggcacaagtggcaacagcagaaggccacaggacatggctggtagcagtaggaggacttgcgacacgtagtcacagtcgacggcggtgcatggccaatggtaagagatcagtgcgcaacaggcagcgacgatggggcgccagcatgataaaggtgattgtcgagagtggtgtggtggcgggggctatgggagttcgcggcgggcgcacggcttgaggtgggggtgctgccatgggatatccagccgaggtagcggcgatggtggtgttgtgaggtgggtgctgtgggcctgcaacgggcttggatatagacgcttgtcctcttgcgacgacgctttgtcgtcataagattgccacgtcggtgggctagtgcaagggagggaggatccattcttctctctcaccctctccctctccagcccaactacctggatggattcggagtgcgtcagtggtcgagctccctcctgaaggctgactggcgacgaggcgctggcacggtggctgcgtgtcgaaggtggacgggtggtgggctgctgtttccggattgacctcgactcgggagagcagaaagatcacggacaaaagcccagccttggggccagtaatgaccacgtctgcgggcaccgcttttcccttgaggtgttgttgtatgatctcctatgctctccctgttggatttcttcgagtgaaaatcttgtcttggattctcacgacaggcggtggcgatacttttgggtggcatcgtctagaagattcttttcttaggggtgtcgtgttcatttacccttcagtagcgcgatttggttgtagaagcatgatgtggttgttttcttttcgaggctatgccttcgagggttatacaggcttgtaattttttctgctcaatcaatagaatcatcgcactatcggattgtttaaaaaaacaacacggtgcaaagaaagctgtaatcctaaggatgaactgcagacagatttcgggcgagactctaaggggatgtttggtttccagggacttattccaagtccctgtcacatcggatgtttggacactaatttggagtattaaacatacactaattacaaaacccattccataagcttggactaattgcgagacgaatcttttgagtctaattacgccataattttgacaatgtgatgctacagtaaacttttgataattatgaattaattaggcttaaaaaatcgtctcgcggattagctctcatttataaaattagttttttattaatctatgtttaatactctaaattagcgtacaaacatctgatgtgactggggctaaaaagttttagcccatctaaacactacataacgttgttaagttaacattgcacttcgagttccgattcagtaaggaatgaatgcaaagcacgaacgacacgagcaacaagaacaaatatttatgtatttgctgcttctttcttttgtcactcaactctcccctttcttctgccactaatttacatctttgggtttgatcctaaaccaccatgtaaagctccgatcgccgttgccgtcaccgcccgccggcaatctctgaaccgagctaatgaacacgccgcaaagcacggtgaacacgacggccgggagcttgccggcgacgaggcctacgagaacgacggcaacgacgaggagcgcgacggaggaccgggtccctcccacggcgtcgccgtctccggcgaggacatcggccggcgcgtcgatttctacccgcgtggcattgctgtaagcgtcggcgtccgtgtcgcctccgttcccgcggaaagacggcgaagaatccatcgatctggcgacgaaggcgtccgcggccttggtgcgcattccacggcgagagtccgaggaatccgtcgccgtggcgtcacctcggttgccttcgctgctgcggaaagaacccgacgaatcctccgcctccttgcccttcatgcccttctgtaacttgcggggaatcagcttcctccatgaccgtttcttggtcttgaccttggcgttgcttgagtcgtcgccgcctgccgcgattctctcctcaatggcgactatcgaatcgtcgcctacctcgcttctctcctcaatggtgaggatggataactcgcttcgcctggaggaatcggagaagcttgccctcgccggctccacctcccggatcggcgagacgtagccgcgcccgtccaaatccagcttgttgttcgccgccggccgccgcggccgccgggaaagcgcggaggacctgacggactcgagcaggaagagcgagaaggaggcgacggtgacggccgcgaccaccttcttgctccagatcacgaggagggcgagcgacaccacgccgacgagcgagacgaaccccagcccaaggccgaacacgcggcccttgggctggcggcggaggacggcctccaccggcggaagttccggtctcggtctcggctgggttggcggcgagaccgagacagcggccgcaggcggcggggatggtggtggtggtggtggcgaggaaggctgcggcggaggggaaggcgagggcgagggcgagggcgaggggggagcctccggcccgccgcgcttcttgcgcctggacgccgaggcggagggcttcttgaggcggccatggttcttgacgacgaggtcagcgagggaggtggggaagcctgtctggacggggagcgggccagcgcgcgccgggcggagcgcggcgaggaggcggccgagtcggccggcgggtcgctccttcagcgggctgggcatcgccggcggcgagcataggaggaggagttcgccggcgcgccggcccgtggcacactgctcgccgcggttgggcttctcggcgctctgggttggtggcggattggtgggttagttccgcctcagactttgtgcgcgtgcgtggcgtgggggccttggtagaggggagagcgagaatagtagtggacgacgcgatagccagtggtgcgtttcgacgaaaagaaaaataaaaaccatccaaatttcccccgtttcgcatgcgttttctcgtccaaaaaaagggacctgggagagtggaagagggtttcaattttagaacggctaaatttgaaagttttgttggataaggttgatgatgggtttagcaactccttgatgagaagggaagggattgtttcttcacatgacctgattaatccgtcacaagaactttgccaatttctacatactttctcgagattcatgtgacgtgaggagagagagagagagagagagagagagggagagggggaatgaattggtctcactgccggaaccaaccggcaaccgtaccgcttgactaatctgtctcgtgccggtctcacaacgttccagtggctgacagcgccctcgctaaccttccacgtagtcaattaatgcatcattgctttggattgattagtactaatcaagtgtatattaaatcgattggctaaggcgctaagcatttggggcctttattttggtgttttcttcattttttttggaggtttataggaccttttgggtctcaggaggttaaagtacgtactagtaaaaattaagcttcgatcatgactcttgatgtgaggtcaattctcttaacagggtcgtcacatgcttgcacgtgaaaataagcttagctatgcgaattacttagtttgttaaccttgtgtatgtctcgtaatctaattagttactagtttgttgatgctgtgtcttaacgagaagaacagactatattctcttgggacccgcggttgtactgtttgtctccctagttcccatcccatgtagctatgtaggcatgcaagcccattcggaaacccccaaatagtttctcaaaaaaaagaaaaaaagaaacccccaaatccttcttttaatactacaaaaatactatcttgttgctatctaaaacatatagtaattctaaggaaattcatcttgtgtgtttatttttttttcaatcacttctacatcccaaagttttgctctatttctttatagctgtactacctcacagttctcatccgtatgtacaaatcatgttagttgacctcattttagaaattttttgtagtttcacattttgttgatttggattcgtctaatttcacaaacaaattcacacaacttaaaaaataaccgcccttttaaggttttgacgtagggatcagggcataggtctaccactcaagttttataaagtaaatttcacataactacaattattttatcaaaactatcacttagctacaacttaagccaaacatttcataaaattacaaaaataacaaactattttattaaaaaactataacttttgttgcttacgtgtatttgatacgtgagactaacttacaagagtgcaagtaccacatatgtgctggacaagtgcacccaacctttttattagaaacaatacaaacagatgtgcacactcatccctataaaacgtacacacgcacaccatatcctcataagtacattcgaaagattacactggtggagaaaccatctttggacggtcgaccaaattccacaatagtcccggttgcaataaaaaccaggactaaagattatctttagtcccggttgaaaaggttagagctactttttgatctttagtcccggttggtagatcatctttagtcccggttaaaaaacggtaggtgatgtcaaacccctctaatatctttagtcccggttagtgttaccaaccgggattaaagatcaatctttagtctcggttggtaacaccaaccaggaaaaaagatcagcatgcgtggagagatcgaggcgcggagagatcaaggcgtgcgggatcgagatacatatctcctcctcccctcctccctcccggttctatctcttcttctcctccccttctcctcgctatcttacacgcggaggatcctctcctcctccccctcctctcc

SEQ ID NO: 10276 - DNA, 31952 bp, Oryza sativa
ttcctgcagccccaaccgggactacaaatagatcttttgtcccggttggtaacaccaaccggtattaaagattgaaaagtactctggagcttttacaccgggactaaagatgtttttagtcccggtttttactacaaccgagactattatgaaatctggtcgaccgacaaaagatgatttcttcaccagtgtaggtactcacgcgtattgggtgagtgggcttttgccacaaaataataagtttatgggttaaaatctctaaattagagtgacagttcaggtggtttatgcaattttttccaccacttttagcgagtcaagaggttaggccacgttttaatttacaactcaaattgcacgtggactatatacatgtataatatatactatcacatcgatcagccggcacggttgaactaaataaattttccgaaaaccaccaggccggaaaggcagccgtggtggcccatgcgaatatatatgtaccgtgtctgttactaggagtaggcggagctggggatcgcgtcaactgtagtacaaactactgtaattccatcgtcagggacgaactagctagcgtctgcgcggtcaaccaggacatgagcacgagggtcgtcaaaaaatccaaatgcaacgcgagctcgatcgatcgagtgatcctggatcccccggacatatgcctggctagcttagcttgatcatctcgatcgatcgagtccaaagcgcgtacgtacgagttgatcaaacagtactgcatatatgcagccaactagcttggcctgttggccaattggccaacttgcatggcgatgatcagtgagctagctgcgatttcttccaaggaagcctgtaggtacgtacgtatttcgtcgctgttcaaagggatgtacgtggtcatcagtccttggcttgggcgtcacagccaagtcgatagggccgaccttctaggctgggaaagagacggctgcagatgtaaccggctagccattttctcttactactttcctttttcttgttttcttctttgcgattattatgtggatcgaagactatacaatatatctaaccacttggcattttcttgtttccgagagtgaccacgaaagctgcagggcctgcgactataggcaacggaacgtgatatgggaattgctccatcttgcattgcgcgagcgtaatttgatcgaagcaagagtttcaaggacaggaagcaaacttttgaaagaaaattcaaattgggtccactcgatccaaagcttgaacattcagaaataaaaaaaaatgtgttatgaactttttttacaaaaaattaacaggtcaaattaatatgtaatatagcacttcataaacatgcaagatcaaattcgacttttacaagctataacgaaaataacaaattaaactataacaagtatatatgcatccataatccaatttattgtcatttttacaacttgacaaattggattaatttaaacttgtatttcttgactagtatattacatattaatttatgttattatttttaaaatgttatatagccataacatgtaataaatgagtggacatccactcagatgaattaaagagttcccgtcaaagctcatcagaacacaaggtcctcctcaagggtagtgggaagtctggtgcatattagggttttagccccaagcttagctctacaaacccctaacgatttcatcaaaatatcataaaaatttctacaagagataaaacaacagttagatcagcccctaggcgtgtatatcctttcaagaggactgaataattaatggcggggtgaaacattaatttaatatggatatgtatatcatgtgttttattgattttaattggtgggactgattcgggaaagaagatgtctctgcatatttgtcacatctattctgtcgagggaggattggaaagggaatagatcagacgattcgcgacacaggtcaataaattacgcgcaaatattgactatggctgctctttgattagccgtgacgcgagcaagcaaagctcgttgtgagatgtctctctcctatacctgttcaggaatttagatcgttctgctaatcgcgaaccatcacagtagcaacaacaacgaggtaacgagatgaagcaaattaattacctttattatttgccaatctatacatgcacgaaaatataatttttattatgacaaggattgccggaagtagctggacatactgatagaacattaattgttgtgatacatataatatatccatgccgacaaaaaaaatctcaattatgtatagtttctgaattttcctctatatattttggacaaataaaaattgtaaactagaaactaagggtacattcaactttaagatcatccaattttaccaagaaaaaaacatatcattgtcttaaaaggctaaatagtttccccagttgtaacgcatggacattttttctagtataatcatatagttataaaatatttatttagcatccctacatactctctccgtcttaaaaaaatgaatctagaactggatgtgacatattctactacaacgaatctgaacagatgtatgtccagtttcataatactataatatgttacatctagtactaaattggtttttctatgggacgaagaaagaatattgttcgtgcggtggcaatgggtaaatttagtgccatggagggagtataatttcgttattgaagcacagtatgggtaatttttgacttttgagctaaattcaccatctccataaaaaaaatcagtatcaaattactgcaagaatcggcggccacctgatttctttgggaagtttagtcattgtcttggcggttgaaactcaagtcgctgacaagcatacacatattttcttgacggctatttagaaactccaaggttacaataatttgatcaatcaaagaatacacggacaacgtgtatgtacaccgcacgacacatcaggcgtcatgctgaccggccaccgtccttccgcagcgcgcgctcgacgactcgccggaaatgtccggcgtcgcagggcacacgcagcacgcccggctggccgtacccgtactgctgcgccgccatgtccagcagctccgcgatgcacgggtcgccgagcagcctcaccggcaccatcacgcgctccccgccgtcgccgtcgccgccgccgcagccggcgaccatcgggacgtgccctctcgggacctgatcatcctcgccgccgttggcgcggctcggtgaggcgccaccgccgccgctcttgctcctccagtacaccatggtgattaattgttagattgattcctggaggccggagcttggggatggcggtggtttgattgtctggccggcgctgaggagagacgaggacacgagtttgtggcggcaaatttatagggaggaaatggtgattagcgcacgtgttcttgggttcttgacatggatggtcttccatggcgactggaaaggggatcgactatggtttgaaacgagacctgcgatgagagtccatgcaattaatacatcatccacttgatttttctcttgagatgcccgatacttcgcggtaggatgggccgttgcatcgcgcggtcgtttttgacgtcatgttactccacgtctcaggcctgtttagtcggtaaatgggaaattttttctgtcacatcggacgtttaatcgaacattgaaagaggttttcggacacgaataaaaaactaatttcataacttacttggaaaccgcgagacgaatctttcgagcctaattaagccgtcattagcacacgtgggttactgtaacacttatgactaatcatgtactaattaggctcaatatattcggttcgcgatttacatgtaaactgtacaattagttttttttatctatatttaatgctttatacatgtatccaaatattcgacgtgatgttttttgaaaagtttttagggaactaaacaggtcctcgggaaaatatgttaaatgatgcgtatgtagagattagtacttcctttggtcaaaaatatttaatgccatgatatagaattgtaccacattttttaacataaaattgaagagtttcttagtgctagaggtacatagtactacctgtcaaggacaacaaaatttcctattagtattatagtactcttcaagacaaatttcgatacattttcttaattagctaagcatttgagaaattatcgatcatcaaaatttaaaactttgagaaaaacctgtactcaacgtcaaatatttatgaccagcgaattgagcttacataactcagcaggtaaggttctctgtagtggaatctacataacctattttttcatgcggtcaaattgatttttctgtgcggatattttccctgtctggaatcaggcgtttggaaaaataaatattttcatgtgcgggtgaccgaaccgcacaggatactcgagtatcccgtgcggtcaaattataccgcccgcacggaaccaacaaaaccaaaaaaaaacgcgaaaatcaccgccgcctgctagaccgcacgcactcggccatcgctgagcccgccatcgtcatcgccttcaagccggcccgccgccgccgcagtcgcgccggccgccatcgccgccggatccaggcgggggacggccgccactgccagatccgggcgggggccgccaccgctgctagatccgggcgggggatggctgccgccgctagatccggccgcctcgccgccgccccgctcacctcctctgccttgacaacgcacgcgacgacggcgtcatcgtcgagggagctgagcgacgacgtgcatgacgaggacgacgaccaggaggaggttccgcccgctcgccgtcgcccgcttgccaccgctgccttgacgcctccgcctcgccacgcgcacggaaggggccgccgccgacgcccgctgttgtcggaggaggggaggaggaggaggaggtagagaatagagataaggtagagagaggggggaagtggttgagggagaataaaaggggaaaaaggaatagagaggatgtcaaaaatttgaagtgggtgagaggaaaaggagggaggtattttcctgtgtggtccacttaaaaagcccgcacacgaaaatcgatttttccatgcggtcctcttaagttgaccgcacgggataatgataattatccagtgcgtcggattaagacgccctcatggaaaaacgcattttcctgtacgggcgacaacccgccgccggtccccctgttttcccgtgcggtttcacttatgaaccgcatggaaacaaaatggggcggcgtccagaaaaatatatcatgtagtatatctgttttgtttcgggaaaatattatccgtgaccaatgagagtataatataggaaaaaaattccaatacattttgaggaaggccttagtttttttttgttaccgatggagttggtatttggaacgcataaatttcgtgtcacaccaagcagcaaattaaaggttcaactagacttgtctgttgtttcttaaataaataaaaactggacttgtctgttttcacaccctgagtcccaaaacaggactgagccatgcatcctcacttgatattttattgcaatttgcccgtagtaagtagatgtcgatatcttgttaagtttggaagttgggtttggaccgctggtcccattaacggctagctaggccaccacgtaccaactgtcaagtcgatggggagtattagagagcacccaaatggccacatatggacgcctgggttggtgaaggcgggacgcgcgtacgtgcgatcacatcgccggcggacgacgccggaagcattctgcgcatcgatccacctgcagcaagtgcatgcatgagcacgcgagggtcaaataaacgcaacaatatcgatcgatatcgagctgcatgccgttgatcatcagttgatcgagtccaatggcgtcggagagtcagctgtggcggcacagtactacgtacagaggcacgtgccgaattgaatctacttttcttaaaatatataacccatgtatttatttattgattaaaattcaagcataatatgagtacatgtacgtacagtgcttagagcacagatcactggaaaactatagttttgcaaaggagcccctcaaaactggacaaattacactttggcataacatgcatcttgcataaaaaaagttacttaaaaagaaaacgaattaataaagcaatcgagtccttcgttctcctttgactgccttcaacgcccacggtgaaatcctagagctcgactccactggaggatgcatccaaataagctgcataggattaagccaccacacattccccgtagggggcctcatatatacacatagaggttcaggtgatgataagtgtcaggaaaatgaaaaccaagagttcccatcatcgaccactcaggacatccttgtcaccaatccctgagcatgacccttataggctgtgctcggagcacatcggcccgaacacgactgctcgaggcatatccgccctcgcccgtccaccgcgggcggtactcggggcacagccgacctccctccccccctccccccctccctgggtgaggagtgcttggggaacctctctcctcgagtgttcagcccacgagaaacacaaacgggatgtcacgccccgaactagccccgagcggaactagcccgtgacgctccaaattaacatgttaatcgatactagtcccaggaaacagtgctggtatcacaggaagacagtatatcacagcaacagaggtctatttattatagagtaggagtacagtcatgttgggctgcggacagatctcgagctcacatctgcattacaaaaggggaaaacggaagccaagacttgggccaaacatcacaggcgcgacttgggaactaggccgaaaccctaaaactcatcgtagccgacttactcctggaagaactcctcgtcagcgggatccacttcatcttcttcagcaactgggcgggattatttatatagagcaagggtgagtacaggagtactcagcaagccacgggaattaagtgtttaatgcaggcttcaaaggaaaggctattgtttttgcaattgattttatttaaactcctttttgaaacgactaagtgagtgtttctcaaacgacccggatgaggcagtgcgtctcgtccggtaggagtatgtgcaatgtatcagtctttgaattgatcaaggttggcacccggccaacagctttcaaacggccacccgggcctggctgatcccatcagccgccgattttccaaacatcgaatccattccacagcagcaatttcacaagtagtagtcaaacaaaactacgctaggaatcacctcacatccgcccatgaccatgggcacggctgttcgaacagtttaataacctctgcagaggggggtacactttacccacatgacgttactagccttggtcacccagcccgtgcagaacagccacgtctggtgaccttgggactttcatgacaaggcatttcgaaagccgacacaggttcaccatatgccaacgagaggggtcccagaccaacaccagattaggtcccagaccatactgtgccaggaagcccgggggttctccccgacaccaccccgttgaattcacatgtctcttggcatcaaggctcccccgattagcaatttactcagccaggggtgtcccatttcacccatgtggtcgcacttgtcttatgttcggatgaaattccaaggaaacggtccttaagtgcaagagcaggaaaccgtacacccggtacgttccccggttcacgattttggaaattcatttagttcgcaagcaccgacccaggtgtcgggttttccaagtcttttgtaaaacccaagttttacccatcgttggatattttatattttgagggggggtgttctgatgcgcgtacccgaaggcccgtgcatcaaagcacaacagttgacaaaggaagtctaagtgttcaataattcaaggggggtaattgcagcaattaggattgggagggggggccagcaggctatctcgcaagccgcggccgaattacttgtataaaacctattcatgcaatatttgcagaaaagaaatacttagatttaaattataggtgcaagatgatcaaaggtgacttgccttgctcgagatcttgagcttgatcctcgaaatcctcgcactgcgggtcttcgggctccgaaactacacgtgaaatgggacaactcaacaaacggcaaaaataaagccctattattgacctctaggcgtgccattagatagatctcgagatttaaggaattttggaagttgaacggagtcaaacgggcttacggttgggaagatattgaatttctaatattattagatttttggtccaaaggaaaaggatttatttaaatcctttttgaaaaaaaaaagaaagagggagggaaattagacttcgcgggcggctcggccgaacttaacgggctggccggcccgagaaagcggcccaaagcgcgcgcgcgggcagggaggagagagggagccggtgggccgggtccaccttgcgtggtcccgggtgggacccgctcgtcggcggcatggttcaccgtgcggagggagcacgcgacgcggcgctagggtttgggcgcggcgctgcgcacgcgcgcggcttgcggaggacgctggtgcggcgggcccacgcgcagcctcacggctcaccgtagaccacgcgcacggcgagggcagaggggagcggcataccggggtcggcttgacccggtcttagccgagctggcgccgacgtggcgcctacgtggctgccacgcgggccggcgggaggttgaaaaaggcgccggccggaacggacggcggacggtggctgcgaacgacggggcgaaccatggcgatacaggcgaaagcgagcacaccgggtggttgcacgagatgaggggagacgagccaacggcttggattcggcggagggggctcgatggcggcggattgcggcggcggcaaccggcggcgagggaagggggaaacggcgacggcgcgacaggagatcgattcgggcgagctagagcatctacgcgactccgggaatccgtccgttgcgccggattaggaggaaacgcaacgagggaggccggcgacgagaggcgcttccgagctcgggcggcgacagcggcgagcctactgcgagcggcggcgcgggctggggcggcgccaactagctactggggtactactcgatcggctactcaaagctaaggggaagagatggagcgaggagggagaacggagggatgcactaccgagacgaggcggggcgctgtgacgagatgccgacggcacgggagtgatctctctggcctcgggccggggaagaggaagaagacgagctcccgaagtctccttccgcgtccacgaacgcgccggctcctccgtggcaacgaaaggcggcggcgaacagagcacgggaggcggcgacaatggagtggagacgatgggacaaacgagaggagaagggagggagggtgcctgggctttataggatggcgatgtcggtttgggaaccgacctagggctgtcaagggagagggctagcgctcggtggtcgcggccaaaacggcgacagggggggagtatggcgctggcgggagagaaaagggaaaaaggaggagggaaagggggcttgccccttgccactttgggaaaaggaggagggagagggggcgacgcggcaaagggaggaggagctctgtctccgtcccttggaggttagcgcgcagagtggcggggccgggttgtgacgacggcgatgacggcggggcggtgtggagcggagcggcgacacgggcggcaggcgcgggcaggcgtggaaggcgctgacggcggcggcgaccaggcggtcggccaccacgacgtgcgtgcgcgggacgcaacgggcggcgcgggcggagggtgctcggctcggcgcggctcacgcgcacgcgcgcgcggcgcacgggcagagcgggggagagagggagagagagagagagagggagggagggagagagagaggggaggagggatagagagatgggccgagagggattcggcccatcgaacctgagggaggcaaaatagacttttgcggaggaaatgaattgggaaggatttggattcgggatttgaatttgacgatagatcggggatttgagatccggaatggcacggagactgactgcaagcgaagaaacaattttcgcaattagggtttttagaatttagattttccagctaggcgccacgacgaaacgggcgctacacgagacatacaaaatctacatcttcatatctacattaattttcaaggtttcaagaggagagttgagaccaacaagatctatatcttcagtgtgttgaagatacagcatatccttcaagcaatgttcacgaggaaatcctttgtcatcgacttcttcaagaagcttgtccaaaccaataagtaaacctatgatcagcaatgggagcgatcatgggtgccttgggttgggcagccaaggcacgcggcgtgctccgggcgcacagctgccccgagtacggtgaccaccgaggaacaaggcacaagcatctgggggccccgggcccgggctaaggcccaaacatgccttttgtctcaggctcttctcggaaaacgtgaagccatattctttcactacaagggaacgcgaagctaccacgtgtcaaaaacactcggtaatacggcaaaaggtactcagaattcaaacatgcttccaaagcataaaagaacatggtcattggttagactttttttggataatggattttcataaatccggcctctatatccatgaaggatatacatagccaaagggatacaagagcacttagactcacatctcaataaggaggataacacacaaccaaaaaagaaaagaaaaacaaaacgacctcgacacaccactgcttctctgcatcctgacatactctcctgaaacggccagatttgatgagtggaattcgtctagacgccgccgcccctagtacgtcgtcgctgcgaacttccaatgatgccatcttcatccatttcaggtgagctgacgccacgcgccgccagttagcccactttcatccatcgtcaatcgtcggaactagccgacgggatcgacttccactttgccgaatcctaggcctccacacctaaaatgttgcaggcgtcgacatggatgctcttccaccttctagactctcagctcgccactgcccctagggctgccgccactgaaggggtcgacctccaattgctccttaccgagggccttgcaccgatgctcaggtcgccgtcatttcaggccgccgctgccctacggcagccaccgccaccggtgtcgacctccgtctgctcctcgccgagggccttgcgcccgctgctaccactagggccgccagcgccgacgggagtcgccgccataccgggccgacgcagaccctagggccgctgctgccaccctaggtcattggttagactggactatatatatgttcttcttggaaccaaacatcgtagacaaatttcagcgaaatctgctgtttccacaaaagaataatcaaagaattgctatatgtataattttgctaagaatctagaaaataaaatcaaagaataaacagactccagacgtacttgcacatctccctagctagctactccctggagctgtgacgttttctagtacaacaaataaatttagatatgactatgtctaaatttattatactagaaaatgccatatcctatcttagattggtttttatgggatggagggaatacaccacacagacatgtccgatctcatgctgactggccaccgcccttccgcagcgcgccctccacgactcgccgtagacgctcgccgtcgcagggcacccgcagcacgcccggctggccgtacccgtactgctgcaccgccatgtccagaagctccgcgatgcacgggtccccgagtagactaaccggcaccagcacgcgctccccgtcgccgctgccggcgactatcggtacgtaccctctcggaaagacattgcattcgtcgttgtcgtcgccgccgtggcgcggcgaggcgccggcgggtgacacgccgccactgctgctgctcttcctcctccacatcatgatgatctcgattttggccaagttaattggttagattgcctgcaggatcgatcggaggtgccggagtttggagccgggctgtcagcggtgcctggccggagcgcgttgaggagagacgagcgaggattgtggcggcaaatttatagggatcggcaaggacggttcttccgtggtgattagcgcacgtgcgtctgacatggattagcgcactgcgcacgtgcatattgacatttatggtggtcttccatggcgacgatggagagactagactttgaaccccgttgaatgtccatatgcatgcatcatccgccagggattaatttctgagatgcctaagagacgtccaacgacttggatatatatattccttagatgcctcaatatatacttcgccatcggatgggatctgtccgtttgtgtactatgtatggcacaaggttttcttcatcttgtttgaaacataaggcttgcatgtatactttattgggtcattttcttatttgcccttgtttattgcatagtctctgttgaaatacaccatacaatatgtttcactactgtatctgtttccaacgtgtttatatatactttctccatcccaagttgatcatcacctaagcttgttgaggttttcttaaaatgacatcatataacaaagtgtttctttgtttatttgtacaaagagtatatgcgcatttaaagtatgaattaatttctgttagacaagaagtgacggagtaccttgattgatgataattaatttatgttggacaccaagatgttttcatgtttttggtcttgatgccttttccttaaaggatgaccaaactaggatgaagggagtaggtagcaaactttgcttatctctcttgatttcatgccctccttaatatttacgacaactcaaaattaagttacaacataaaaatagagggagtatactatattgcatcaacaacttttaatcaacgaaaaacacctttgctttctatgagtcgggtgaaacttctctaaatttaagtcgacttatgaattttgttggatcaaaatccaatgacctgcccgttgtcctccacctttacaagagggaggcaggaggagaggagagtgatggagatggcagactgaccaacgatagtgatggcaagactcagtgacggtgaccccttaactctggctgaggacctacggattagggttctgggttagagagtggagacggtaagagggggtaggaacagacgagggtggttttagagggatcgccaggatggtgaagattggcgatagggtggttgatacggatgggttgtgagacgtctattgcaatgccgaagctgcgaggatggagaaggacgacaagcctgcgttgatgatgggggtatcttagcagtgtgatccaccgaaaatagagaaaaccaatgggacaggggtacctcaccaccacttggtatcgggacgataagaatccaggtgtcgaatgaggctaatatagtggggctagacggcattgttggtgatttccgctcttataaagtcataccatgttagttttgtctttagatgattaatctatattacaatctttttttccttctctaattgagccacatcatcttagttttgctttaaacgatcaatccatatatgacttacattgttgaaaaccgcatcactttaattgtttatggttttttttcaataatcgatcagacatgaaaattatacaaaatatagctatcttacatgctatttctactaatatcacataaaactcccgtagcaatacacgggtttcatttattatacagtagaaacaaatctcgcgcccctagtggcctgcttgaaatgcatataaatttcgtctcaccgcgcgcaagcacgcaccacagattcagctagacttttcagttgtttcacaccccggcttctcaagtagccgcatatatacagcatcgccacgttcatcgtttgcaatttgcttttcggttcgtagtacagtagcctgcagccgacaagatgtcagtatcttgttagttttgagctcccgtttgatgttttggaccggcccaacggttgggccaccaccaacttccaagttgctggagacttttagtaggaactaggaaggaaacgagcatacggttgccgagtcaaaccgcaacgcgatcctatatggagtacgtacagagtccgaggcgatgaagaaccagcccgtcgttttcgtacgatgattttgggctaggaaactactcctggagaacgtttgggccgtagcccactccactggccggttggcccgtctccatgtctgggcctgcctttgaactgttctaagcgcgactgcttgtgttgtgagtagtgtgatcgaaaagcaccggtgccgtgaaacccaaagtggatggaaaggaatgtattttctgtacctgccctttattttttaatagatgacgttgtcgactatttaacatatatttagtcacccatcttatttaaaaaatatatgtaaatatataagatataaaacatatttatagtattttaaatgataaaacatctcacaacaaaataaattataattatgtaaaaaaatgaataagacgagtgataaaaaacagtgtcatttattaaaaacgaaggtagtatttctcggtagctgactagtacgctaagatgcgttggcggccggaaccaggaaatcagagagcaggggctgaactagcttgttcatcatgcttcttttaaatttttacaataagtttttatagaatctattatactaaaagttcattaaatttcttacaaacgctatcaagctatcaagttgccatgaggcggtttagtgttatattaaatttatttaattagtatgtatgaaattttatctagatactcaacttttaaacaataataatgaattgcagtgacaataggaaagtttatatgtaatcggaacaaagtgatttcttttttaatctagaagacattatctatggtttattttagggtgtagaaatagtgagatgtgacctttttaattattatttttataaaacaataaataagatgcccgcgcatttgtgcgggctttctttctaatttatactttaatagtagtagtgttgaatgaaaccaagtatcattgtactagctactcctttaatttgacgtcaaaaataagctgatttctaatatttcacttttatttatcttacctatactctcgaagaaatagtatcctttcattactcattgactacatacgtatctcctaataatactactttcttattaataagataatttattttttttctcgctactatttttttcttaggatggctataaatggctattctgagatataggcagtggcagaatcagaattcttctaatcctagactcaactaatgtaatttagtacgtaacttggctattaattctctattttttgaagttttaaagtataattctaatggatatttagattcaggagtagcgttgtagctctagctgttctactcctgtcttcgccctgggacagagagagtgtatactccctccgtactcgtaaaggaagtcgtttaggacaatgtttaagtcaaactttgagaatataaatcatgaataactctcaagttgttgagcttaaaaatgtaaaaattatatgaatagatttgtcttgaaaaatacttttataaaaatatacatatatcacttttcaataaatatttttatagaaacaacaagtcaaagttgtattttgaagaccgtgtcgatgtcttaaacgatttcctttatgactacggagggaatatatattaggcgggcgtgagttaattatagattgattgggccccgcactgcctttttttggttgatccccgtgctatgaacacaacctaaagtagctgatagcactgtagaagttgctacacgatgtcatcccgttatgggtcgggtacaataatattacactgatatatatataggcaacgagagagcgagaagatcgatcactcgctagcttttaagctagccggctcaatctacacgcacgtacgcatgtgacccttccaggaacgagagactagggccatatatatatagtattattagtaccatgaaggcatgaatgatcgagcaaacttaaccatgggccggcagccggtgatcacgatttggttgcatgcatatgcgccagtgacgtcacgtccgtacgtacacaccaacaatcaacaatcatgtaggctaaaacgtaactgctcggtttagaagaatatatatatatatatatatatatatatatcgtgagggtctatttctagacttttgcatataaaataaaattaggtgtgttatatgcatggtcctcctgctaaacaaattgacctccgtgaatatgcatatgcatggacaaccaaaccaactactccgtatcttgcaattactaaaccaactgcaaaatgacacctgaaccgacgtatgtaatgcatagtctaaactaattaagctggaacaaaatatattttactacaatgtatttattgtacttcgtgtctcagttacgaagtgagggtataacttaactatttactgtttattaggtttgtggggaaaccagaacctatccaaatttaaatcgtagactcgatatgagtgttcacatttatggctaattatttattcattgtaaacggcgtatatattaacaacgatacatccgtgatgacttctgtattcttaatacgtacttcctccgggttaataatatttgtcgttttggacaaggacaatgtcttataaaactaaatttgaccactatttttattataatatgaataaaagtgttacaaatatatgattttgttgaagtattttctaaactaatctatacatattgtcaccatatttcaaagataaatattttagaaattatttataattaaagattttaaagtttgaactcacacttgtccaaaacaacaagtattatcagtccggcaggagtactcagtctttcagagttgctcacaggagtaagtatatgtacgttgtgagcgtttacatttatattgtgttctagagaaaaaaagtcaacttgattaataagttcacaaatatactcctttaattaaaacaaagggtcaatctcgttgacccttacagggtaataagcatgtagtatatgtcattttttatgcgtgtagcctcgagtctcaacgagatcaaaaggcagagacactcttatatggtcggccatcacaagcatatgcacacgtaccacacggcacacgcatttctttaggggccaataatggcaataaagcagcggcgtgccggccacattgcatgtatgcgccgagccactttgcgaagacctcaattgtttaacggagttgctagaaatatggcgccatatgttagagttgattttttttagccacttacatagtagttacacctcatttacatcccacttacatatataattagtatgtaattttcgaatttacatatgtaattttagtacttacatatgtaattttaagacttacattgtaaatacattaaaattacatatgtaatttagggacttacaatgtaaatacatgccgactattttttgataaaaaatatggcaccataaatatagctacacccttgtttaattgatacttcattattttctctttttttcttcataccgtaccacctgttagaggagctttagattctgagaaacagctgtttggtagccagcttctgagaatctggaaaagctctgaaacccagcttctccagcttctagctttttagttcatttttcagaatctgtaactacagattctcaaaagttgtagactgtttggggcagcttctagcagaagcagcttttgggaaaagctgcagctgggacaatctcccccaaacagggcctagtaccacatactactactgtacttcgctccctctgtatctgtttcatattatatatcgtttgacttttttcttagttaaattttttaaagtttgatcaaatttgtagcaaaatatagtaacatttgcaatacaaaataaaacatttgcaatacaaaataaactttgtaccaaaatatttttaatgttaaatttaatgaaactaatttggtgtcgtagttagtgttaatttttttctttaaacttgatcaaagctatagaactttgactaacaaaaatatcaaacgaattataatatgaaacggaggaagtacaatttatccatataaggtagtatgttcctaagtattctcaacttaataggtttcctaaactactaaacaatatatttttttaaaaaaatataagatttgcttttaaagattatattaatctattttcaagttgtttaagctaatatttaattaattttatattagtatattgctttgttttgcgtgccaaaaacctaagggactgttcagctgctatgtttatcagttgtgctactgtagctgtataaagaaaacactgtggttgttggctgcaacacagtagaaataagggcagcagaacagagcctaaatatactatattaatgtagtactcccttcattctaaaatatagcaacctgatgggacacattctagtacaacgaatctatgcatatcctgtctagattccgtgactagtatgtgtctcatccagaacaaagttgttatattttgaaacggaggggtagcgtatatcgtcgtggattgatatgcgcacctacgtgtacgtacactgatcgatggacgaactgaccggatcgtgcggtccacctgatcgatcaacgctcgatcgaccgatccacgtacgcgcgccatgagatttgccagcgtactcgcgcgacggagtagtcatcagtacgtagaagtactagcaaagtgatagcttgatccttaacacacgatccggccctgtcccccactcctcttctggcgtgcctgtgcgttaccacgctttgtatacgtaccaaagtgccaaatcaaaaggtagtagacgccactgcactgcacggccacggtatggcatatgcaggtgcatatatgcgttggacgacacagccacgtacactgctagaaatctcattttctgcgtaataggggataaattttcgcaggcgggcatgtaattcggagccaaaaccccaccggcaaaaatggtacccggggtggagggggcggtccgcctgcgaagattgatctttacaggcggttcatttcaccagccctgttcattctccccgacgtttctctctcctaaagtgacttaaatatagggggggaggttttgaacttcaaatcttcgggggatttttctacggtacttagatctactcatttccacactaggtatgcatttttttaagcttttagaccttaatttgtgatggatttatgcatccaaaattttgaaggaagagagctccatgttttttaattttatttcttgccatatgtttatgttagatgtatgtgtaatacttgatgcctcttgttgtagtggtttaatgtggtaacataaattctcgtttttttaattttttgctatcatatccaccacctagttctagatcagatctagctcttgtcatgtatagagagagaaaaaaattttaaatgtctatttattcagtgcaatcaaaaaatagttatagtattttgtaatatgccgatggattgattttgttagattttcctaatgtgctaatttggcatgtctgtgtaagaaaaatgaaataaactatgattttttattactttacacttaacctttagttaattagttttgaatagttataagttttttcaataaaccctacaaatttggtattaattgtgcaaatattttacgtgtaattttttagagatatggaaagttgggaatggatatatcattggccgaggtttttgtctccatatagaaacgaagtggctaaatttattggtattgccaaggttcacgctgagaagaacaatatgaggaagatgatttgtccgtgtgctgactgtaagaatgaaatagcctgggactttgacgatgcttttaaagtgaaggagcacttagtaactcgtggatttatggacaagtatgaaatatggacacataatggcgaagaacaagtggacgagcctgaaaatgtagttccgacacaagttgaagacatggtgcatgacgatggttctgttgaggacaaaatcgacctagaggaaatgttacgtcatgcagaacccgaggtgctgatggggtcggccagagggctaaataactttcaagctttacagaaggcagcaaaggaagttttgtacgatgagtcgaagggctgtgacagtgatttcacaacactccggtcagttcttgaacttatgaggttaaagacgagacatggatggtctgataccagtttcgacagtcttttagaactcctgcagaaaatgctaccgaggcctaactcactaccatccaacacatatcaagcaaagaaactcatatgccccctttcacttggtgtggaaaagattgatgcgtgcgtaaatcactgcatactgtacaagaaagagtacgtttctttggatgaatgtccaacatgcggtgcaagccggtacaagtcgaatagcaatactagcctagaaccctctgaagcaactgagggacgacagagaaaaatcccgcagcttgtgatgtggtaccttcctgtgaaagaccgcattacacgaatatactcaaacccgcgagatgcgaaactaatgcgctggcataaagaaggacgcaagaaggatgggatgattcgacacccggcagatgctcgtcaatggataaactttgatgcgcagtatagagaatttgctaaagacccacgaaacattagatttgccctgagtactgatggagttaatccttttggagacatgagcagttcacatagtacttggccagtgcttctcgccatgtataatcttcctacctggctttgtcaaaagcgaaaatatgtactactctgtatcctcatacagggaccccgtcaacctggtattgatatagacgtatttcttgaaccattgttggaagatatggccgatttatggaaagagggattgaaagtgtgggacgagtacttaagggaatacttcacagtgaaggcaatcatcttcgtgaccattaacgattatccagcaatgttttcagtttcaggtcaaattaaaggtaaaacaggatgtgtgatctgcttgaatggaacgtactataggtatctcccgggttccaacaagcttgtgtacatgcggcaccggcagttcctacgcacaaatcacaagtaccgtaagatgaaggcggagttcgatggtactgaagagactgatcctgcaccaaaacctacatcgggagaaaatgtgtgtgcaatgacagagaaaattgtttgcgagtttggaaaaatgactaagaaaccatcaaaggggacaaagcgcaagaaacccgagaagaatacaaagggaggggatagtaagaagcaagatgacagttcgaagccagatgataaactccctcccccattcaagaagcattccatattttttaagtacctcccgtactggaaagatctggaggttcggcatgccatagacgtcatgcatctagagaagaatgtgtttgacaacatagttggaacattattggacatgccgaagaagactaaagatggtctgcaatcaaggatggacctagtcgagatgggaatcagggaagagttacaccctcaagaaggagaaaagaatggcaaagtatatcttccaccagactgtttcacactgacacctgaggagaagaagtcattttgtaactcactccgtaatgtcagagtgcccataggtttctcatcaaacatcagtcgactagtttcaatgaaagatttgtcggtatctggttataattcacacgaatgccatgtcttgctcactttgtttcttgcaattgcaataagagccataaaaccggagcatttaaaggttgctatcacaaggttgtgctactttttcaacgcagtgtcacagaaggtcattagtctcgaagagttaggaaatctccgtacattcgcacatgagacccagtgccaacttgagatgtgtttccctccatcattttttgatatgatggagcacctcattgttcacattgtgccgcagatggttgcgtttggcccattgtacctccatcaaatgtggtcatacgagcgttacatggctgttctgaagggttacgtccgaaatcgtgcacatccagagggatcaatggttgagggttatagtactgaagaggttgtcgagtgctgtattgattatctcaaggatggatatgcaagtacctgtgccccgacatgagggcagattgagtggcaggggaacgataggaaagaagagattcgtcacccatgatcacaaatcattccaagaagctcacttcagcgtgcttcatcagtttgctatcgtcgagccatacatcgatcaacatatcgaactaatccgagctaacaataagggtcgctccaccgagtggataatgaaagaacacaagcgtctcttcatagattggttgcgagacctagacttacctgagggagaaactaccgattaaataactatgaagcggttggcttgtggtccatcaactacagtaaattcttggcagggatatgacattaatggattttcgtttagcacaagagcccgagataataagacctgtacgcaaaacagcggtgtccgtgtggaggcaattgatgaagccggggaaaaacaatcatacttcgggtttattgaagaaatatgggaaattgactatgggcacacaatgcaattccccatatttaagtgccagtgggtaaaatacccgaacggggtaaatgttgataagttcggtcttactgttgttgaccttgcgagagtgggtcacaaggatgatccttgggtactctccaatcgcgtggcacaagtgttttatgtgaaagacccttcaaatttgaagaaagatatagtgctaccagggaaacaaaagatattgggagtggatggggttgaagatgtcgaagattacaaccaatacgatagtatgccactttatagtcagtttgtacagaagattaagaatgtcaagacatctactcagaagaccgtgaagccttacatgcgcacggacggtgtgggcaaaaatgttaaagggtaatgattgtatgtaaggtgatgtgtgatcgtatcgcaaattgacgaacaattgtactcaacattttgcatattaatttctaagtactaatttttatgtgcaattaccatttgaattgtgaaaatttagttaaaaaaaatttaaagttagtaatatttgaaaagtgtaaatatttttatgtgcaattaccagtttgttgaaaagatcttcgcaggcggacggcccgcctgcgaagatctcttttactatcttcgcaggcggatggcccgcttgcgaagattatcttcgcaggcggaccgctcgcctgcgaagatctttgccctatataagggcaagcccgcggcgccaaaatttctaagtccaggcgggaaccctagaaaatttggcgccgtcaggctgccgaaatttttcaccgccgcacgcctccgccgtcctccgccgccgccccgcctacgaccttcgctctccgaccgtcgtcctccgccgcagccgaccgtcgtcgtccaccacgctccaccgaggcagccccgtcgatctctcctccgccgccggctcatccaccaccaccgccaccgtcgagctcatccaccaccgccggctcatccaccgccgccgtcgagcgcgctctcctccgccaccggctcctccaccgccgctggcccctccaccgcgcgcacggccaccgccggcacccctccaccgcgcgcacggccgccgccggcccctccaccgctgtcgccggcccttccatcggcgacggccgtcggcccctccaccaccgtcgcccacccctccgctcgcggccgaacggcttcatcggccgatcgtcgtccacgagcgaatacgtcctcggccgtgaacgacgtcttcggccagtcgtcgtccacggccgaacctcgtcgtaggccgttcgtcgtccacggccgaacctcgtcgccggcccttccttcgtcgtccacgactgaagctcgtcgtcggccgttcgtccaacacggacgtgcgtgcatgtgggtgtttccttttatatgtgtgtgcatgtgggtgtgagggggtatatatgtgtgtgcatgtgggtgtgaggggtgggtgatatgtgaatgaggggttatatgttgattgtgaatgtgaatttgggaatgtgggtgacatgttaatgaaattgggagggtatgttcaattttgcaggatatgtgaatttgtcaaattttttaaataacatgttggagggtatgttaacaatttttttaaaaaaatgtggaggatatgtttgccttttccatttttttagtcaacatgtcgatgaaataaggaagtgaattagtgcactacttgataataacatatcaaattttgtacaaatttgtttgtagtaattaatttagcataatagtaagtagtcattattttcgctatttaaatttgtttgtactaattaatttagcataatagtaagtgctagttaaatttggaaatctcttcgcatttatatttgttcatacgacatattgttaatacacagtttatttttgtactaattagtttgtactaatttgagtaatttaaaatgttgacgataacactttttttttatattagaggtttgaaacgatggccgatagtactaaagggactgaagagaagggtttaggggagcaggagcagtcccttgctgttgtggttgctccggaaccaacggtcccaccggatggtagttccgacagcgacgtaggtgacgaagacgaggagtactcgtcaccaagcgatccttgtccaagcccaagcccgaagagaaggaaaaagggcgacggtgaagaaggcgacaaggactacattccccctaaagaaggggtaagtaaacttaatatgtaaaatgttcacagtgatagctattagcccgagctaattcgaaactttcatgcataccttctcgtaggaaacggcgccacgacgatcaaaatggcagccgaagaaaaaagttacttcgaaagacgaggacgtaccggcaaacacaaccggcacacagaaaagcgaacggtcagcaaaggcgaagagaaggaagggtgagagaagcgtaaatagaaaggatgaagggttccatgttgttacccatgttttgcctaaaggagagccgctcgcccctaagacgacacgtgcgaaattcagttcacagtgtggcataatagtaagggagaagatctccatcacggtcaaggactaggatcatgtaacggatggggataaggaagtcctatggaaagagttgaagaaaatattccagttcccggaaggatcagaggcagcggtgagaaattgtgcactgcaaacaatggccaagtcttggcgtggttggaaaaccaccttgaacaagaaatttgtgaagacgggacgcacaccgttttcgacgtatgccaacataacccccaatcagtgggacgactttctgaccttgaagaactccccggaagaaattaaaaggagccaaaagtattcagagttggccaagaagaacaaattttctcatcgcttaggctccgcgggatacgcaccaaaggtggaacagtggacaaaagagaaggaggaaatgaggaagaaggggcaaccggtaccaatggaggagtggacatagagatcaaggaactgggtaagagctagaactccgaagatcacggatgagggaaaagtgtcgtttgaaaatccggagctgcagagcgttgccgataaaatagaaaatttatccagttcacaaaagaaagtatattttaagcctaaaagggagaaagatgtgctaagtacggcgctgggtactcctgagcatgggggaagggttcgaggtgtgtcgagcaagataagttggaaggaagggttcaaaaatgacccccacaagaaacgtgaagcgtacaaggataaacttagagacgaaggggctgcggagtttgaaaggcaaatgatggatttctgcatcaagcacatgattttgcctcgccccgaaaccaaagaaactgagccagattaccccttcgatgacctcaaggagaatacaccctgcagattgcacgttcccattggacgctccggtaaaattcttgaggccgctacagccattgctatccctggtagaacatacaatgaacaattcatacccgatgcgtatgccaaggtgcagccacaagtggtccacgaagggtttgagtcctacgacattgactacctgactgcagatggtatatccgtacttggggatgcggtcgatcttgtaattctctggcacaagaatgacatattctttggattgggcaccgacgccggggaaaaacctgtgttgcctaaactgggtttgggaaaacctccgaggcctcctaagaggaaggtgactgataaggcggatgatccagaacttggtaaggaaaatccagtgccggaagtgccaccggagattgcattgccggagacagccaaggagattgcaccgccggagacagccatggagattgcaccgccggagacagccatggagattcaagtgccggatgtgcccatagagattacagtggcagaaccagaggtggaatttgtggcatcagtcgggtcagacaaagatgaagtaccaggattggaatgggatggtacagagccagagatatttgaagacccttctcctgcgaaagaacccgaggtgccacgagtgattaggagccacgaatccaagtccaaagatgcgaacaaggagaagttcatgctaaccgtctttagagggggtaaggaacgtgccaagctcagagatgacgacccccagaaggcttctgtgctagccgggccaacatacttcgcaaccgatgattgcccggaaaagtacgaacatgggaaagcactcttgccggaatgggcactgaaagaggcaccatgggagatgagaaggttacataacttctacatggaggccagcaagaaaggcttgggcaatataacagctcgatcaccggcagattgtttcggcgaagaaggttacgtatggctagatttctcatatctccacgccatatatcgtcgggataagatgaacgtcaattatgtcggtgtttggtgcatgtgagtacgagttttaattaattagatgaaaaatatgtacaatacaactccatgtgattgttactaacaaacttcttctgtaggatgcaatacatggatgctaagaagaaaaaagaacccatcggcttcttggatccaactcggatatgccaaacacagcataccgttacgctagatccagggtcagaccagctgaagggcaagaatccgaaagagatagcagaatacaagaagggcttgcacaaggagaaattgattactgtcgcacagtacattggacgagccttcttgcactttcaaaataagagtcttcatggccgcttataattttaagtaagtccggtacatttatcttgtacacatatgtcttattttagctgttactaactaattataatgttgttaatatgtagcgatcattatatctgtttactcatccaccctaaagacggaaccatggtagtcttggatcctctcgattacaaacacaagcaatacaaagaatttctaacaatcttacagtagtaagttattatgactcttgcatttgtatatggatgtattacaaataaatatcctccttactctgaaacggtatgacatccatacagtacataccaatactacaagttcaagggtggagaacagacccgaacacgggagaagctgctagtacgtacctattggccggtaatactccactcactttatgtattccaatagtttcactaattgcaaattataactacttttttctatgatatgtccttcagtgtcacaagcaaccgcgaggaacggtcctttgcgggtattatgcgtgcgaattccttagggttaatggacggtacaggactaacgcggaggatgtaagtctctatactatgtactagacagctcttgatatttatgatactaatatattgattaatttcaatgtatgcagttgccaagattagaatgtcgaacaagctttgacgatacaggtatcacaaatgtgcagcgtgatctgtgccacttcatccaccatgagtgctgtcatgtcaaaggagatttcttcgacctagagggtgcccttgcggcaagtgacgaattcaaggatcttcgggagtggaacactgctatgccataatgtaactagatgacgttatttgaagtgacaatgtaaaacaatattgtaatatatatattttggcaacacttttgatttatgcaatataagtagatttctcagtaccaaatgcttgataatattccaatatatgtacctgcaagaatttctaataaataatttaaaagtaatttacggccaaattatatttagatttcaatattttctacctatcttcgcaggtgaaagttttcttttttgcaagcggacgattcctattttcgcaggcggaccggactagccaacgtccgcctgcgaagacccttttcggccgcttgcgataatgcttttcctagtagcggtacactaccgatgacgagctacagttatccagtacgcatgcattgcatcgccggcgccggtggccgatcgacacgtcgggtagggctcgcctgttcctgatcgggcaaactgtcatggtgactcgactggccgttgtactagccttccgcgtcagtcaggtgtcacagcaaacttagcttaccactacagtaacaacagtacagcgtacttcatgacctactttctccatccaaaaaaatcaaaaaatattatgacgtgatacattctattacaatggatttagatatagagagtatattcaaattcattgtattaggataaatcatatcttaataacaggttgttttttttgacgggggagtatttgttggtgtggacagtacgtcgtgagaacgacacaataaaggttcattcagttgtggctttttttaaggaaacaactaagtactcgtggttaattagacggtggtttattactaccacacctggtcttgacaaacttgggctcctagctagtagtggagcggcacgctgtcattattgctcattttgtggcatgcggtcgtgcacgaatcactaaaaaatatcgtaaagagaagaaggcacggaaatttctcgcgactgaggcgatacaaagaaaaggaaacgaaatcgaggagaaaaaaaaaagaaagaaaggaagagggaaaaaaaaaagcagtggcggatcgtaccggtccacgtaccaccagtccccacatgtacccttccacccacacgggcacacccactccttttggcaccgaccacccactgccaggtgggacccacctgccacctcatcaaaccaaccggcacaatataaataggcgacccaaccactcgatcgatctctcctggagaaattccacgcagcagctgagctctcgatctcgccacagagccaggtgtgcgtctccgggatcgatgaggcagctcatccggcggctctcccgcgtcggcgactcctccgccgccgccgcctcgtcgtcgtcgccggggaagcggcggggcgcagggacgaagaagaaggcggcggcggcgggggtgccgccggaggggcacgtgccggtggacgtcggggaggaaggggaggaggcgacggagcggttcctcgtgcgggccgagctgctggggcggccggcgctggccgagctgctgggccgcgccgcgcaggagtacggctacgaccaccgcggcccgctccgcatcccctgctcccccgccgccttccgccgcgcgctcgccggcgccggggatggagaccacgacgacgacggctagacattaagacaaagcaaaaaaacggtgttgggttgatttactactacgtgcgagagagaggcttctgagctcagcattagacaagctagcaaatgacactgcatgagccgctgccttctctgtgtgtgcataccgcttggaagttggaagagacgaagattattaatactagtactagtagttttctttttctctctgtaatgtagctgaatcagctggttgctaggccctagctagctatagatggctgtattataccaccatatagtatgttggaagagtattactgtgtatttctactttgtttagtatgctcttggctaggcaccggtagtttcagtttcccaacgacacatttttcaatcatcaattgatcatgagcagtccaattcacataaatctacggatttgctaaaaaacttctgtaggtttttttttctcctaaaactttcagatttgtgaatatcggaacacctcgagatttatgtatgttcgctagaaagaaattttcacatacatgttacatgtaagatcctagtattagctgaccaaactatagttgaatgtaagttttatataagttatattgtaattatagtgtagttacaatgcagacacaacataattataatacagttacaatattacacttcaattatactatagtcacatctaaaagttttttacttaaacaaacttgcggtggtttttttaaatataatgtcaaaaaaatatctctcaaaatgatctgaaaaacttgatctacacttgcgtgcttaattcgattggtacttggtttctttactttttcctggtggataatttgcattcaggcactagttacagtagcggcagtagtttccaaaagtgactcatcgagtggtgaaaggtaaacaaggcttgcatccaaacgaaggagagagccaattcgtcttcggcctggacgtcgtacgcgcgctgccgttcgttagcgtggctctcgccactttgctttcattcactgcttgtgaccgtcgttagtgcaagcagagatcaagtaatagccacgggttgttagctatagctagctagctaggctatatatatgagtgtaattgtggatttaattaatttgtgggtaacttttggtccgtagctttcaaccgaactattttttatcaggttttgccttttctgatcttgttggctaataatgtgtgttaaattattactccgcagtgtcggatcatggatccaatgtgtgctccattcttttctggagaaagatgacatagcaccatcgtcgagcattattgtctcatgggtacgtgcaaccgcttgtttgaccctaacctctaaatcctaaaagtctctgataaaaatagatgagtaaattgtacgtggacggtccttaaacttgtaggggtgtgtcatctaggtccataaactctcaaaatcatatcgaagtcacagaatttgtcataatgtgtcatataggtcccaaatcgccacaaccccttctggatcctacgtggcgttgatgtggcatgccacataaaatgacatggcatcattttgactgacaaatgggtcccatttaaaataaaatttctttttatttttttcttctctttttttccctttcttctcctttctctgtgacccgagcagcaaagaaaagacaaaaataagaatg

SEQ ID NO: 10277 - DNA, 22222 bp, Oryza sativa
agatagaatgtttaaagcttgttttttttcttggaattttttatcatatgttctctcatttattttaaattttagtcatgccaagtgacccaatcatcttgcaacttccatgccagctttagaaggatagattctattggagcctttactggagggatggagtcctccgttttttagtctgacaagtgggccacaagggacctagatgcctttggttatgtatggtaagcacagtctttgtgtattatattgtacttgtggaataacaaagtcacatcgattggcctaataagttcaagtaaaagtcacccatattaaaaggaaaacttaatgtacaaatacatatatatgtttaaggtagttcacagcgtacgtgttttttttctaacaacacgcacaagaggtacatagttcacagcgtgcgtgttagtacatagtagattactatcgacaatagctcagaactagtttgcatcatcgagtaccaaattactagctgagtaatcgacaatagctcagaactagtttgcatcatctaccatctagagtaccaaattactagctgagtgcctctggtaagggatgcacatgcacaaaacattaaccatgcctgctatgtatccctgttatgtgtttccgcagttagaaataggcaaatagctgagagctcagaattaaagtgactgctctgccatctagctgagagtggagtggtgagagcctggtagtgaggatacagaaaacaacagaaaaaaaaaacttcataatgagtattcagaagaaattaataacgtcaaaaagctgaaaaaaaaagagaccatttgctcttgattaataggataaatgaactgaaaataaaggaaaacaatatataatgacataatattataactattattaccttagtgaaagacttcaataccatcggacaactctactgtcaaagtgacaagtcttctagaacatttacgtacatgaaatacaccaacctgttaaatcaaaaggaatgtttgttgtttatggtatgtaagataagtacaaatacatcgttttaagatacccaagtaggagaagaaatttacctcaacatcaactttagagcccgagtcattacccttctcaaggtgtctctcaccaacacccaacagtatatcttccaactaaaataaataaaatggtagtcgaattactgtataaactaaagtactccacacatgcacacgctatactttgtgcattttaggtcttgtttcgaagactaacttagattttgaaacatccaaataaaaagccttaaggatgacaattgtttgatacctgagttacatttgaaatgttctctccttggcatgagagaataacatcaccaactcgaatgccatgtttctcagcagcacactgagaaaaaacctagtatgaacccagaagagttataatataatatacctgcagaaatagttagacaccataaacaagaagtttacctctcttacaataagaccagaggcaatgttgtatttacgggacaatagctcaatatgcgccatttctagaaaatccactgttcttaacttcaagccaagctgaggtcgaacaagttgcctacataagattatcgttagattgttgcatttattctaggaatatccaaaatggatcaattatagaaaacataagcgtacaatcgctacattttcagcaacgatcaaccatggagtattaatttatatataagcaaggttcttcagaaatttaaacaaacatcttaccctcttaaatgttatgcatacgcaaattaagtttgtactcattcgttattaggcaaaatatggcattgtgtgggtctaaatatcactttaactaataaaatggagcgagtatggtctggtagcgtgagaaaataattaccacccacacacacctcaaaagaaaaaggaaacaggcaagggtatgtaaccaattaagattaacaaaatggcgctcacccaaaatttctccacaatctcatacacgtaaggattagagagcttggtatgaaagcaacaataggtaacgtgcagaataacatccccacaatgtttccactaaaatctgccaatgcacctccagtaccacactgcaaacaaaattggattgagattatatataagtacacctaaatattcagaatataaatatatcattaccttaggaatggaaccatctatgaacaaatagtgattgtgctgatactcataaggatccacgtatttcactctgactgtagtgcaaatcaaatctgttttattatctctagctagcacacacaaattctggccatactccaaatcaggtttcaacggtacaattggtagagtcaactctcccatagtttcaaagaaggcaatatcgaaatgcttgctgaagtacagcaagcgacaatctgaggctgtgtcatccggtatgcgaacaataacctacaataataagtacataaaagagtatatgaaacacttcatgtgaaagacaaaccggttatactattttgaacactatgttagaccttttgattttactaagtacagtttgaactaaagagagagatgaggggggacaaggtacaaatgtacttagcattgcaagcacggtgaccagaaactagatccttgattccaaggtgctacaaggagtaagggtgggcaaaaattagccgaccactagacaacgaaccaaatgcttgttcggcttacgttttttttccttgttttttttttaaattgtcattggtttgtatctttacgaaccgaatactagacatgcttttgggggggttgaaaacccttcccctctagcactcaaaactgagcgatagattatcaatgattaattaagtattagctaaaaaatttgaaaaatagattaattaatatgattttttgaagcaacttttctatagaaaattcttgtaaaaaatgcaccgtttatagcagtttggaaagtatgcgcatggaaaacaagctaatagaagttgggaatagggagtaaagaacacgcccttaacatgctaacaatcacaagcatgctaagcttctgaagtgttttaccttagcctcaggagcataatccttgtatgaccaatcatcgaagggtttctttgtgcaaataatccaagcagaagtgagaattatagcagttttttttacatcatcccactcaacaacaataccagtacattggttaatctccgtaccatctgggcatacacaaaaagttagcagaagcaaccaacattgccattagagatggaattatacacgagatgaagaatatacactaccgtgataagctgaaaggctcacaacagatttggaagcatttaggaatattttcttctgcttggggctataacattccgtagtacaagaggaagcacaagatgatgaccttagtgtcggtaattgttcctgacgagctacaacaatgatatggtgtataagaaataggtgagcttaaattgcgttaaattgaattaactttaattctttagttggttctacaagcatgttgtgggttatattaaattgaattggttagattcatagttgatttcataagtttccaataaataaattgtgaaaaactaaattggtttcacttcctagttgatttcatagatgtaataaaacggatgaaagaaagtaaacaaacctagtttctcctcgtacttgcgataggcccagtgataagcttgtgcagctactggatcatcagtaatgccatacaccacctcaccggaaggagttctcaagataggcacgagtggggcctgcggttcacgaagtggagagctatctgcagaggaatccgagtcttgctgatcttgtgctacctcccactgcttctcctctgaagctatggaggagtcgttgaattgcgattgaggtgttgaaagtggtagatccaattctgattgtttggactcagttgcctgtggatcatatgacattgtcatggaatcggctctacgagggcgagcgaaccagtatgtcggaggagcctccgtaacagcggggaggctttgcgacggcgacgcccgcgatgatggagcagggagttcctcccggcttggctcctccatgctagtgcctccacaagccggcgacccgcatggcgcagacgacgacggtggcatggtagacatacctggctccagcgaagggggcaacgaaggcctctcctggtcctcgtcgctcgccgctcttctagtcctggaatccggcaccttggatcctggtcccgatctcatcttcgccggttcggatctcccgcagatcgcagtcgagggccgacggccgaggaggagagattagacggaggcggcggttcggagcgcccgcaacccggcggctaagcggaagggagtgctgaaaagccaaagcaaaaggggcgctttttatttgtagcgtcaaaccttggacttcgattggaataggtattcccgaatacaagtaacatttttatttatacttaagaaaaaaaagtccgtgcgttgcaacaggtgaatgctattttaatcttattattgttatacagtattacggtttagttaaggtgaaacacattgttggaatttgcttggatattttttttaagaaaatcatgagctacaattagtccgacattcatctcaagttagcatgcgtggttttttaaagagatttcttatacgattccttttatatattttcaaaagcaaacaaatttaaaatccgactcaaacacggattgtatttttaaaagcgaacaaacttaaaatccatctcaaacatgtatcagtatttccaaatgcaaacaaacttaaaaacccactcaaacacggataacgtaccaaaataccggcaaaaacatcttctgatctctactattataaaaattgaaaatgttttcgtcagtattttggtacgtcatctgtgtatgagtcggtttttaagttcgtttgttttttgaaatatatatccatatttaagtcggtttttaagatcggttcttttttttaatacagaaggaatctctactattataaaaattgaagatgtttccgtggtccgtcatctgtgtttgagtcggttataaaaattaaagatgttcccgcggttcgtcatccatgtttgagtcggttttgattttatattttgattttaatctatatctcttctctatctctatctctactattataaaaattgaagatgtttttgccagtattttggtacgtcatccgtatatgaatcagtttttaagttcatttgcttttggaaatacatattcgtatttgagtcggtttttaagatcattcacttttggtaattgtcggtgacatgggaccgggagtatcatgactagaggcttgaggcagacacaatcgcccacgtggcctggcaccctcggggggcgtcgggcccgagggtgatgtgttcgccctcctctttgtctccccgagggggtcggaccgctcccgcctcggccccgagggccgaggcgccccgaccccttgtgggttttgcgccgcgtatatggggtaggtgagcatagcggggctcacctaaccacatttattgcggtttggacgagcgcgtcacgccgcatgtaacgcagtgcagcgcgctcgtttatccggtcagtgaccagtcacagaccgatcagatcgtgggttaggtggcgacaggcggtctgacgcacgcctcgccccatcccgtcaggacgagagcctccaagcactcgtccctagccggagccggcgtgttagctcctggggatggcacgttggttccggtcagatatatgccaggcttcatcctaaccattataggcaagatattgtatgaagaagggcgaacatgcagattgttaaactgacacgtggtggacaagaatgaccgatttgtgaccggtctgacaatggtcatgtcgtcagcagacagccatgttccaacgtcgcgcctgcttccggcggaagtggaggtaggtatgggccgtcctatcagaaggtcattcggacggcagccatacaaatctccgtccattaatgaagagaagtgaagttggagggaagagaggatgagtccccacacaaaagaaagagagggagagatggtgcatgtggtatccccttgagatataaaaggaggaccttgcccacttagagagagggaaaaaaacgatcccagaacaatcgggggctggctcgcactttgtagcttcttcatacacagatccaccaaaacacaggagtagggtattacgcttctcagcggcccgaacctgtatacatcgcccgtgtcttgtgtgtttccactctcgcgaactttccacagaccaagagcttagaacctcacccagggcccccggccgaaccggcaaaggggggcctgcgcggtctcccggtgaggagccccaagctccgtcagtaatacagaaggaatcatataagaaatctgttttaaaaaaaactcgcatgctaacctgagacgatcggactcctaactacagcttatgattttctaaaaacatatatgtccaagcgaactcttacagtaaatttcatcttaaaaaaatcatattataacaataataagattaaaatagacttcacccgttgtaacgcatgagcatttttctagtagtatattgaaatgtaattatattataactatattgtacactataacttgtattaaatcgtacaaagtaatatataaaaagaaagagttcaccctttcaatcaaacatatgaaatttctactgctgatcccgtgacgttacctggtcacgctttccccgccgccgtgacctccgccccgccataacacccgttgcgacttagggccttcacagtgcggtgaggtggcattctctcttgccatcccacataggcaaagcttaagggcacatgccacctttgcatctgggcccaccgaaatgaggttcttgtgtccaaagaaggccaccggttcttgggagaaaaagtagggcgtgtgaggatggaaacagcactgtggagcaagtggcatcggagtgagcgtcgccgtcctctctttcctctcttccgctggcaccgcaggaaggcttggttgcgacgggcgccacccatcctctcatgcctccggcggctagctctgaactgggtaacacttcagctccggtcgaacacccatcgtcgggcgctcactgctccgtcacagccgccagcgaccatcgaccatggcacacggcctcgacgtcacgcatatatatctgcccgccgtcacctgtctgtgtctgctcagtgctcacgcttgccgtggacggagcaaccacttgctgcaccattctccctacccatccaccgttgcctatttctgttgtatgttctcatttgcacattgcatggtaggttattggtcaaatgcttactcagatgatccaatctatacgttctcacactaatcatctataaaaacttcagcagccaattcgtggtgttagaattgttgaactggcgtctactactcttcattaaagctgcaacaacaatttcagctaccccttttggcagtcttttgccgtctttcttgttaggccccgtttagttcccaaaaacatcacattaaatcttttacacatgcatagaacattaaatgtagattaaaacaaaaactaattgcacaattagaggggaaatcgcgagacgaatcttttgagtctaattagttcatgattagttataagtgctacataaacctacatgtgctaatggtaaattaattaggctcaaaagatttgtctcgcggtttccaggcgagttatgaaattagtttttcattcgtgtctgaaaaccccttccgacatccggtcaaacgtttgatgtgacacccaaaaattttcatttcgcaaactaaacaggcccttagtcacaatatattattatttgatcgtggatcccctcctatcattcctctctttcttctgttgataaaattactgaatggaagacttttaacaagctgaccatatatttagtaaaatgttgcctacacgttgctaatttgtttcattagttgcttcttattgttctagcaacttacgtgtgaaagcatcgacaaactagatcttttttcttcagattttcagaaacatcattgagctccatttagttgtgccaataattatgaatcatcagcgaaacatttgatgaatgtatagtactgaacttccaaggtaatatctccattctccacctcagcatagaaccgtatactatttgcttgccatgaatgcagccgtcgtcttcacttctttaaccaaaatgtttgtcattcagcatgcacaactaggggtggaaaaaaaaagggaagttgaaataaagtggcaatttttggtgagaaaaataaaacatgttcaccatttcaattcattaatccatggttctcttctccatttgtaaagaagatgcactgtagactcaacaactgcattgttccaaagttcttccggatataagcattgaaagtctttttcatggccatggtctcttacaagttaatttgtttctccaggtcgaacttactaaaagtagctgtgatcattattggaggataatttctaaacgtcaagacctgaattcttcattttttttctatatataatgtgtatcaaaattcccgctaataattgacatacataattgtttggttaaatatttattatgacctagatacccaagttatgctccccgatatgtactagattttttatttatgtaacttcaagttgcctgccgtactgctttgaaccaccatccaaactaggacaagctcttccaacagttttaatttaattcaggttggcaagtcactaaatcattttttatgaaataaaccgtccaaattaactaggacaagatcttccaacggttttaatttaattcaggttggtaagtctttaaatcatttttttatgaaataaacaatccaaactaggacaatttccgaaggatttacatggagttttggagccaagccccaggtcaagcctatgttgtcccaatcctagggccgcccccgataacaacccacgtatttatttgtaggcctaaatggtgaaatgttctgcttcctacaaagcattataatatatattgcattctatcttcattaggcctcgtttggttgtccgtgtatattatacatgtgtgaatagtcctacctgtgtattaagtgaatccacaccacccacccaatacacagcatgattcaatacacagtgtgggctggtggttcgactggtgatacccagggttgactccacagcaagtacgtagtgctagctaagctagtggcatgcatggagagtcatggagagttgggcacagagctaggtttaccttttaggcctcgtttgttaagaaaaaattaatataaaaaatacaagaaaaaccattataatatatattgcattctatcttcattaattggttgtagacgcaacaattttagagcatatatcactctattgatttttacattagcattacaaatggatgaggaagtaatatggaattttgtttatattttttaaccttctaaattttttattttaaaactaaaccatttcaaaacttattttcaaaatgaaccttttggccacaccagtccgcttgacgtaacaaaacaacactggcaagacccctgcagcgggcatgatagtattgttttgtcacgctagtttggttggcttgtcaaaaggctaagatcttgaaaataagttttggatagatttatttttaaaattaaaaatttaaaaggttcaaaaaaaattaaataatcttaatatggctggtgttcttccttgatcacacacctacaactttcccatgacacatcctatggcccacccacctccgttcaacaaaacaaataaccgtacatgcatgtactttgcaagcatattttgtgtgtttgaggctgcttattgtttagtttgtttggaacaagtttattggatcgtgtgcaaatcatcctggtagattaataactcatattgcgctttatttgctaatatgtttgaccacttatactattgcacaaatgttttgcttttaaaacacttgtatttgccagcttactctgattagatacaatttttttagctatgataagttacaccaatgcattaactcgaatattggtttaccaggtcggcaagtgtcagcaggtgaaagaaaaaatttattttgttggtgttaagttcactggaaatatttttaactgaacttttatttgcttatcaaatcctattcactgagcaacgagactgatagaaggcattcagtgggtacgaaatgtcgatctagctctaaagtttcagaaatcacatcttactatatggagggattgcttaatgtgtttttggtcactcactattcattaagttcttatcgtgttacagaagattggatgtacatatggcagaaatataatgttgtcatgtcttcctacttatccttggatgataattcacaaatctgcatcaaattcttaagcatgcagttcaagcgatgatggtggccacaactggagattccggtggtagttaataatgtaagaatcatagttgtttactgacaattcctataatgcaatacatcatcaaattatttagatagaaaagcatttttttgtctaaacaatgattattgccgtttatctctctaggttcaggccttgaggatcatgttcaggactctgctgccttcaatttgttccatcgataattgagcgctttaatttgtgcactgttgaactatatacgagagaattttcaaccgtccaattctaacattgcagagaagtctaaaatgtcagtagtatgcttgtaattttgttgttatacttggtttgctttattgacatttcaagtttaaatattattctctgtaattttgtagattctataaattgtaaattttatttcatgtatttttagtatgtttaaatatgttgttcaaccttttagaaaagaaaagacaatgaggattattggattgcaatcaaatggaatgtgcaaagtaaatatattattggaaggattagatgttttaatacgattatatatgaaaaacgtgcattgtacgtgcgtgagtactagcaatggaataggtaagggtagtaatatatacatgctgacactacggtattatttcgatgcaaatcaaattaccataagataatatatgttttattaaacgagattgatttaaaacatcaaaaaaaacagtaacagtgagaaaagttattttgttgttagtatctccggttataaatatttgacttttgctctcatataaaagaaaaccatacttacttgacctgcttgataacatgaaccatttgattgttttttcaagttccaatgaattcaagcaatattataatttttggatttctatccactgggatcccgtcgggagtcgggacgggacgggatccccgcattcccacatggtcagcaaatgacttttcacacggaagcacgaagaaggcgtcgtacgccttgttggcctcacgcgctcccagtccattgctgccaggagctagaccatcgtggtcgcgagcccgcaacccccatctaccgccagcagccgaatcgagaggagtgtctccattggtgcccagcgaactcctccatgacctccaccttccgacggttgcccctattcctccttgtgcttgctgctccttgtccttgttatctgcaattgcagggagggacaatgtaggggagcatcctgctgctccccctcttgtctaggattgcggtaagagaagatgggagattgtggagagggaagatggggagcgccgccatcgccctgggggaggacaaggagcagcgtcgtcttcgccacagcaatgctggtaaccatctccatcccttcttctcttccccctctcggctcagatttgatactcgattggtgccatgtctaatagcggtaggtataggcctaataccgatatgtatcaactggcaccgactggggtattagctagtaccgatgaggtattagttaatacctgacgagtatcgagtgatacatatgaggtataaaatctaataccaacatgtacaggaatctgatacctgcttggtatcatcctgtctggacgggatcacgctgtatagcagtctcctattatttttgataaaatttgaccattttctaccgtaagtcaatggtttcaaaatggttttagcgaaaaccagaaaaaactggtttttggatcgttaaggatttcccccaaatagtccgatttttcctccacgccgataaggagcgattcctgcttcattcaggcgagttgcagcctgcaatccgaactgaggacgggtttttggagttagctcaccctcgcgagatcgcgacagcagagtgctttcgccgttggtgttctttccgatctcaatgcatttcaccggtccaaaaattcttatctttagaccattctgagccatttacgaacattacggcaaatatgatcaagacatttatagctcccacataaataagaagttgtgccacagctataaagtaggaattcaataaaatatagaataaggatattattagaatttttttgttagaatccaaaagttctttactaactagaaagaaaaacgaatacctagtgcactaccaacccaaaaatcccaactctgccttacgtaaagttgccagagtacgattaacctctggatcgtaccattcgagccttttttttcatgcttttcccggcggtgacctcctccagaccagagaggagagcaatcaaaaaagaaatattactcaatcaaagatccaactgatccccatgtctgtattgcaaatacgcatggtttcgatgtgcaaaagcaaaccatttctattggaaacattcctataatgatcgtcgagaggaaaacagcccggatcaccagctaaggcccctaaatgaccgcttagtgataaaggaggtgggggaacaattttttctcagttgcaatatagaactaatttttttgttaatttaggataagataggtagaagttgtaagtcttattgcaggaatactgtacttttcataatagaatcccctttttttatttattatacggatatacgttccttttagtttcgactttagggataatatttttcgctatcttcttccgagaaccacctaaggttctgactaaaaaagtgaaataatttaattgaagtaagaagtctccccatctgagagacttcttacttcaattagtccccgtctgctttgcattttaaagaaaaagtacaaaaacatatttattccatttagctattgctattcttttcctgatcgcaggtcatatgtataggacccgccagcgttcatcctgagccaggattgaactccccaaaccaaagaaaaagagaatggaagaattcttcccttcaattcatagttttcgaaatctttttaaaagtggattaattggacgaggataaagagagagtcccattctacatgtcaatactgacaacaatgaaatttctagcaaaaggaaaataggaaatcgatcaaacgatcccaataccgtgaaagagaaactgcacgctctaccactgagctaatagcccgtcgtgcgggcctcccaaagggaggcctgctacgccaaaagcgagaaaaaccccacccctttccttttgacatcctcatgccgccggaaggttaaggaagttggtgaactgatgacagggaagccggtgaccgaagccctggtggggaggtcataagcgcctataccgtaaaatcgattttcgacggaatcaaaaagacatatctggtagaatcataaccatagaatccaaatagcctccgggttttttcagatttggcaagcatccggaataactattcactcatgggatccgggcggtccgggggggcaaaggaaccggacatgagaatttttcatcatccggctcgagcaagaatgaaagaaataaagttttgtaaaagcaacatgaagaattgctcagatgcccgtgagcgaggcttacttgggtcgtgtcggctccgaaaacttgcagttctccccgtcaatcctcgccatgagtggaactccgaccataacataattgacagatccaagatgtgctccggtggcgtatttttttaaaacgaggtcctcgataacgggacatgaagacgatctattacattctaattaattccaattatacaaaaggttcagatagactaagcaaaaaagggcttcatttcgttggaaaatcacatattcatttccttcgtatgaacagaaaaatatgatgacttaaagaagttcactaccacgaaccaatttgttcttaattttgtagcttgtgactagaaatccactgctatatccgattataagtatttcacatcatcctgcaatgcagcagattgaaaaaatatttaacttggaaacgttcgaggtggagtatttgtttacagttaggacaacattacgaagacatgtagcagtgataattaaaaaaacaggattgctatatggcattcgaataaaatttggggatgaaatcttacaaattttggaccattggatccatgccaagattcgtgcatcggcatctctcctccaactccggcgggctccccttcttctccggtaccggtgacaccccaactccggcgggttagggtttggggttggggtgagggtaggaggggggttgggggagggggaagagggagggggtttcctcggggcttagagggatggccgtggcgggggaaggactggcggtggccggtggactccggcgggcggcgaggcggcggcagcgccgccgaagctgcgggaatgtaggaggccggtgggccggcgttgccggtgggggcaaagcaagtgtgggattagaaggcgccggccggtggtgcggatccagcggcggggagccgccggatacggggaagacggcggggcgggggcacctcgtcgtcgccgccatgagaaagtgaaggggaaggggggagggggcttgccggcgccgttgaccttttccggccagccgcgaggcgagcggcggcacggtggggcggtggcggtggtagcggcgacggatcgtgcgtgggacaggaggaggagggtggcggcgtgatctggaaccgaggggaggaggagttagggttaaggggctgcacgaatcttaaagtacatccaatggtccaaaattcgaatgataggagttgggattttctgtcacataatatatagacagcctcttaaaaaaaaggacagaacagaaaataaagtatgattgtggcaaggaatgcaacacaatgcagttgttaacagatctagacatctcaaacaatatgtccttgctaaattgtgagggagaggtaactggaacctgaaaagatgtgaacttgagttacatgctatatagtgagggagtctactacgttgtgaacctcgtctattgctgttccctagattctgtccaagttattctctagtagactttcagcaataaagactgattagtacaagttaagtggttcatcttccctgcttgctccaaatcctcaatggtcaatcttcttccctactgtagcctgcctgttcatctgagaaataaaactgcagaaaagtcacgtaagaaatgaaactgcagaaaaggctatctgtgacttataaacaatacagatgatgaccaagcagtgatggccgtccaacatattgtcaggtaataagagaacaaaataaaaaaatgctactccatggaaatatgcaatccatcctactaactgctggctcattgcttttattttccgtctagtcaaaaactaattgcctgttagccttttgaactgcggttcaaccgccgggttcaaggttcaaccggtaaaccaaggagtcaaccaggtcatccactgatctggtttttcatactatggctgacgatgatgggggacgggtggggccaccttctactcgttgtgggacttcttcggggaggatacgacaacaatgggcattgcgtcccaggacaacatgcggtgcctgctaaagcagtcgaactaaccaacggtcataggaggtagtatttttattactagccccgtttcagtttataagacgttataattttagttaaacttagtcaaatttaaaatatattgactttaacttaaccaaagtcaaaacgtcttataaccttaaacggacggagtacaagttatagaatttaaatttaaattatatgtttgtgaaatgatatattaatttgaatctatcttgtttttttatttttttataactatttagttgatgtcaccagtggaagagatcagaccagccgctttgagctaccattttcagacggcaagaaatcgataatctgacttaaaatcccaaagagaattccaaacaaaggggatcagatattcagatgttcaagtatactagcctagttgcgtatagctaagcagaccagataagcttcgggaatccttgcgtcgggcacacatgcatgcccaatttaaaagaaaaaatagtttaaagtggtttgcacgcatgcgtcacgtcagcgcccgatttttccactcctccatcaggcgcccgatcctgagttgcgtccgataagcttcatctcactgaaaatttcaggtggcgcgtaaaaaggggttgatgaagggatgaagtttctttttctttactatgatatccttgccttgactacgccagcttgttacgatatgcatgtgcctgatggcttcctatcttctttcatatagagatatgaacagattactgaacatcaagcagtacagggcaacaaagctacagccagcaaacactcaagcaataagaataacataaataataaaaccaacacataaggagtaaacaattattaaagtttatttgtgaatctttattcgtagtagacaaaaatctgccagacattcatatataggaaagaaaggacaggtggccaagaccacatcatgctcagatctgcacgagccatggaatgttacctcatcactgcttctcagccatgaccttgaccagctcttcagcatcatcaatcgccttcgaacacctgtgtgctaacagggaggacttcccaacctggtaggccactcctgatgccttcacctgttcttctatcttgccaaaggaggccacctcttggtgtgcatacaccacactgggtacagttcataatctaagtgaccttttcctgcgatgaattcaacacaggcaatggatcttcttcagctttatgtgcaagcatgggtccgggtatagcatccccagttgtgtggacacgcttaacatttgtcatcaacaacgtccagaatactctgctctccaccagctgcaggctccacagttaacttgacacaactaccagaggcgtcaaccccaactaccattgtcttaagcatgaatttcattttctgcttctccagcatatgcttgaatggcttcctaatttgtccatccattgatgggacaatgtcagaggcaaattcgacaacactaacctcagacctggcccgttccagaaagaaccgtctctaaacctatgtatccagctccaacaatcaccaatttctttggtatttctgaaagaaaagagcaccagtaggcagtaggtgacaatctttttctcatctattgtaacttcagggagagattttacatctgaacaagtggcaatcattatattcttccctttgaagattgtgctacgttaccgtgcaagtccacaggtacttctgaagggtacaggaacttccaaaaacctctggcatactcaaccttgttcttttttagcaggcacattgtccttttgtgccatcatggcagccaaatctatttgataatttaatcccatggtgtgcaaaataagactttgcctcactatgaatgcagtaaagcctgaaatcatgaagaagaatcccaagtcaggtgcaatgcaatagcaagccaaacaatgcatttacaattagcaggtctcgaaatatacccatcttccaacagagaaatcaagtaataatttggtaactcagctgggtttccatcagcattttagcaagaacctcgtgatgtatttatctggctttaccaaggtttacagggaaattttgttacacctgggtaaaaatactataaatacaagaacaataccgaataaggtgacctcaaatctttatatgtttcaatcagcaggttgccagaaaaactaaacaattaaaatgaccttcaaaatggtaaccatggcacaatctaatggatgtgcacagtattatctacacttgaacactatttaaagaaaacacttaacataaagatactatttgagaaaagatcacacatcatttagaagaaagagcaagaaagtgtcaactctaaatgagagaaactgaaaccatgtaactattgtgtaattttgtgatgtgccttcttttcaaggataatacaattgatgttttttattccaatccatcccccacttagtgcaattaaggtattttcctgccttcacgctttgccacgtcaccccttcatttccatccattggattactttgattgacggcatcggattgcatgcccgagcatctatttcattcattactgtctcatacccagcaaattaaacccagcccaactttcctacttggcccagcccatctcactggctatcgtttcacttgcactatcagcgcaaaaggtgtcccccctgacctgaaacgatttgctgcgcccgcgctatcaaattctgtaacagctaggagttgaagcgacagcaatataatataggccatggccattcatttccctcaatatatatgccttttccttttcctatcaaatatgaggccatgaccaccaacgtgctctcaggcactcccagaccaatcaatcttcatcacagggagaaagaagagacaagatgatgagcttccacagctcaactagcctctcaggatacgccaccacaggttcaaatcaatatgttttagtcttattagttcaatcaggtttcttcatatatactggcccttccagttatgtgtatatcctatggtgctttcattgtcagatcctttttcttcttctcaagcaattgaagaatgcaggaaacaagatcatctgttggttcactcataggcgaagcataatggctatatgaggtggtaaaactcttaaatttgatggaaatttttagtttgtcaaacttctttgatatctgaattttaatagcgatctttatatgaatatgaattatcatctttatcagcttttttttctatctgtatttgaatgaccattttatctggtgaaagtgtctatcttacctttactgaacacctaaacactttatattcatgtgccactgatagagatgtattccatcatgcccatatttcagcttggtaatctttgaattttgaaagtagcctgctttgcctcctgagagagatgaagactgaacaagtaactgaaatattgcattcatgaggcacagatgtggggtaaatccttttttttccttttcagttccgatgacttacttgaacaggaccttctgctaacattcttataaagtagttagtgtttaagttatgaatcccctgctatgaattggttttgctaactctgttattcgacttggggagcaatgtactccctccatttcaacatgtagaataagacgaatggtcaaacattgtgcgaaaagtcaacaacgtcatacattttgaaaagaaggtagtatatgattttgaattattatcgttagcctagttctcacagcatcactaaacatttttctttcctataccaagactgatcaatgctagattttcatatttagatttttttttctattgcccacagcaatatctacactgtcagttaccaagatatatatatcatccgattccacaactgatttttttaaatgttgaacaaaaccataacattcacaccaaaaggttgtcctaaagcaatacaccgttttgctttccctacccactattgttccatgaattcccacagcaatgcgcaggataacttctagtatattataaacaagcgagcattgtattggataaatataatactgcattccccaccaacctttgaggccaattatctatcactagcttctaggtttattagaacaccaaaacaacgttccaacttttgtattgtattggataagttgaagccacgatatttctcctgccatacctgttccaagtgagatatgaaccttatcacctaaactgacacagatgagatccattagtaaacttcccagcaacatgctcaataataaacaattaaacatccctacgtctacaaagtctcaactattttagctaagaggaaggatgcatttatgcagactagcagtttaataacagaagaaatcacaagataaacagtcagtttactcaaagaggctcctatataatttttttaaaatttggtatgtttgtcaaacacctcatgtggctatcagcaacatatactagcagaccccaaggttaccacacactaattggatatgagagtttaaaaacaacttctaactggagtgtgagagctaaatggggaaaataaaagaacttcgaatttgttgtgcattgcaatcagaaatttgtctcccagaaataactccatcctatttctaacaaaatttatccctcattagcatccagttcaatcacatgatatgacaaagttaaacaattgggagtttggtacccaaggcatttgtcacctcccaggtgaatctattaactcagtaaaatctttctggtaaaagtgcgcattactacaactactatatatagtaaattgcagacaacactccatgcttatgagtagatcaagttatttaccagtcaatggactggctaaactctgtcttttctgggaatgcaattagccaattacacattgggtgtttgggacccaaggtttgtatcacctctcaggcttccacaaacagcagcagagaaaaagaaactgaaactacacccacagtcccacaattagtgctactccaaaccacccctagcgcaagttatcaccatgaagagttaagaaattgcataacctaatgatcacaataagtagaaaccataacagaattcacatctgcacactaataaatagcttggtgagaggagccaaacgtggcatttagatggtcgaacttttctttactagtatttcagatggacaattaaaatgtgcaaaccgtcccactcttctacccctgtaccgcatcaaacaacactacagcttacgcacctgtacaccgcaaaatcctaacccccaagattcgttgtaaagtgctcaacacggtcacggatcgacgtgctcgaatttttaccaatggacatatagatcgcgcacggagacggcgaatggagaacgcaataccttggaggggaataggggatgcatccaacgttgaggcaggtgcccccgagcttgcacctaatcttgatgcgcggtaacgtcggcagggagacacagttcgtggtccgcgttggacgaacgcatcgcctcgccaagcggggtccgtgtggtccgtggactgacagatctagaggatggaagggccgcgtttgaggggagggaggcgggggtgtggagggtggggaggcgggggtgtggagggtggagaggcggcagccggcagggccgggtcgccgggaaagacatgcccggaggatctcgtcgcctggccgccgaccaggaggacgatgacaatgacgtcccgccgcctcattaaaaaaaaacaaaaacaaaacttgggtttcatgtcgatcgtccgtattatttgaaaaaaaaaatataaaaaaaattaaaaagacaagccacgcataaagtattaatcatattttatcatctaataacaataaaaagtactaattataaaaaaaattcatataagacgaacagtcaaacgttggacatggaaactcaggatttgtcttttttttagacggagggagtacttctctactgctgctaaaatgggccaaagcctgagaattttgttccatcaatagagaattttggtcggtttaacgcgaaacggctaatgagcgattgctcgtctggcaatggg

SEQ ID NO: 10278 - DNA, 91111 bp, Oryza sativa
tgaatattttcttcttcatatattgctagaaaattaatgatgaaatatattcttttgataccgtgtcgatgccttttatctcctacataggccttcaatcgatctggctgactttatctagggcacacaaaatgatacatgtcataaaaaatattaatcaagtattaagtattacaaaattgaaaataggtttatttgattttttaaaaatacttttgtatagaaagtatttagaaaacacgcatcgtttagttcaggaaacttttgtagttcgggaaacatgctcatcttaaataacaaagtagccaatcagataagcactttagaagtcaaccttacgtactaaaacacttaatatgtagtatataatatactttgtcaatcaggaacaagccaaatatatcaattttatgtttccactaatcccatgtatataagttatatatagaaaccactatccattaatcgccaagtcataatggttatgaggcatccatgcattgtgcaactaataattagctgataaccaataagcacgtgtgttatgaggcatctacttctggtgaggttatcgaagaagccacgccgctgcagtgctgcttcacaccatcccaccaaatctcttcaaagtatttattttaataatggtataaaatggaattgtgagcactcatataaatgtatgcacatccaaattataaatacaattacacacctaacatatcagagaaaaatatttatcaaaaaaggaaaaagtacattcgtacatgagactactattcgctagaaaaaacatacatacttacgataaaaaatatcacatggaaccacattatatcacttttaattatgacattctcatctaaatagtgttgataattagcacaaataattttgataatatagattattccatcgtatattacccctgaatatgcatagatgaatcggatgtataatgaaagaaaaaacaaacacatattaactcatatttttgcaaagaatgatgataggcgagttcatatgtaaccgggatataaatatttctttaattattattaatcaattttcttataaaatatggtgagatatgacttattttagtattctttttataaacaataaataaatttcccgcgcatctgcgcgggtttttttttctagttactgtataaaagaggcagctgcccccacgatatatagttgtgcttaaccaaatcaaatctgacagtttgccagataacttttacctacttcgcagcatttaggggcataatgttcagcatcgacaaatttcaataagctgcagaagaacaaagtgcacactgcgcacaggacaatttgttctggatttgacatacaataagttcagaactcagaatatatcgcagttggacatacagttgtgttgtgaagagaattcaatgccaagtgaattgttcaaatattcatgtcgaaataagagtacaactctagagttgcaacacagtgaaaagtggagatccaatgcataagagagatatatcaagaggaaaatgtgggtaccattgtaccatctctctctggggtatcattgtacccatcagaattaacaaagatagtgaaaactgagcatctgattacaaaagaggaaaatatccagagttgaataaggatgtaccatctactatactgtggttttttgggatgtatcagcaggaaaaagagacctagtataaggaatacaactaacatgaagtttctgcagcatcagcattcgataaaaaaacattctgaactgcagctgtatcacattcatagggacaaaaaggaggcatatgccaaggcagacaacgctcccgttgatccaggcaaataggtatgcaccagctgaccggcctaacagtaatcacaggtacctccaggtagacactttcttgtccttgaaaatcaatagcttcagaaccaaagctgtaaatcagtactttgactgcattagaagaatcagagagctgttttgttgtcgatgcaactcacttatgaacactctcattaacgcaaattctgtgatagaattttgcgcgtgtataggaattcgtaaatgtcgtcatggcttatagcatatccctttccttcaatccggccatgataaactgcaaggatatcaccagcatgattgagtataggtgagccagatgctcccttttcaacattgatctttagctctataaattgcatattatagcctttatctctttctgttgtcagttggttgaataagcggcattgatttgaaacttgcccaatgacaacagtatcaggcctattaggtggccaggagatcatgaccacatcatttggtgctgaggatggattttctgcgagctttaatgactgatgaggtaagcgacatctttgagcatactgggtggcatagagtgtggacaaattgaactgaagcaacataagatccttacgctgatcaattttcaaaacagttgctacagtgtaattccgcttatcacgctcagattcatacaagtcaggatggatagtcttcatgtgatcttcattgtgcttgcagaggatgagaaacttgaaccacctgttggcctgctccttactcagtacaatattggctgaatagaaatcctcgaggatatgagcacaggtcaaaatgtatccaaaattctcatcctgataaatcatagatccagtagcaaagaagggctccttaattgtgccttctgcttcagatggtttcatatggaatttattctgcaggtgctccactatcttagcatggcagtgaggcactctaaccattttcacaaagaatattgattccctcttctctgcatgcaccagttgatgggcaatatgggagaaccggttgggcatgtctggagctgccatcctaaatgtggtagttcatgcatgttatacatcatataacacaaaacatatgtaattcttgagaaaaaaaaaacaaagtacataacaaacaagtacggaatatattaagaagatattctcaagattacaagttgtgtgtaagcaatatatacaattttaggaatcaaaatgtttctctgcgaacaagcaaaaggcttacgtgtcattatattagcaagagagcaaatgagtttacacccggcatcctactggcagcaggcgccaaaggagaggaaaagaaaagaggattacacttaggtagacttagaaaaaacaactaagactccggaatgatggaatcaagcatatgcctaagaaggccctgataccacaatattgaaggtaattcttaaaaccattaaccttggctacgcatgaccaccaaattcttatgaggaataaatatgttaagacaaataaccaaatatgcttaagattgatacaagtttgtaccactgacagatgcatgctttaataatataccaccattcaatgatccttgtaaacaaacataccatcagcccagagaaaaactagaataccaggcatcaacagattactctgttaaaaaatgtcactcctgcctacatatctggagactaattgccacaatgccactgtctggagacaagcagtctaggaatccgagggcccaacgaattgtgtttaaaagagtataaattaaagtccactctgcctacacatcaagaggcaagcactaaactattccacattccagaagtaactgcgtgttcctgcgatcaaagtggtaatctaactagaagcaaccagattctaacaaggactccatttaagaggcgaaccacacacagatgtatccctctttcaacaatccgaaccaaacaaactaattagcacgagccctagattcagggcgctagaagcaaccagattctaacaaggactccatttaagaggcgaaccacacagatgtatctctctttcaacaatccgaaccaaacaaactaattagcacgagccctagattcagggcgcggtcgcatcagcgcagaaccgatcccgcgacagcaaaatcgacccgcgcccccacgcaatgtgtgaactgaatccccgtcacgggtacacccccacaaccccgcaaccgcaagcaagcactcgtagggcacgtcggctaagcatgcagggttagagaagagagctcacccgcaggaaccacggcgccggcgatacctcgttcccctcgctaacaaccgccgcggagaaacccgagcggagagagcaggaggcggtggcggcggggagcagaagcgagaaaagaagcggacgccggagaggacttgcagaggaggacgaaccgacaagactcccagactttagagggtagttagagcagtggcggattaatctctgttgcactcgctgatatgtgggccatgttgccaatggtcgccgtttcgaaccggccatcggagcatggaaagttctacggggcctcccatctcatggtctccctatatatggccaaacgggccgcccaggccatgcctgggccgatgtcagtcgggccatgtcgtgctaacccacgggctgcatatatggcccagacacagtacaataagattcgggtcgtgcccggccagcctaaagacacgaccgcacatcgtgcttcttcctaaaataagtctattgtttgtccctcaactctttggaatgtgtcttatatggctagaaataagtctattttttattcctcttttttttttgctttgccttatatggtttattaagtatattttggatccctctagtatttttttatcgtgccatgcctcgggttaggcatgacctaactgtcgggccgtgccggcacaggcttgacactagttgggctatgccatgcttgggccggggccaaatggccgtgctttgggcggggctatcgggcctcgggtcatatggccatctattgtctacttcgttgcgcgcacgtgggaccatgttgccagtggtcgcccatatagtaatgcatactacatcagccaaaaaaagggaaaagtctggattacgtccctaaactattgagtgagtacgaattaacttctcagacccgaaaatcatatactacatccgtcccaaaataggtgcatccatagatatcagtgtccagtgttttgatcgtccgtcttatttgaaaaatttatgaaaaaaataaaaaaaatagtcacacatggagtactattcatattttatcatctaataacaataaaatactaatcatattttttttcaaataagacgaacggtcagacattggacttgaacagcacttattttaggacgaagggagtatctttcactctcaactattaatacatgataaattacctcccaactcaactcaattcaaagtggttttgatcctatgcggtagtccagttagcaattcttttttaaatccgtgaccctacttgtcaatctctcatcctttctatctctttccccaatcctatctatcttatctctccctcacctcctctctctctctctatatcacttaagcaatggggagggtagccgagtacggcgacggggcggaggcagcgacagaggggagctgaggacggtggcgggcatgggcggagacaaaggcagggtggcgggcgggagcggaggcagcgccgaaggagagctgagggcagcagtgggggcgttggcaggtaggcagtggtggaggggaaaacaaggacgacgacgggtgagagcggggacaaaagtggaagcatcggcggagagggaggcgaggacggcggcggggcgaagagggacgaggatggcggcgagcatgggtggagacaaaggcagggcgaccgaacacccgaggctgacgccaccgttgacgaccttggggagtttgacttcgaagacgaggacggcttcaacgcttaccctttccttgtcgtcgatgatggcgtaaccgaggacatcgataacatcattggcaaactcagcatggagaagaactcagtggctgcaacccacgtggacgccgttttgtacaaggccgccatacgcccatacctaataagcctcaatgcctcgtagtgcttaaaaaaagggtagacgcttgacggggagagccaccggcgagctcttccgacattggaacattggagggagaaggaagaagatccaagtgtatttctgtctaatatagtattttggcgaaggcgctcgggttgtggaggttatttcggcgaaacctatttaaataacgttattctagctaatccaaccttatataatgctatgatattaggtatgtaattttctcgtctttgcctagggggaaaaaaaaccccgaaaggcctcccctccgccgccgtaaagcttcggccgtcgggatctccgaatcgccgcctccaccctaatcccctccgcttctgtcggcgtgcaggctgcgcgaactcatcagaagcgccgcctccaccctaatcccacttctgtcggcctgcggcctgtgcgagctccgatccgccgcctccaccggaatcgcctccgctgccgtcggcctgcgggagcgcttcgaaccggcaaggatgaaatcgcgcagggcgctgtggatttccagggaacggaccagaagaacggcgaactacgaagaccgggagaaccccttctgggcccttgcaggtatgccgccgccgtcgtctgtgccatgccaactacagtcgactggtggcactgggatggagtcaagcccggagcacctcccttcgccgccgtgccaggcaaggacaccatcgccgcccccgagtgggagggcatcatcgccgtcgcagctgctcccctgggaacagagggagagggagaggatacaatcaccgcccatgagtgggagggcatcatcgccgtcgcagcaactcccctgggaagagggggcatgcccggagagggtacgatcgtcgccgatgagtgggagggcatcatcgtcattgcagcagctcccctgggaagagaggacatgcccggagaggataccatctctgccaaagaagaaaatgtattggtttgctcgctctcgggaagccaattccgtgcaagtatcacgtccaggggaagcatcatatcctgaggcaaccgagggcaaaccagagtataatctgcacgtcttgaagagcatgaagaagaagaagaaaaagaagaagaagcggggcaaaaggaataagagaggtcaaggcggctccgaggacaagagccaagagaagcaagaggtagcacaagagcatctgggctcggtgtcgtcctcatacagctctccgctgcgtgaaccgcaagctccacttgtgcctatgtggacgagtccttctggagaggtggtgtatggcatcaccgatgatcccacagctgcagaagcctatcattgggcttttcacgagtacaagaacaagagaggtacgctttttgtccgtctgtttttaccaaaattgtgataagcacaataattacaccaagtactattttaatgtaaggctgaactgcatcaatccacagtctgctctagtattaaaaaactttccaaggtttgccttatggtatccaagttgaaaggtataagttgtatgctgtcctttagtagtaggataaactagcaaaacaaaattggaattacctgcaaaaaattgtgtgtaaattgcacttgcactgggtaaagcataccttatttaactgtgcaccaggcttagtttatgctttcgctttacaccagggtatataagttctactatgcaccagattgcttcacaaaattggagtgatattgtaaaatatgattgaaacttatggaattcttaaatttagaccatatttcatgaagtttcgttcagaatttatgaaatttctataggtttgatgatttatcctggtgttatgtgacacattttaatacaaagtgataatactaccaagcgcaacgtgcaatttgttgaaaaattattcaagctcaccgaatttcacatgtctttgttatagcacgccaggaactattaccgacagtaaggtcgtcaatctctgctgctattgaacactataatcccgagcagaagaaaacacaaataaatgcttccaaatccatcgtgagcctttcagcttatcacggtattatatattcttcgactaatcttttttatttgatggtagtgtcggttgctttttagctaacttcttttgtgtatatgtagatggtagagagattaatcagggaactggtataattatcgagtgcgatgaagtgaagaattctgctatcattttaacttctgcttggctcatttgcataaagaaaccttttgatgattggtcgcataaagattatgctcctgaggctaaggtagaacacttcaatctcaacatgctcctagctataacatttttgtttgcttagttggaggtgttagcatgaataggatggtcacatccagttttttaatgatgttccatgcattttgttgcttaagttctaattttaggggatattctctctagatgcagaattgtctcaacctccccccctcccaaaaaaaacaatgacacagtgcatagatgctgttgctcctaaccccttgcgtgtttgtatccaccttgtgtgccatagctacctccccttctcaccttgtgtgccacccgccattgccctgtatatgttgctatctatttcttttgattgttcatctgtgcatttgcacacaggtttttggtcctaagttagaacttagaaataacctttagattacattttatacaggaaaaaaacaatcttttcttgcattgcgtgttggtcatataggtcgataagttgggaagcttaggaagaaaaggaggttactcgttaatgttgcttctcactatgtcacaactacctgcaaaagaaaatcgtacctcagtacctcacttatgagaaaaaaatgtactccctccttccacaaatgttagacttattctatattttgtttttttccaaataagttggtcatatttgtagttttcatgtatctaagacttaaatgaagagataaattaaatgtttaatcgaaacctaatgagccattttaatactcattggttgcatgcatgcatgcataggctccttgatctttgttacatgtaagatgagttctttgttacatgtaagatgagttaatttcttcttggttttggtgacaaaagtaatatgtctaactcttgtggatggagggagtatatgcatacaagaggcaacaaaatttagcggatattactgccaaagacaaaaatactctataaatttattttcatagaaattatacaaaatttgattacacgatacatattatacataattaaaaatttcacttgaccaaaaatttattgcaagtactttatcgtctatccagccaaacaaacaagctaattgtatcacccaatccatcttgatccccgccaatcaagcacatttttagtctctccaacatttatttgtgttgctgtgttttatgcattattaattctatccaaattacgcatcatatttgcagtctgtctagctgctctctttgttcacagagtttacttcgtgtttacttattgatatgttccttgatttttaattcaattctgctaaagggatgttctatcctggttgctgcttggatagttgcattaaagcttagacaacgacactacttgttgtttatgtttatgtaaagtacccgacacaaaaatcttttattgaatatgttagccagccaggtgtttgcatggcagattagtgcctcacacgaataacatccaaaagcttccatccagatcacagaatcggtcatgaaacttgagtcttgcatgcagaatcaatcatgaaactgaaggaaaatcatcttcaaaattagcctagccattaaactagagtatatttgagagatgacctgatcttaaactttgggatgttctaccctggtttgttggttgcataattgcacattaccttaaagcttagacattgactctacttgctgtacaaggttatataaagtacccagcataataaagatcttttatttcttatgttagctagccatgtgtttgtatggtagaatagtgcttcacatgaacaacgtccaaaatcttccatgcagattgcagaatcagtcgtgaatcttgatagtaaaatcttacatgcagaatcaacaattaaactagaggagaatcttttgtgcagaattagcatagacatgaaactagtgtcttttagagctgacctgacctttgggatcattagttattgagaactgtattagtgtaggagcattgtatatacaatacaaaggactccccctgttgattttaataatccacggaaacagccaggcacttagtattctccacatggttaacttacttcatgcttggtgttccttgattttaaactcagacatgcttcatatatacttggtgtttcttgattctcaaactcgaacatgctccatatatgcttggtgttacttgattcttaaactcagacatgctccatgtatatttggtgctcctttattattaaactcagacatgtcacatgctccatatatgctctatcctgcttggtgttgtttgctttactatatttgtaaaagaaatgaacatgcaaactgtatagctcataatagtataagtgatatatcttccacattaagtgtttttaacctactctttttatttatttattattttaggtcactgttcacatgttggatgacacgatctcagtgtgtcgattgctgtacttcagcaagcatttcgatattgccttatttgaaactgtaggagggctaactataccgattatgccattgaaatctgatttggaatatggccaggatttctgtgtgctcaccagagacataaatatagatttgatttgcacaacagtcaaagtgaagtacttagatccgtatgagcaccaacacaatcactatatgttcattggtggttccattcccaaggtaatgatggtatttaaaattttaaattctaaatagttagttgcacttgtctataatctcaatgtggtatttaaattttgcttgcagtgtggtactggaggtgcattggcagatttcagtggaaacactgttgggatgttattctgcaccttgcccatggttgcattcctaccgagctccctgatcctcacgtgcctaagattgtggaagaagtttgggtaggcatttttatttttgttcatcctagttggctatatacacttgcttaattcagaaacttaggacattagtttgagatatgcacttatgctgccagcacaaactatttcccttccattcaacaagtttacatttaaacctgtacagtatgttatattttatataatataaaaatgagtgccaacttaatatgcatatgcacaatacctctgtccatttgctctcaaaaccaaatgtacggtagaattcacagacagatacatacaagtgaggtgctgaattaagaatgataggtgtgagactgttagattcaggttaagaatgtggggataggtttgtaatggcctctattcaacatcaacaagtactgactgagatgcaaagtgaaatgtatttatatgttttaggcatgcacttctacaaccctaaacatgtgatacactataattcttgtatattggacttattatgtggtatgattatgccatctgtagcaaccaagtggcattcagcagctagtataaattagtaattattaccatctgaccatcatgtttacagaaaacacatcaactgctgtttttttttgtgtataatatttcactttagatataattatcttatataaaataaatttaatagtctaataatttcatataggcaaattgttcgacctcagcttggtttgaagtttaaaacagtggattttcaagagatgacgcttattgagttgctgtctcgtaaatacaatattacctctggtcttattgtaggagaggtaacttttttatttatgacatctatttatatttatgtgtatataatataatattttcatgtatatattgtattatttctggattgattttaggtttcagctgaatgtgctgctgagaaacttggcattcgagttggggatattattctctctctctccagggagaaagcatttcaagtataatccaggtagcaattgacatccttaagactttatttgaatatttcaaaatctaaattagctctttcaaacaaaaaggcataaagtataggtagcatgtgcattagtttatttaatacaaatttgactcaatccttttgtgttagttggagaatatattgctcagtattggtgagagatatcttgaggagggtaacgactccagctctaaggttgatatcaaggtaaatttccgtgtacttaatgaatacacttaaaaccatatactggtattaggattatttattactctataggctgtttatctcctagatagttaatctcctagacctttggtttttgtaactctctagcattcattgtaactcagcactagcattcattgtaactcagttatatatatgagagatcacctaccctcttttgtgtgtgaggcatccattccacttcttctacatggtatcagagcataggcccttaccttcttttcctctgctctagcacgtcgtcgtcgcaactgtgttctccaccatgtcaactgaatccactcagtcctctacctcatcatcctccagtggtggatcctcttccaacatcactagcgagtttcttcatccctacgccaccgtcgccgtcaaatcacacgtccccatcaccctggagaacaaccacccaaactacaacaaatggagggccttcttcacctccctgtgcggcaagttcgggttgatggctcacatcgacggctccgctcctccacgccctgacgacccggcctgggaacaggccgactgctgcatccgtagttggatcttcggatcagttacggacaacgtcgttgacctcgccatggagctagatcagaccgctcgggagctctgggtcgccatcgaggacatgtttcacgctaacaaagaaccccgagcgatcttcctcagccaccaatttcattccatgcttcaaggggactcctccattgccgactactgccagaagatgaagacagccgccgacgcccttcgcgatgtcggccacgccgtctccaagtcccaactcgtgctcaaccttctccgaggactaaacgaccgcttctccaacaccgccgatcagatcgcaagcgcggacgtcctcccgagcttcacatcggcgctcaacaccctcctgttgaaggagttgcgcatcgccaaccaggccaaggtggccgcggcgacggcgctggtcaccggcgccagctcgggctccggctcctcttgccctcccggcggctgcgcttcttccggaggtcaagcatgcactggcggcaacaacagccgccgcagcggcaagggcaatggcagctggatcggtggcgggaatggaggggccggaactggaggcggatggggtagcggcagtgggggtggtggcagcggctgcccgcttcctcctgctggtggcggtggctaccagggggtggccaaccctagctggaggccggccgggccctgggtctgttttaacccttggccggcccagcaaccagcgtggccaccccactcggcccactactctcaggccggccttcttgggccggctccggcagcccactactcaggcgaacaccactttcgctggcccatcgatgtcgcccacatctgttcctccaggctagccagacccagggcccggccttcttgggccggctccggcggcccactactcaggcgagcaccactttcgttggcccatcgatgtcgcccacatctgttcctccaggctagcccaattgggagcaagctggcctcattgaatccttgaaccagatggccttccaaagcccaaacaactaggttttggacactggcgcaacatctcatgtcctctactgacggtatcctcgttactcgattgcctaactcccacacttttattactgttggaaatggtcacaccatccccgttatttgtcgtggcacttcattccttcccataggcaccaccaaatttgcactaaaaacatccttgtcgccccctccttagttcgtaatttactttccgttcgtcagtttactcgtgacaataaatgttccattgagtttgatgaatttggtttctctgttaaggaccttctgacccggcgcgtgattcttcgccgcaatagccacggggaactctacacccttccagctgccactccctccagcgcccactgctccctcgccactttatccacactttggcaccgtcgactcggtcatcctagtgcagccaccatccagagtcttcggaatatgtcctccatttcctataataaaatagacacctctctttgtcatgcgtgtcagttaggcaaacatacctgattaccttttgataggtctttgtctcgcactttcattccctttgagcttgtccattgcgatgtgtggacatctccggtgttgagtacttcgggttttaaatattactttgtggtgcttgatgatttcagtcatttctgttggacgtttccactccgacacaaatctgatgttcatcgtcatattgttgagtttgccgagtatgtttccacccaatttggcttaccgctcaaatcccttcaggctgataatggcggagagtttgtcaataccgccaccacttcctttgtcactaatcgtggcacccagctacgactctcctgcccttacacctctccccaaaatggtaaagccgaacggatgctccgcaccatcaacaactccataagcacccttcttatccaggcttccatgtttccgtcctgctgggctgaggctctcgccaccgctacctaccttctcagccggagaccctcttcctccgttcaccactccttgcctttccagctcctacatctcaccactccagactactcccatcttcgggtttttggctgtctttgttacccaaacttgagtgccacgactccacataaacttgcccctcgttcaacagcttgcgtttttcttgggtacccggcctcccacaagggataccgatgtctggatctctccactcgccgcatcatcatttcgcaccacgtcgtcttcgacgaatcccgctttccctttgcggcgactcccactgctgcctcgtcttttgattttttgttacagggattccctccagcagtcgcttcctcctccgaggttgagcaaccgcgaccactcacggaggctccctcctcagaggtcgagcaaccgcaaccactcacagtggctcccgagcaaccgcgatcccttacggtggctccctccgtggaggttgagcaaccgtaccttccccctcttcggccgccgcttgccggacggcacggtcaccgcggtcaacgatgccattggtgccccctcggtcggtgcctccttggccggcactgcccctttggccggtgccacctgagccggcaccatcgtgtcacccttccaccatgtgtacacccgtcgccctgccccgatggtccagtcatcatcttcagccactgtgactgcgacggctgctgctccacagctgcattccatggtgacgcgctcccagactggctccctgcggccggtcgaccggctgacctacacagctacccacgccaccgtctctcctatcccggccaactatcgcagcgcgttggcttatcccaactggcgtactgctatggccgatgaatacaaggctttggtcgacaacggcacttggcgcctcgttcctcgcccccttggggccaacgttgttacgggcaagtggatcttcaagcacaaattccactctgatggctcccttgcccgccacaaggcccgttgggtggtccgtggttattcacagcagcacggcatcgactaagacgagacatttagtccggttgtcaagccggccacaatacgggttctcagcattgctgcatcccgtgcttggccgattcatcaactgggacgtgaagaatgcgtttcttcatggtcagctcaaggagaccgtctactgtcagcaaccctctgggtttgttgaccctgctgcccctgatgctgtatgtctgttacagaagtccctgtatggtctgaagcaggctccccgtgcgtggtactaacgattcgccatgtacattcgacagatgggatttatgccttcagcgtctgatacatttctctttgtttacaaagatggagatcacattgcctatcttctgttacgtcgacgacatcatcctcactgcttccaccacaccactacttcagcagcttacggcgcgccttcacaccgagtttgccatgacagaccttggtgccctccacttctttctcggcgtctccgtcacgccttcctttggcggcctcttcctctcgcaacgccagatgctgtggatcttctccagcgggccggcatggccgagtgccactctacctcgacaccagtggacactcgtgccaagctctccaccactgacggcttgcccgttgccgacccttcggagtacaggagcatcgctggcgtcctacagtacctcgcgctgactcgcccggatttggcatatgccgtttagcaggtctgcctcttcatgcatgatccgcgggagcatctcgccttgttcaggcgtatcctccgctacgtgaagggtagtctccaccagcctccacatcggctccggaccggttcagtccctgacagcatactccgatgcggattgggcgggttgtgccaattcttgttgttctacgtccagctactgtctcttccttggagacatttggtttcttggtcctccaagcgccaaactactgtctcctgttccagtgctgaggcggagtaccgtgttgttgcccatgccgtcgccaagtgctgccggttgcggcaattgctccaggaacttcatgtcccggttgctttggctattatcgtctattgtgacaatgtgagcgctgtttacatgacaacgaatcctgtgcatcatcgctggacgaagcatattgagattgacatccattttgtccgtgagaaggtggctttgggacaaattcgggtgcttcatgttccttcatcacaccagttcgcggacatcatgaccaaaggcttaccagttcagttatttactgaatttcagtccagtctttgcgttcgtcatcctcccgttgcgactgcgggcgggtattaggattatttattactctataggctgtttatctcctagatagttaatctcctagacctttgttttttttaactctctagcattcattgtaactcagttatatatatatatatatatatatatatatatatatatatatatatgagagatcacctgcccccttttttgtgaggcatccattccacttcttgtacatattgttttcgtacacttgttattgattacaactcttaacgataaatgtttttttttatttaataggttggtctatttcatgtgcgtaaatgtaccagaagatttatcactttatcagtacggttgtctggtgatattgaagtctttcgctgaggtaacaattatttctcatatcgtgtcattatcaattttcatgttttccttgttgaaccgttcatgaactgacaagatgtttgtgttagctcgatggcgacctcctgacgaacagaagagatggtgagacgacaagttagtactgcatgttggaaggaatgaagtcttttaagaggagtggtgttcaaagtttttggtctggctggttatactctgatgtctgcaagtctgttcgtggtcttgatacatgatttctattgttgggtttccaagtgtgtgcttgcagttgcacccattagtcccttgccacattcttgcggttttacacctatccttgtgtgaattttcggtcgggatctcgtcaggtgaaggaatcgcactgatttgcctgctgtggttcaaattgtttggtttgttgattttgttaatttattactcaatccgtcccagaatataagaagttttagagttggacatggttattaaaaaggtaggtagaagtaagtagtagagggctattattggatgagtagtggaggttggtgagaaaagtgaatagtggagggttgttattggttgggaagagaatacccatgtgttgtgatgggtgaagacggtacggacgaagctcaaagctgacaggtggtagaagcactcgatcaggatttgcactcgggcaaattcgtgctccgctatgtagagctggatcgtgctcagacacgacttcgagctagccgtgaggaataggtggcagcacatttggatgaagagcagtggtcgacgtggtacacgaccatgctaaggtatggttggaccatcggaggatctgaggtaatgcgtggagattgtcacgttgctcttgctgctcgacaacatggccatgtcgtgctccctttggacaacaattcaacgaaggaatgcagaaagatcaaacagagatgtttcttatctcgttttcattaaactttcataccaggttccttttctagcaatttagatttggaaaccctctatgaactgcgggagaggctctccctccccaggctactgtttttctctgattactattcaactatgtactcgtctctcttctggctccccaaaattttaaaaatgaagaatgtatttctgttagagagagagagaaagaaagaaacatcatcaccctgaaggaatttttaccatagcatgcacaatcaagagttgttcagcatttttaaagagcaaaagaccccttaccaagcaacagattgccagcatttgcaaccagcaccagcatctggggatggaagtgcatcattcacttgcggaaaccgttgcatcttgcctttggaaaaagaccacatattctatcatggaaaagtaaaaaaaaaagaaataattcagaaccacaaaattaccttggggcaaactatgaatatcgcatcaggataaggagttcaacgtctcacacactgacctcacgtggagtttgcacccttctttccttggattgggaccagccgcaccgcaccgcgacacatatctgagatcacagcggcgcggcgtatgcagcagcacggctacgatccgtctccggcatgcgcacgcgcgtgcggcccttgcccctatcaaactacgaggtggcgacggtggttatcttttccggttcagcacgcacgctcctccagcctgaccataatcctcgccatctgccgccaccctcgttgacatccccgagccgtgtcctgcgctcctgcaccagcgcaccctcttgagccggcggaaagccggaaaccgcttcgaggcgagatccgtagcttgctttatggcgctggcatatgtcctactacccgtttcgggttacaacacgttttgactttgatcaaagccaaactattttaaatttaactaagtttatagaaataataataataatattttcaacccatgacaaatttattataaaaatatattcaattattgatttaatgaaactaatttggtattataaatattactatatttgcttataaacttagtcaaacttgatatagtttgattttgatcaaagtcaaaacgtcttgtaacttgaaacagacgtagtagttttttttcaacggcggcaacctgctactggcctactgctatggcccgtgccctagcgtggacacccgaagatgaattggaatcaaagacaaaacaacgacggacgaaacctattcctgttgaggaagaaaacgaacactaccagcggcgaggattttgcaatgcacaatcaggaggtccatgcgtctccgcgctctgtgggattgtggcagagctcgtagatggcgccaccgctgaatatgctaccggagctgcacgcgcggcaggggtggcctgcacgccgcgctccaacgatgggtccagagcatctcaacatccctaataccttgtttggtttaaaggggattgaaaatgattagaggggattgatggagaatattttcacaccataataggtgtggaataaatcccttccaatctctctctcacaaggatctatctattatattataaaaaggatagaaaaaggagcctccacgttcgctctcatggcctagaaattctcacattaatcggagaaaaagaaaaaacagagtccatatagaaatacaatttagaaatagctgaaattcagaattaaaaaataaggaatattagaagaggagactagagtccatatagaaatacaattcagaaatagttgaaattcagaattaaaaaaataagaaatattagaagaggagactagagtccatataaaaatacaaataggaaataactgaaatttgtaattaaaaataaagaatattagaagtagagtatagagttcatatataaatacaattaggaaataatagaaattcagaattaaaaataaggaatattagaaatagagtatagagtccatatagaaatacaattaagaaaaaaaatagaaattcggaattaaaaaataagtaatattagaagaggagactagagtacatatagaaatacaaatagaaaataactgaaattcggaattaaaaaatataggtatttaaaactatctaaaattcggaataaatataataaaattaaaagtagagtttagagtccgtataaaaatataatttctaaataactaaaattcaaaattaagaaaaacatgggaagaagagtttaaagtcaatatagaaatacaatttagaagtaactgaaatttgaaattaaaaattaaagaatattgaaagatgagtttagagtccacatagaaatacaattagaaataataaaaattcagaattaaaaaaaaagaaatattaaaatacgagtctagagtccatataggaatatatataatttacaaataactaaaatttgatattaaaaataattaataactaacacgtatataaaatacaatattaatattacacattagtagtttcgtagagttattacaaaatttaaaattatgttgtcattgtaatatattttaataatataatgagaaaacatatatgctattatataagagaaaacataatgatgctagccgcgcaatctgcgcgggccaccatgctagttaaccgaacaagacctaagacctaaggtgggggttgtggaagtggggatagactatgcccttttacggagaaacgcgaggcttgaagttgctgcggaataagcacaatccaatccgagttacggtataggcgtggacgacagaatggcgggatggttgggtcggttgggttgagttgagctgggaaggggtgtgtgatagttattttagattcacatcgatcaaatttgatacaagcgacttacaaccagctaaaaatcaaatcaaacacagactacgcaccaaaattttgataaaaatatctcaaatttttataatagtagagaagagataaacactctaagattgtgttctgcacggaaatgtggtggcttattaatgtatgattaattaagtattagcaaacacaacttaaaaaaaataaaataatacgattctgaaatcaactttcagatagaatttttttttaaaaaaaacatgcacgcgaaaaacaagaaatatgagttgggaatggaaagggaagagtacgggtggggatgctttggagttcactccaactccatccgaaggatttgatgaaatctctgtcatctctatataagaatggttgggatgaagtaactaattcctaatagttttttttctgcatcttaatatttgtaacaaatctaacgaatactatatatatatctagagaatatacaaactgattttacttgcataacctagaaatttcatggttcatccacagtataaaaatcgtattgggctttgtggctataatattttagcaacatttttgtgtgtatatggtttatgtatgtttgcacgtactaaatgtttaacatagttttttatacatgaccatagcttcttatttggagaagagagcgtgcatactttgttaatgttgttggcagaaacatactcactaggaacataaaaaggaagaaaaggtaagtaattttcattcaagcatatgtgattgagggagttaattaggacaagttaataagtggcttcatcttagccataggaaataattgatggtatggatttagtcaaatccacctggtggagttgtagctaactctagggggatctggacccggaagagcaacaccctaatactcgtaataaaatagcaatgtacgttgctaatgccaattcgagggtgcgatttgttttgggaatacgaaattgagccctataaattgtccaccctataggccgcagattcctcaatccttactgcaagcggcaaagccctcctcttcagctcttctgacggaaaagaccacagcgatggccaattacacatggataatacaatttaagtagtgcacgttggcaatgccaaatcaagagatgcaattgcactccacccaaccctacaaatatccacccgcagcttagctcgatccttgcccacttcaaagttcaaacaacaaagccgtcctcttctgaccaaaaagaccaaagccatggcgccttccctcgccacctcttccaccctcgctctcttcctcctcgtcgccgtctccatcgccgacgccgcgacattcgccatcaccaacaggtgccagtacacggtgtggccggcggctgtgccatcgggcggcggcacgaagctcgacccggggcagacgtggaccatcaacgtgccggccgggacgacgggcgggcgcttgtgggcgcgcacgggctgcggtttctacggcagcggcaacgggcagtgccagacgggcgactgcggcgggaagctgcggtgcacggcgtacggcgcggcgcccaacaccctggccgagttcgcgctgaaccagtggaacaacctcgacttcttcgacatctccctcatcgacggcttcaacgtgcccatggccttcctccccgccggcagcggcgccgggtgccccaaaggcgggccgcggtgcgccacggccatcacgccgcagtgccccagcgagctgagggcgcccggcgggtgcaacaacgcgtgcacggtgttcaggcaggacaggtactgctgcaccggatcggcggccaacagctgcggcccgaccaactactcggagttcttcaagcggctgtgcccggacgcctacagctaccccaaggacgacgcctccagcacctacacttgcccggccggcaccaactaccaggtcgtcttctgcccatgatcgaacgcgcgcgcgcgcgcgcggctgatcgatcgatctctgatgatcttgggatttgtatgatcgatgcatgtgtggatgtaaccgtgatatacgtacctaagaataagtttgcacgcgcaaacgaggataagtttatgttatcgatctttgaataagtaaaaacaactgggtttatgaattgatatatatgaacgatgactttcagtaagataaacacggttaattacgtgttcgatcagccatatgttattatgcgtgtaactatggaaactattctaactataaaaattaagaagatgtattaatatgtgatatatcaatcaataaatatgtaagtgtaaattcaacttctacaaatatcaaccaaaaaacaaattaaactatatctagacatctagttaatgtatattcacagttaaatttgttttttcattgtgacatgtagatgttaaattttaacttgcatatttttgagtaatatattacatgccaatatatttttttaaaaatctttcatgactatttaagtgacatgtaaataatgagaggatgtttcctcgagagtttaaaatacactatagtatatataactatgcttcggagttcaattctatgatttctccaacatttccaaattccagtcgaggacgtgtacggttgtaaattaattgagttatactagcatggcgcgcgattaatacatttggacgaacacgcccaacaaataaccatgaccactctatcacggcgcattaacaagaaattaactgtgaacagtagtcaggtcgaatccttaaaccttagcggtttggacaccacatgctataaccttagtgcttaagaacttttaagaataccatagctctgttaatagacctgatccagcactggatttatcctaaatccaatatccaggccaaaagcggtcagcttgagtggacccacccaatacttgcaacagcactcaatcgactacgcatgcatggaaagtcaaggattttgtaattagattccacgtgccaaatcggaatggaattaactaacccaagcagatatataccctatccatctcaaaataactcaaccgagaatgagatatgattcatcttaaaacaaagaatctgaacatcacatctcattttaaattaagttattttagaacggagggagtaaactacattattaaattgtgcgggagaaagtcatcatactttcatacattcaagcggtcaagagcctccactatcattatctagagtagtggaccgagcaagcatagatcctctagcaaattaatctgtcaaagaacttattattatatcacgaagaaaagacttccattctgcaaaaaaaaaaaaaattctagagacgtgcaacaactgagttagctggcacgtagtaccgatgaaacagcagagtggagaccgcacaaaacagaaaagagatgctcgcgtacgtacgcacgatgcacgcagaagctacccgtgcacgcgacctcctcctccttgttcctcgttccctcctgcccgggaaatgcatggccagcagcagcggcagatcgggtcatcgaggcctgcgttgcagccgatcttgaacggatgacggaaatcttaaatgaaattccattcaacgcgaataatgggcgcacgggagcacgcaaccgtccggctcgaccgattttggaattctaaattcttccttggttggttctggtcctcgccatccaagtctgaagaattcctcaccacgcagagtcgcagctcgcaggttcgaactggtatgtagagagagcactttgccttctgtttcgtttcgctccacctataaaaggaataagttcatctgagatctcttaacttgtcaacgaatccgattttcgtctctcaaccgaaaaaccaaacacaacggatttctcaactatcaaaactagtgcagatgaggtccctcggtgattttgagggcggttttggctgacatggcgcctacgtggctaatttgacctgatattcatctggcatggcactgacatggtgcctaagtggcaattcggtctagaaaaaataataaaacccgtgggacccacatgtcagttccacaaataaaataattaaaaaatggtgggacccacgtggaccccacatgtcatcctcactcctcactcctctctctctctctatccggggcggagcggctggccggcggagcagggcgggcagcggccggtgcagcggcgaggctggatgcggcggcgcgacctggcgaccgggccgaggcaacggcggtcgggcgctagtcagcccagcgcggcagaggcctgagggagagaaggccggcgcggtgaggagggagcttggcggcagggggaaggacagcagccgctggcggtgctcggagcgggcgcgtcgacgtggccgtgcccggctgacggcggctgggcggcagcttgccttgcctgaagaacaaattcaaagacacaactcactagaactgttgtattgatttgctataagaacctgcatgttttgagtttctgcaggaactctggagattcaattcctacaatgctaaaactcctcaagattcagttcaaatccaaagtggggaagaaaaaaagcgattcgagaagagcagcaatgtgggtcttagataagcacaacgatatgagaaaaaaaaattgaagaacagaagcagaaaccaaaattcaggccaaaaatcatcatcatcacagtgggaactctttccggcaagagaaagatttatgcgcattggctaatactagagattaacagggaagggggagacaatggtaggtacctaacctcagacgctgctgcttccatggtgatggagctccatctcctccaaaatttgcaaagcggagagcctctctctgttaatttggagtttggagggagcagagcagaggcaaggcaaaccaggtgcagaactgtggactcactctggtctcggcctctcgggtcaatccattcctaccactctcgtgttcccctctcgccaccggacacagtgaaccctagccggctagccgccatggacggcgtccagccacttcgtcttctgctcctccccatattgccgcatacaacttcgccggccggcgtggctggctctcgcgccggccttctctccccattcgcctgacactgcctgggctccctcaggccgctaccgcactgggccgactggcgcccgaccgccatcgccaaggctcgcgccgccgtcgcctcggcccagtcgccaggtcgcaccgccgcatccagcctcgccgctgcaccggccgctgcccgccccgatccgccggccagccgctccgccccgcccgtttcccgcttctaccagccgccgctggccccgctccatcggccggagagagagaagggagaggatagagagagagagagaggagggaggagtgaggatgacatatggggcccacgtgggtcccaccatttattattattattttgtgtgtgaaattgacatgtgggtcccatgggttttattatttttccggatcaaattgccacttaagcgccacgtcagtgccacgtcagatgaagaccaaatcaaatcagccacgtaggcgccatgtcagccaaaaccggcctcaaaaccgtcgagggacctcatctgcaccggtttgaatagttgagggactcgttgtgtctggatttccggttgaggaatgaaaattgggttcgttgacaagttaagggatctcagatgaacttattcccctataaaagggcagactgtacaacaaactcggcccgaataaggccgcatccagcgcaacctcggcccaaatctctactgtgtttttttttctttttcaggggaaatctctggtgtttcctgttttcacttttgggtgtgaaaaaatcggtgatgctgcccagcccttgccccaagcagtgacggagctaaaattttctcaaaagtagggctgaactagtataatttacattagtttatctttttatcttttaattgttttcaaattttaaatcacaatttcaatgggtatttaggctaaggagtagaggctctagccctaactaccctactcctatatccgttcctaggcctaagtgtggtcagacagtcttacagcttgttcgagtattagatataactattagtagagctcaagccagcagtgttttggaggcccaagagactgggggaattgatcgatgtgacatcctgacttaattaggatttggcatgtgtgaactataagagcagtgcacgcacatttaataccacgttgctagtttatcaaggctggaaccaatttataaggcatcctccctccaaccataccacaatcgggttaacccttttacacgaaacgaagatgaaaatgtaattgggatgatatgtgtaagtgggaccgtccatcggttaggctagggcatgtggggcacatggcatggcatatggcactagtattggatgtacgaacgtatacatgtgtggcaaccatactactcataggttaacccttttacacaaaccgaagatgaaagtgtaagtgggtctgcctgccggttgggcttggctacgtagttctggaggacccttttacacaaagcgaagatgaaagtgtaaatgggtccgctcgtcggttaggcttggctacgcagttctggaggacgagcgattacaatcgagaactatgaggatttaacaaaggaggcttcgccgagctcactagcatgacaacatccaacgtcttcccccatgcacaactgatcccttttatttgtgtgccacaaagcccccatagccacaagaatcttaatgaatgaaccctcatgtgtgacaaacaaaaacctataggtatgtgcgggagcaccgtcgtggctcagccgcagttggtaaacaacggtgtgcaaggtcattgcatgggaaagagcgtgaccagctaggacaatgggtagggaggttgctgtggtgagaagacggtggcgctattggccatagaaggtgggagggggtagaggaggagggaagatgagacaaatagctcacctagttgccatgactggctagccggaggagaggtcgtcatgagatttgttagcattgcatttgcgggaattgagtttgccaacttttcactgttgaagaagagaagatgacaagcactggagggtgagggtagagggaggagaggtgggagactaggagcggggaatgttttttatgtcagcaccatcgcaatcgccagtcatcttataatctcagctgcaacttacacgtgaagattgtcttgaactatggacaaaaagtataaggtggaggggctcgcgtgcaatttggtttactcacgcttgctcgtgtatttggagccccttataatcggtgattttttttctttgaacaattttaattttttattatagtaaaaaaatattttcttttggctatgccacttcgtctagcgtgacgaaacaacacaattatattgtcaatgtattttatatcaccacactaccacaccaatgagactggcgtgactaaaaggtttatattaatttttaaaattttaaaatgttaaaagaaattcataacctgccctgctctgctatatgggactctacacccacaccaatcagatcgtacgaagagaataattctccatgtgagctgataagtgaaaggattgatgggacaatatatttgttctaaaactaatcccaccaatagagtatagtactcttatacagctaatatgctgcagttaggccgagtttagggcctgtttagtacgcgaaaataaaatttttcaatgtcatattggatgtttgaccggatgtcggaaggggttttcggacacgaatgaaaaaactaatttcataatttgcctggaaaccgcgagacgaatcttttgagcataattaatccatcattagtatatttgggttactatagcatttatggctaatcatggactaattaggctcaaaagatttgtctcgcgatttcctccctaactgtgtaattagtttttttatttatctatatttaatgcttcatgtatgtgtccaaagattcgatgtgatgtttttggaaaaaaatttggggaactaaacggggctcttagttacaaactttttttcaaacctccaacttttccatcacatcaaaactttcctacacacaaacttccatcacatcaaaactttcctaacacacaaactttcaacttttccatcacatcgttttaatttcaaccaaacttcgaattttagcgttagctaaacacacccttagttttgttttaacttgacaagaccaaaagtccctgaatcacgcggagaaaacttcccaggccagcttctaatgtgactttttcttcgttgtggtacatttcttgctacactactagatgccaaggaaagagcacctaacaaatcgaaaacgtgaatcacagtaatcacaggatcatacttggattctttgctcctcttttgtccgcgccaaatcggtcaatcctacgaaattactgaaatctagcactaaatcatactcccttgatctttaaaacatatttcttttattatcaagattaaggagaaattaacttatccatcatataataaaaccaagaaactatatgcatgtatatttcttttatcttttattgactttgacagagactgaagatataaatcatcttcattatctaaacaatatatatagatgcaaccaatgagtattaaaataattttatggattctgatcaataatttaatttaacacataaagactaaaaatatatctaactcatttgaaaaaaccaaaaaatgaaatatgtttagacttttagatagagggactatgtgccgtagtgaatatacctttcttactgtagttaaaagaaaacctttctatataacttcatttctagacaccccgaatcaattagatatgcacaatagcataagccccgtaatgggctcgtggcaccaatgaattttacacatacctgtttagagcgaaacaatttgattcccgctgtggcatcaggaagaatttcctcgaacgtaccgtctgtttttttttttttgagaacactcaaccgtctggttcgtggtgaaaaaaagaatcaagagtagactttgaccagaagaagctgcgctaatgatagaaaattccgaataactccaaccaaatctgccgggatcaccaactctaccatatttcaacccacgtactacccaatcaccggccgtaactccatggagaagaaacgcgtagcccaagaaactccaagaagaagatgtcatgtttgtttggcgagagaagttataataaaccgctgacaaacatgagtgttgctgtgtggctaaactagaggtttccctccaggatcagtcaaatggcagatgctagtagctgatttcactttcttttttccgaacgaatattaactgattataaatttgcacaagaatgtcccctatcggcgtcagcgtctcagcggtgctgctaggttccctcgtcgatcttccaaatgtctgcaccagtacgtctctccgagccaagcagtccacagcaatcaacaaatgacgacggattcagaatttcagatcgcccaaggctgtgtgattagctgcaaccaaacggtgacacgcataaatcttctctttttatttttgattttttttctcatgcaattggggggacattcttgtgcatagacagttaacagtacggctggaaaaacgggcttcaccactgggaaaagtccatttgcgacttgcggcggcatgaatgccagtacaagacccagcacggagagtgacgagacacggacacacggtgccagcccggccgggtgcgcggctacgcgttctcacatgagccctctcctcgacggctgaggcctgaggcagaggcgagaagccgcgcgaggtggctttcaatttggtggtagcgaaaaactagtgcagccgaagcccgcgaaccggggcggctgctgcctgcctgcctgcctttgcttgccggctttggaatgatggcgctcccaggcttttcccctgcgcgcaggctgcagcattgtggtccacccggccgtcggatcagatggatcccatggagttctcagcttggatcatggggaccggccgggatgatgccgaactctgcagcttgtgcttgtctcactagccagcactattttactctacgaccgagtgaaacccataggccggcggccatagcagcagtagtagcccatcagtactcctgttcagtgggacggtgctgtgcaatccaatgcagcttctgatcatcgcaagtcgcaacagccatggtcgggatgggtgtgtttagttcacacttttagaagtttggttgaaattagaatgatgtgataaaaaagttggaagtttgtgtgtatagaaaaatttacatgtgatgaaaaagttaaaagtttgaagaaaaaatgacgaaaatgttcacgattgccacttgggtaatcgtcgattcgacggggaggggtgttccgttgaatggcagcgagaatattcttgcatcacataaaaaaaaaaagaaatagtgtatcatcaacaacactagtgcagccaccaacaacaccaaggtcacatttaaatcgcagaaatgagaaaaaaaacaaaaataaaagaaaaacacataattctaatagaaataaaagtgtaaaacagaatattacaaaacataggataaacacatgaatgactgtttaattggattgtaggaaaacacatgaatcaaatgagatagatagactcaaagaaaattttccaaaagtttgagctcttactaagttttcttcaaaatctttataggattaaccattccataggaaggattcaatcatttgctttaaaggcattcataggaatttttcctatagaattgaaatcctccaaaattcctatgtttttcctatgatcatgagaagtttcctcctcccgtcgctcccacctcagggctgacttggatggtgaaaacttgccacagtcgccccctcccccctcccattcgcctcgccaccgcccgagtggctcatcgacaaagccgaacggtcacaagaatggtaacagagaggtgcttccccctcccggagaaagcctgaacagctggggtccgtggttgcaccacccaaccccggttctccatcagagctagtgagaagtccagtggaggaggctttggaggagatgtggctgcggggtagagggcgtggaggcggtgtgtgcagagggacgggcaggaggtgggggagaggtatgcacggcggatcttgtgtcctctaccttagatccggtgcccaccccgcggttccggagatggcagcggaggagaggtttgtggcaggaggtggggaaggagcaggcgcagtgacaacggagcgtggatccggccccaatggctagatcgaggcccttccacaccagatttggccggaagagacggatgttgttgtggcagtgggcgagggggcgacggtggcgaggctaacccggtcggcgaggggcacaagtggcaacagcagaaggccacaggacatggctggtagcagtaggaggacttgcgacacgtagtcacagtcgacggcggtgcatggccaatggtaagagatcagtgcgcaacaggcagcgacgatggggcgccagcatgataaaggtgattgtcgagagtggtgtggtggcgggggctatgggagttcgcggcgggcgcacggcttgaggtgggggtgctgccatgggatatccagccgaggtagcggcgatggtggtgttgtgaggtgggtgctgtgggcctgcaacgggcttggatatagacgcttgtcctcttgcgacgacgctttgtcgtcataagattgccacgtcggtgggctagtgcaagggagggaggatccattcttctctctcaccctctccctctccagcccaactacctggatggattcggagtgcgtcagtggtcgagctccctcctgaaggctgactggcgacgaggcgctggcacggtggctgcgtgtcgaaggtggacgggtggtgggctgctgtttccggattgacctcgactcgggagagcagaaagatcacggacaaaagcccagccttggggccagtaatgaccacgtctgcgggcaccgcttttcccttgaggtgttgttgtatgatctcctatgctctccctgttggatttcttcgagtgaaaatcttgtcttggattctcacgacaggcggtggcgatacttttgggtggcatcgtctagaagattcttttcttaggggtgtcgtgttcatttacccttcagtagcgcgatttggttgtagaagcatgatgtggttgttttcttttcgaggctatgccttcgagggttatacaggcttgtaattttttctgctcaatcaatagaatcatcgcactatcggattgtttaaaaaaacaacacggtgcaaagaaagctgtaatcctaaggatgaactgcagacagatttcgggcgagactctaaggggatgtttggtttccagggacttattccaagtccctgtcacatcggatgtttggacactaatttggagtattaaacatacactaattacaaaacccattccataagcttggactaattgcgagacgaatcttttgagtctaattacgccataattttgacaatgtgatgctacagtaaacttttgataattatgaattaattaggcttaaaaaatcgtctcgcggattagctctcatttataaaattagttttttattaatctatgtttaatactctaaattagcgtacaaacatctgatgtgactggggctaaaaagttttagcccatctaaacactacataacgttgttaagttaacattgcacttcgagttccgattcagtaaggaatgaatgcaaagcacgaacgacacgagcaacaagaacaaatatttatgtatttgctgcttctttcttttgtcactcaactctcccctttcttctgccactaatttacatctttgggtttgatcctaaaccaccatgtaaagctccgatcgccgttgccgtcaccgcccgccggcaatctctgaaccgagctaatgaacacgccgcaaagcacggtgaacacgacggccgggagcttgccggcgacgaggcctacgagaacgacggcaacgacgaggagcgcgacggaggaccgggtccctcccacggcgtcgccgtctccggcgaggacatcggccggcgcgtcgatttctacccgcgtggcattgctgtaagcgtcggcgtccgtgtcgcctccgttcccgcggaaagacggcgaagaatccatcgatctggcgacgaaggcgtccgcggccttggtgcgcattccacggcgagagtccgaggaatccgtcgccgtggcgtcacctcggttgccttcgctgctgcggaaagaacccgacgaatcctccgcctccttgcccttcatgcccttctgtaacttgcggggaatcagcttcctccatgaccgtttcttggtcttgaccttggcgttgcttgagtcgtcgccgcctgccgcgattctctcctcaatggcgactatcgaatcgtcgcctacctcgcttctctcctcaatggtgaggatggataactcgcttcgcctggaggaatcggagaagcttgccctcgccggctccacctcccggatcggcgagacgtagccgcgcccgtccaaatccagcttgttgttcgccgccggccgccgcggccgccgggaaagcgcggaggacctgacggactcgagcaggaagagcgagaaggaggcgacggtgacggccgcgaccaccttcttgctccagatcacgaggagggcgagcgacaccacgccgacgagcgagacgaaccccagcccaaggccgaacacgcggcccttgggctggcggcggaggacggcctccaccggcggaagttccggtctcggtctcggctgggttggcggcgagaccgagacagcggccgcaggcggcggggatggtggtggtggtggtggcgaggaaggctgcggcggaggggaaggcgagggcgagggcgagggcgaggggggagcctccggcccgccgcgcttcttgcgcctggacgccgaggcggagggcttcttgaggcggccatggttcttgacgacgaggtcagcgagggaggtggggaagcctgtctggacggggagcgggccagcgcgcgccgggcggagcgcggcgaggaggcggccgagtcggccggcgggtcgctccttcagcgggctgggcatcgccggcggcgagcataggaggaggagttcgccggcgcgccggcccgtggcacactgctcgccgcggttgggcttctcggcgctctgggttggtggcggattggtgggttagttccgcctcagactttgtgcgcgtgcgtggcgtgggggccttggtagaggggagagcgagaatagtagtggacgacgcgatagccagtggtgcgtttcgacgaaaagaaaaataaaaaccatccaaatttcccccgtttcgcatgcgttttctcgtccaaaaaaagggacctgggagagtggaagagggtttcaattttagaacggctaaatttgaaagttttgttggataaggttgatgatgggtttagcaactccttgatgagaagggaagggattgtttcttcacatgacctgattaatccgtcacaagaactttgccaatttctacatactttctcgagattcatgtgacgtgaggagagagagagagagagagagagagagggagagggggaatgaattggtctcactgccggaaccaaccggcaaccgtaccgcttgactaatctgtctcgtgccggtctcacaacgttccagtggctgacagcgccctcgctaaccttccacgtagtcaattaatgcatcattgctttggattgattagtactaatcaagtgtatattaaatcgattggctaaggcgctaagcatttggggcctttattttggtgttttcttcattttttttggaggtttataggaccttttgggtctcaggaggttaaagtacgtactagtaaaaattaagcttcgatcatgactcttgatgtgaggtcaattctcttaacagggtcgtcacatgcttgcacgtgaaaataagcttagctatgcgaattacttagtttgttaaccttgtgtatgtctcgtaatctaattagttactagtttgttgatgctgtgtcttaacgagaagaacagactatattctcttgggacccgcggttgtactgtttgtctccctagttcccatcccatgtagctatgtaggcatgcaagcccattcggaaacccccaaatagtttctcaaaaaaaagaaaaaaagaaacccccaaatccttcttttaatactacaaaaatactatcttgttgctatctaaaacatatagtaattctaaggaaattcatcttgtgtgtttatttttttttcaatcacttctacatcccaaagttttgctctatttctttatagctgtactacctcacagttctcatccgtatgtacaaatcatgttagttgacctcattttagaaattttttgtagtttcacattttgttgatttggattcgtctaatttcacaaacaaattcacacaacttaaaaaataaccgcccttttaaggttttgacgtagggatcagggcataggtctaccactcaagttttataaagtaaatttcacataactacaattattttatcaaaactatcacttagctacaacttaagccaaacatttcataaaattacaaaaataacaaactattttattaaaaaactataacttttgttgcttacgtgtatttgatacgtgagactaacttacaagagtgcaagtaccacatatgtgctggacaagtgcacccaacctttttattagaaacaatacaaacagatgtgcacactcatccctataaaacgtacacacgcacaccatatcctcataagtacattcgaaagattacactggtggagaaaccatctttggacggtcgaccaaattccacaatagtcccggttgcaataaaaaccaggactaaagattatctttagtcccggttgaaaaggttagagctactttttgatctttagtcccggttggtagatcatctttagtcccggttaaaaaacggtaggtgatgtcaaacccctctaatatctttagtcccggttagtgttaccaaccgggattaaagatcaatctttagtctcggttggtaacaccaaccaggaaaaaagatcagcatgcgtggagagatcgaggcgcggagagatcaaggcgtgcgggatcgagatacatatatcctcctcccctcctccctcccggttctatctcttcttctcctccccttctcctcgctatcttacacgcggaggatcctctcctcctccccctcctctccttctcctccccctcccccctcctccccgatctgcaggcggcggcgccacgcgaggctcctcctccccctccccccactcatccccgatctgcaggcgcggcaccggcctcgcgcggcggccggcgcgcggcgctggctggcggaaggcggaaggtggcggctgggcggcaggcggaagatggcggcttgttttatttttttttgagaatttgtgatccggatttgagatgtatttgatttgtgtgtgatatgaatatgtgatgtatttgtgatgaattttgtagaagttgtgatgtaatttttttaaaagattttgtgatgtatttggagatgatcgatttgaggatttggaggtgataattgatttgggattttggggatggggatggagtgaaatcaatatattaaaaacaatgaagaaaagaatataataaaggagcagccagggatcggcctggctctatctacaccaaccgggactaaagatagatttttactcccggttatttcacccgggactaaatatagcgatctttagtcccggattcgtagttccggttggaaaaccgagactaaaggggggttacgaaccaggagtaaaaactacttctccaccagtgttagcctgacatatatatcctgagaatgatgaagccaccttaggcatcttgttgttgacgagtacgtctcacataccgctgaaagagtaattaactgtaaatgcgagcactcgtgactaaattgttaatagctcaactggttaggtttcatgtggtaagtcttagacttaatacggacttgatagagtggtcaactagcagcactggtctagagagggtcatagataaaaactggaaggcgagcaaaactcatgtctgtgcaagggattgaacaaagaatcaagagaaggaattttcttagtaattctaaaaggacaagaaaaagcatataaattatcacattgataacaaatatagaaattcccaaaataacatgaaaaaaaataaagtatcaatttataacatttacatgagctaatataagatataatggaatgtatatacgaattagggaagggcgcaagtcggccacccgataatccttggaataatttttttaaaaaaaaacaacatgagaggctccaactgtgtcaatcctcataacacttttcaataaaatgaaggaaaaaaagttatgaattaccttcctgttctcgaaaaccaagcactttacatccttaactatgcaaactagataaactacccccgagcattgttttgggcggttttggcataaactggctgacgtggcactccggcgtggcaaaaaatatttttaaaaataatgggcccacatgtcggtctctatatctactctcactcttctacctccttccccctccatctctctctacccttgaactgagaggagatggagacaaaagaagcccaaggtggcggcgaagagtagtcccctgggatgttggcgacagagcgcagtcggccggagaagcctagtgtggtcagccgaagaagcctatggcggcggcggcggtgactagtcccccggggtgccggtggtggagtgcggtcgaccgtgtaagatcaaagtgtgttttgattcttattctgtgatgaataattggcatctatgattattggttttgatatttggagattatcgtcgaagtggttttggagataatcaattttcaggtgatgatcggattcactgttattttatgtgaccagtccgaccgggtggtgtataccggtgagaccggtggtgattaagcggtcagaccggccggcccacggtttgaccggccgacgctacgtcgatttcggtttcgggttgtttgtttggatatccgtgattgtttcatggttatggcttctagatggatattatacgtatgtaatactgttgtttgctaacaatgagtcaagttggggatagcttggtctcggaatatggtttctttgtttatttcatgtgtaggtgactcgatgcctcgggagagtatttgcggtgatggaccgggagtcggcttggtggtaagacgatgtccgtggtggttagatatcatgcgggatactaagactagagttgatgcacgtggttggtgaagattccatatggcatacgatggaggtattgtgtgcgtatgggatgcggagtcgaatttggaaggagtccaaatttggtacaattggttatgtaaagtttgtgtcttgtactatagggtttcctaagatgtttaggactcttagtatgagtttggttcgtggctttaggctgcctaccttatgtataaatagagggggagcgtgaggcttcccggtatcgcttttgagagcaattgagttgctagtttagttagggtttcgagtttagtcgagatttttgtaaggagtgctgttggtgtactttataaacacagacagaagtaataaagttgtcatctactttgagagttcttcgatttgtgtttcatcgggtttcagcggtctaaccggcgacataccggcggttagaccggcggcaggcggcggtcagaccgacggaggagaggcggtcagactggcagcgacttcacacgtggcaggcaatcttcaggcggttggaccggcggatcaacaccggtcagaccggcggcacgagctcggtcagactggcggatcaacctcagtcagaccgatctacatcgaatttgatggtaacttttatttccgctaaaagattgggtttttgggtatatcaaccattcacccccctctggttggcttagttcttgtgattcgatcctacagaccggacaagcctagggtggcagtggcggagactagtcccccgcggcgtcagcagtggagcatggttggccagagaatcttatggcagcaacgatgcgcggttgaccgaataagcccagtggcgatggtagactggtagacggcagtgggctcgtcgccgctttcatgcaagctccaactctgccaccgcagccatcacctttgtgcaagctccgctacctctaccgatgcctttagtgccctctccaaggcgagccatccacgagctctgtcgtgagtagagccccgccgctgtgtagctccaccccttggaggccactggctaccacggtcgccaggttatgggatccgccatctcctccctgctcagctcgattatagagagagaggatggggattgaggaagagagggatagagtagagagaaaaaggtgagaggggtgagtacgatatgtggggcccactgattttttaaaaaacaattgctgactggactgccatgtaggatcaaaaccatttcagattgagttaggggtattttatccggtttgtatagttgagggtgtaaaatatctggttttcgagttcaggggataactcggtcgatcacgatggttagggggtaatttatacttattttctaaaatgaactatgaatcactttttagacttcaaaaataaagtttagttaggccccgtttggtagggctctaaactctaactcccagctcccaactccaactgcagtgagagctagctcctataggagctgaagtgggtacgaaagtgtttggctagattagttagctccactctaccacgttccttgtaggcatttcgttgaacaccaggttggcatcggctgtcactgctgtcgcctgccgacgcccgcgcgcctgccgcgccaccactgcccgccgccgccaacgcagcccgtcgacgcccaccgctgacgccgacgtcaccgtccgtcgctgctgtagggagggaggaggatggggaggagagagaatgggaggagaggtgtgaaggggtagttcagtggcatttttatgtaaatacattaaaaatttaaagggtagtgggtcttttgaggtggagtggagttatggagcagtaaaacccagctccacccccgtagttcatttattaggagtagctatgccaactccactgccaaaaaagaaggatctggactgtttgacacagctccgacttcaagtaagttggagttaggagctggagttgtgccaaacgggaccttaattacagtagtatcaactaaagtgggccaagttttacctgcaagtcggttcttttgtaatgcatataagactattagccttattgctttcgttatgcttatcttatctgtatggtttattagtaatctatatacagtttgtgagtaaaagttttatatacttgttattagcgttttgaaaacaaatattgtaaaataatctataacgaaaaaaccacaaaatcaactctagaactaaaactaagctctaaaatttaacttttagcttaattataagcataattagaagtgaaataatgggcataagtgaattaattttttgcttaattataagcataagcttaatcactgttacatgttactccctccgtcccctaatataagtgttacatgttactccctccgtctcctaatataagggatttcgtcccctaatataagggattttgacattttgtttgcgctgtttgatcattcgtcttattaaattttttttgaattattatttttttgacttactttaacatccaaagtactttaagcataccttttcgttttttatatttgcacaatttttttaaataaaactagtggtcaaacaatgtaagcaaaatgttaaaataccttatatttgggtaagggggagtagttggtaaaaattgttaaatccttttgtaggaggcaaaggacacaatataaaatttaattcgaattgtacagtgcatcaacgcgtcgattttacctcgatttttgttaacacgctttttaaacgattaaacggtatgttccgtgaaaaactttatattttaaaatatcaaatatatctatttattaaatttgtaataattaaaccttaattaattatgtgctaatgattttctcattttaaatgtaccaacttaatctccattttcatccgtttcaaacacctcaacctggctagattcactctagcgaagatgaactatcatattcgtacatacgcatgggcagatcgactagctcgtcggtatttccactgttaattcttcacaatataggaatgcgattggacgagttgaataagactactgtcttccgtccaattgattaacactaattaagctcacgtattataacttcctacgaaacagattttcccttttattaactagagtcgacggatagatgtagcatatcattgcagcaactagcaagttctcccctgaccagccaaagcggccaatgtacgtgacgcgatttcgagggtactaccgtactactaccagtctactagtactactccaacttgcaaagtccccatcacgcgggtggttaggtagcttgtgaggggttcacgatctccgtgctcacgcagggctcgagtcgagcgcgctgtgcagcaagcaacgatgcatgctgtgcgcgcggcggcgccgcccaccgcccaccgatctcccggggcatagccaccttcagttttgtgcagtaccagccgtggcaacgcttttcacggtggaaatattgtttccaacttccaaaagtacatacgtgtactactctgtagtccgtatgctctcagtttttgggcggcacccaattaataatacttattcatacaaataaaaatataatgacgtttgtcataaaattctttacgtcccattacgttttttttcaatcccttatgtatttttgaattttgtcttgtccagtatatataccttgaatttttattttttggatggaacggttcaaatcctgttgcaaagttcgttagaccccgggctagggaccttcagcagtgagctagttggatttcgtagggcaggaacatggttcacatcttgttcaaaattcatcgcctaaaatttgaagctctccctcaatctgctctgttttttttgggtcaaatttcaaacaaaatttagtgaatttcaaaaattcgctcgaaattcatgaaattagttatctcgtgaaccctcggcaggaacgcgtggcgagagcaagtgctcgcttgatcattagtctttggagaaccttccaaatagcatgcgacagtgtgacacagtgatagcagtgtaaagtggcgtgcgatgctaaccagggttttccatagcatccgtggagaggttatcgtcccccttgctaagacggttattgcaataacatcatggtaactgtcaaaaaccatgtgaattccatcttaaaaagataaattcagaatattcaaatctcatcgaagataatggttatataatggttaccgcgaggcatggttcgtttgacttggaataaaaaagacgaggataaaagaaaaccacaacctcacactgacaataatgtaacaaactaacatggtggtccgcacagattgcgcggctagcatcattatattttctctcatataatagcatatatgttttctcattatattattcaaatatattaaaatgacatcataattttaaattttgcaataactttacgaaactacaaatgtgtaatattcatattgtattttatatacgtgttagttattaattatttttaatatcaaattttagttatttgtaaattatatatattcctatatggactctagactcgtcttttaatatatattttttaataccgaattttctgtaaattgtatttctatatagactctaggctcttcttccaatattatttatttttatttctgaatttttattatttctaattgtatttctatgtggactctaaactcatctatcaatattctttaatttttaatttttaattttagttacttataaattgtattcctatattgactttaaactctttttcccatgtttttcttaatttcgaattttagttatttgtaaattgtatttttatatggactcaaaactctaattttaattttattatgtttatttcaaattttagttagttttaaattcctatatggactgtatactctacttctaatattccttattttttaattccgaatttcttttttttttcttaattgtatttctatatggactctatactctacttctaatattccttatttttaattccgaatttctattatttcctaattgtatttctatatggactctatactctacttctaatattccttatttttaattccgaattttagttatttcctaattgtatttatatatggactctagtctcctcttctaatattccttattttttaattccaaatttcaactatttctaaattgtatttctatatggactctagtctcctcttctaatattccttattttttaattccgaatttaatctatttctaaattgtatttctatatggactttgttttttctttttctccgattaatatgagaatttctaggccatgagagcgaacgtggaagctcctttttctattcctttaataatataactagcatggtgacccgtgcagattacgcggctagcatcattatattttctgtcatataataacatatatgttttcttaatgtattattcaaatatattaaaatgacaacataattttaattttgtactacctttacgaaactactaatgtataatatttatattgtattttatatacgtgttagttattaattatttctaatattaaattttagttatttgtaaattatattcctatatggactctaggctcttcttcgactattatttatttttaattatgaatttttattatttctaattgtatttctatgtggactctaaactcatcatttaatattatttaatttttaatttcgaatttaagttacttctaaattgtatttttatattgactttagactcttcttcccatgttttttaatttcgaattttagttatttataaattgtatttttttataaactctaaactctacttttaattttattgtgtttattccgaattttagttagttttaaattcttatatggactctatactctacttctaatattccttatttttaattccgaatttctattatttcttaattgtatttctatatgtactatatactctacttttaatattccttatttttagttccgaatttctattatttcttaattgtatttctatatggactctataatctacttctaatattccttatttttaattccgaatttctattgtttctcaattgtatttctatatggactctagtctcctcttccaatattccttattttttaattctgaatttcaactatttctaaattatatttctatatgaactctgtttttctttttctctgattaatgtggaaatttttaggccgtgagagcgaacgtggaggctcctttttctattcctttaataagttaatagatagattacaaagattatgacatccacaatatatatgtctcaagcattaaatcttcatttcaccttatagtcatgccaaaatacagagttagcttagtgtttttcacaaattttatcaacaaatatcattataaatcatgtagaaccactttggaccttttttttttgctatttcccccgccccccctcctttttttcaaaatttgaattcaaacaatttttgtcaaacccaattgtaagtaaccctatcgtgcccccactgcaaatatggtcaatgcggtaaccgcgtggttaccgatggtttgggaaaccctaatgcttttttcgatagggttaattgacgttttacagcccatttaaaaagctactccatccgttctattttaagcgcatccatgagtttctgtgtcaaactttaatcgtccgtcttatttgaaaaaaattaaaaaaacataagtcacgcataaagtactattcagattttatgatctaatagcaatgaaaatattaatcataaaaaatttcaaataagatggataattaaagttggacacggaaactcatgactgcgctaaatgagagtgagggagtactccattatatgagatgcatgaagaaacgtaggagcactgcaatttttgtgttaccatcaaacagggcaacttctgaagcttttctccaacgtgagtaatgcgattgagacttgcgcgtccgttccattgcgtttctttcacactttctaactcaacattgatcctagctacttgttgcattccaatgagaatatcaaataatagagattacgtggtgtaggatgcccaaacaacaaacccagccattgccttttttgcatgatctgactgattaaacctacttttcatgcgtgatacatgtcttagcatacatatcgttgtcctgaatcctgaatatattgcgtgtcacctgcgtagcgccaagcatcactgtcaaatgaactgtacccagttactgagcagaatctcacctgtttattttcagcaacaaactcatcaggcgaatagaaattagaacctagaaggctagaatactctgcacagcatcatctttctttgctgcccttttccagagtcaaatttagcaaggaaaaaagaagctcagcctcatttgtttccttttgccttttcccctttttaacgtccttctaagaataaaggttatccactgcatatatttcgtccttatactgatgatcacgtgaatattcgcctcttcgtgatcttccatttgattcttcttcttttcaccgtgcatgtccccttcactgaaaacatcagctagctgttgttgttgttatcaaaaggcaaatctcatcagccaaaaaaaagttgcgtcttgtacccctaatataattggattggaacctgccctaacttgtgaaatacgggtttgcgtggccctgtgcttggaaagcaggtgcgaattcctcgccaacttgagcttcagaaaatagccgcactagctacctttgttgcttcatgtcgccctcgcgtcacagatgaacctcacaaaatattgctggtcgatcgatccacatatttccggggaatgatactttctgacagaatatatgtgtgtttcagatatgttatttgtgccttttggcttagctgaagaatagcatttcgtggctagctataatgtcattgagcttctaccgtcgatgcatttgcaatctgtaaaactctcctttcagtcttaacaatatttgattggtcgtctcttcggccaacccggcaaaaaaaaaaaaaaaagaaaaagaagagagagagatgtcattcagtttggctggtcatattttttatctgttctgtactgtaaacattttcacaagagaggatatatctcggtttgcggcttaggatttgtagttgtactatataccgcatcttgttgtaaataaggagtagggatgatggaagagtatgactgtatgaggtcagaattcagtgtgcgctaggacaagaattagcctgaaagtcaccactaaacaatgactttgctttcagaatgccaaaaggtcacacctagtatattagcagtaccatctcatcatagggggtttcatttgggtgagagataggcacaacacgtaagacagaaatattttgggcatatatacacttaaagcgtcatgatgtggcttttagatcttactagtagatggataggagagagatcaccacatttgcaggaacaactagacctttttagatgggactaaaacttttaaatccctatcacatcaaatattttgacactaattataaatattaaacatagactattaataaaaacccatccataatcttatactaattcgcgaaacaaatctattgagcctaattaatccatgattagcctatgtgatgctacagtaaacattctttaattatggattaattaggcttaaaaaatttgtctcgcaaattagcttttatttatataattagttttgtaagttgtctatatttaatactctaaattagtatctaaatatagagactaaagttaagtctctgcattcacctaaaacttactttaaataaaaaatagtgcttccaacacttctttttttcgaataagaagtgcttccaacactaggaccctgtcttttgtttgtgccactatgacagtgacagagcaacgggcatcatgctagagccccctttggcaaagctctccaaatgcaaagctatcacagttgtagagtaatttaaagcggcctatgctgatacattgcagcaatgtgtaaactaacttttgcttatgtcaattcatgtctcccttcaaaacagagaaaaaccaatgcaggatggtaaccgatcgagaaaattgcaaataaaaaaactgcacattgagatgcatgatgaacacagtagagtttagtcccatgaaaatgaagtagataacatttcctaacatatacagagatagaaaagagtaaaccacggttcatgtacatgaataaacaaatttagacagagaacaacgatgacaacgaacgaaggcatgcaacaagtagtagcgcacagtacacaagcagcagcagtagcagcagacacggcaacggcacattgtgtgtttgtaccgatcgaaatatatgtagcgtagcgtagcagagagccagagaggcaaagcgggagggatcgatcgatcgatcgatcaggcctcgtcggcggcggcggcgtcgtcgtcctcgtcgtagtcgtcctcggcggtggcgtcctggtactgctggtactcggcgacgaggtcgttcatgttgctctcggcctcggtgaactccatctcgtccattccctcgctggtgtaccagtggaggaaggccttgcggcggaacatggcggtgaactgctcgctgacgcggcggaacatctcctggatggaggtggagttgccgacgaaggtggacgccatggagaggccgacgggggggatgtcgcagacgctggacttgacgttgttggggatccactccacgaagtaggacgagttcttgttctgcacgttgatcatctgctcgtccacctccttggtgctcatcctgccccggaacatggcggacgccgtgaggtagcggccgtggcgcgggtcggcggcgcacatcatgttcttggcgtcccacatctgctgcgtcagctccggcaccgtcagcgccctgtactgctgcgacccgcgcgacgtcagcggcgcgaaccccaccatgaagaagtgcagccgcgggaacgggatcaggttcaccgccagcttcctcaggtccgagttcagctgccccgggaaccgcaggcagcacgtcaccccgctcatcgtcgccgatatcaggtggttcaggtcaccaactacaacaacagcaaattgatcattatttccatcatgttaatttcaagcaaattacacacacaaggtcaaggtgcatgatcgcttcgcttacatgatgggttggtgagcttgagggtgcggaagcagatgtcgtagagggcctcgttgtcgaggaccatgcactcgtcggcgttctcgacgagctggtgcacggacagcgtcgcgttgtagggctccaccacggtgtccgacaccttgggcgacgggaacacggagaaggtcagcatcatgcggtccgggtactcctccctgatcttggagatgagcagcgtgcccatgcccgaccccgtgcctcctcccagcgagtggcacacctggaatcctgcactcacaaaattgcatgtcactcacgttactacatactccctccgtatcaaaacaaaccaactatccatcagtagttataggacattactcagattaggataagtatatgagacatcttaactgaaaatgaaaatgatctgaactctactgtacattgaggtttagacatttaaccgagctaaagttcagatgcccctgttaagagtcatgaaagtgcaaacaattcaagaaactagcaccgcattatctgtcctatcagatctccggactaatcatattcctgtagtactaatttgtgtttctaataatatgtaagttgaatccgaaaatgtgtttatattctgtttctgatgattacgtgcactaaaatccatctcccaaatacgtccaaaggcaatcatgctaagtacatatgcaagtaatcagaacatcatcactaatataatccatccatcgatctatcatgtaacccaaccaccagagactggcaacagcctgtctgagtgtctcatccgctgtaaccaccaccgacggctctgttccattagctgatacatcctcctcctccttcactctttcttgtgttaggtcgtacaacattgtcactagtcacagtatgattgtttttctactactagtagtacattattattgtgatgatgataacctcatgaaccttcaccggcaaaagaagatggtgagatgcgatggtgatgtatttctgtaccgaaaactcgcatctgaccgacaataccagttgtttgccacctgaggaactgatgaaaactctctctcaacgacaattctattcgccagaaagtagcagttaggggatttttttttttagtttgttgctgggttcaattcgtttgggcatacgttgtacctcgcattttcaagaaaacaatgataattactgattactgggtaacatttttaacatgcatatcttacatcttggcaatgaatgaatgcataatagtcagattcaccttttatgcatagagggaaaaatagtattcagcgcacataagcagtactctgtacctcaagtattctgtgaattttttgtgcacttgaagtttttagaaccttcataacatgtatccatagtgttccaatttttaagcagttgattcaactcgatataagatttacagatctaacacagagaactactgaaatttaaaccaacaatatatggcgcctcaatttctagcctgtgttgatcccgatttcccatcatgccaatggatcaacttgacacaggatgaatgtctcattccgacaggtggaagtggtgtaatgtgatggggactgaaaataataatttcatcttattcgattttttttttgaagatattcccaatttcaaccacgagtaaagatgttgtgcttctgtctgattaacccgatccaaccagtactactatgtatcatgtatggtcttttccatgtatgtccaaatttgggttcaacaactggtgctgctggtattcctattcaaatccaacctaaaatggtatgataagtttgcacactgaaattcatccttgaaatttgcagcactactggtttgttttgctcctcaaattgaacaattcacactctcataactggaaccaccaattcatttttattttattttttttctgagacccacaagcaattcataccagattgctcattatcaatgctgccaagttggcgtattactctgttgtctaacaaaagaaaaaaaaaactccagattcttttcatgcggatcttaacacgctgcggtgataggctaataatgtgtagcataatactgtcttacctaaaaatacacacagaaagtacaaaccttgtccacttttaggatgccaccgtctaaaatgatcttgccaaaaaaaaagttaaagaatcatatgatcctattctaaattttcagcgacggtttacagaggcccgagaaacacgtatgcagagaaaatgcagaggaatgccatgaacgcaaggattcgttttttctttttttaacgaaacacagtgaatttaaagaacaagaggatatgtatatataaaatcgacgtgtacgttaccttggaggcagtcgcagttctcggcctccttgcggacgacgtcgaggacggagtcgatgagctcggcgccctcggtgtagtggcccttggcccagttgttgccggcgccggactggccgaagacgaagttgtcggggcggaagatgccgccgatggggccggagcggagcgagtccatggtgcccggctcgaggtccatgagcacggcgcgcgggacgtggcggccgccgctcgcctcgttgaagtagacgttgatccgctcgagctgctgcggcgacgtgccggtgtacgtccccgtggggtcgacgccgtgctcgccgcagatcacctcccagaacttggcgccgatctggttgccgcactgcccgccctggatgtgcaggatctccctcatcttcgatcgcttgcacctcgatcgatcgctcgccgcgcgccgatcggtgatccgatctctttcttggttgttcttgggaggtggtttgcgatcgatcgatggagagagggtggagaacgtgggaaggagaggaggagggatcgtgggcgcttatatcccgcgtttggagggaaccgcttctctttctgggtgttatggttgtgcgtggaccaggtgtatggacaaatgcttacacgtattgatatcgcttcaatttatttatttttttacggttgtcttcgaattttaaagagacggttttctttggaactttaaatttttataggtgacgcgttatttttggtctgagtgtgttttggttattgcaaaagaaaggttgatcaagcgaagtacttaatttgtgtggacatctgttttatattataaatcgttttaatttttttcctaatataaatgcaatagtatttttaacataaacaaacatattgtcaagatatactgaatgttacactaatatgatgttaaagatgttatttttttctataaacttgattaaatataaagttgaaatgacttataatataaaacggagagaatactaaaaattttgttgtggatttgttgcaggtcaggtataaatctagttgtactaaatgttcgttttaattagcgatatggaattatggatgtgagtattgaagtacctgtgtagaccatgactccatgagtatgtaaagatgtgccagggtagaccgcatgaggtactgtggtatcaaaggggtgtggggacgatcacgttgtgctgtctattttttctgccacattttatttttggctgggtgcagtggcgggtcaccaaataatgggatcaatgctaatttactacggatcaatttggtacctgcaagcacacttaggcctagttacagatcagaggaagaaaatagcaaaatcatggagcactacttttctactacagtattagtatggggtaagttttttttttggtacaactttttttgaaagatagttatatgttattagagggcacattatattggcatatttgccactagtagtatttctgaatgtcaaaattttttaaggcgtgtctcaagaggaatggatccatattaattttaaaggcctttgttacctggtagagactgtcataaaatctcttcatttacacgtccacatgtgtacatcctttgggaattttgatatgtactacttccttcgtcctaaatataacacatcctagttctacaaatttaagcagtcctcctatacaaatttacaacactataatgtgtcacgttttgtagtaggtttattttcttaacagaggaagtagttcactagttctctacttgcacatagccagaagttggctttttttgggatagagggagtagttcacatgtgagagtacatagtactggtacttatatgtgtcaagattcattaacatatatataaatatagacaatcgtagaaagttttataatctaaaacggaggtaatactattttagaggaagaagaaccttttaaaatgaatttctttcgtacgtgaatatatatatatatatatatatatatatataatatacatacatatgcacaatttactactccctttcttttaaaataatttatattttttaaaatttaataatcttttgtatgtaaatctggacaagtcgattgattttggaacggaagaataccctaagaaagtacactcccctgccaatgaagagaaaatgagaaaacaagtacactgattgttattagtatatttaaaccaagtttggtatgacttattgtgtgctcgaaaaagtacggagacagcttggccaacaagtgttctttttatgattaatataaatagatatcaagagaaaagttagctgtcaacttgtccatagtgttacattgctctagccttgtcacgttcaaatactgtttgccatggcatttgcaaggagaagatgctgttcttgatttctttcgcatcattatcatgatgatcatcaagtcattgtacatacatatatatactcgatgattgtaaacgttaccataccaaccaataattatattccgagataggatccggagactggaggggactgttttgagtccatcagtccacatgcaccagcacatgttgtgtctgtcttaaaccaaccgatatcatatcatctaattaactattaacttctcttcctaacaggtgacagccatttttttgctagattaataccattgtttttttaaaattactccctgtgtacaactccaaattttctctcgtccaaaaataatgtcagatttctaaatggtcttttccaaaattgtccctgttgaaagcgacgtatatatcttagattcttgaaactgcgatcaaataatagcttagctataggcctgaagcttagtttcgtaaacagtttctggcccagtataaccaagcggcgttcttaacttgcggctatggttgggctgcacggcctgcaggttacccagaccagacaggtgtatagctgcagagctagagaacgaatatgtccacattgactccctcaggtatagctttaatctaattcttatacttcaaccgtaatacctgatatcttaaccccaactattaaaacttatgtaataatatgattcccttaatagttttggaggacagcttcgctgaattggcactttgacctggtccaaaccggctgacttagtatgtgggacccagtgcaaccgctagagaacgactaattaaagtgggcttggcacgataattttgggctcgacgtagtaggtcgctgataaagatggcctaggagctgcatgtatggtccagaggtggtgaaatggactagagcctagaggagtgcggagagacacaaaaaaggcccatatagaatagccattaacataaggcaaaatttgctacaggacatgtaattagccgaagaacaccggaagaatgtgtatatgctggagagcatcgtaaaacactggtaattagctgatgtacactcacgacattattttattatttctggagaaaatagagagagaaacagttgtgaaattatggttttacccttgaaccccaataaaggctcactctcctgtgggacccacctattagggaatattattttttttctttttctctcctactgtactccttcgtcttcctttcttcgtcatgtcttcttccatgatggccagcccctccccacccatcgcggctccagggatagagttcacggcgccgccgccggggcgcgaccacacgcaggattgctcgctcacctacgcgcagtggaaggaggtggacgcctccacgcgccaccgcctctcgctcgacgcccgtgccgcgctcggctacaccgctcagaggatcttcgcgcggttcatggccatcaccaagctcacgctccgctacgcccagggctccgggacggacagcctctctgacgacggggcacgccatgtggtcgccgcgctgccgtccgaatggctcgccaggctcaagctccgcggcctccggcagctcttcgacgacgggattgcgtcgctcgctggggccacgccggtgatccgtaaactgtccgtcgcatccatcagttttgggccgaaggccttcgtcaccgtcctccggtcatgccccctcctcgaggacctctccgtcaagcgccttcgcggcctcctgtaatctcacggcgtccggctgggagcaagagccagagaccacgaggagcacccaggcgttggcggtggcgaggaagaggcccgtggggccgtggacgcagccggaaccggagacgacgaggagcagaccgggggagccggtgaggaagccataggggcaaacttgtctttaatggatatttctctctccattttctctggaaataataaaataatactgtgagtgtccaacagctaattaccaattttttatggtgctctccagcaaatacgggttcttacggtgtcccctagctaattaaaggttttttggatgtcttgtagcaaattttcactattccaaccaggatacgcatgaaaaacagagcgatccattagcgcgtgaataattaaatattacttttttaaaaaaatagattaatttaagttctttaagcaactttcatatagaaacttttttaaaaaaatgcaccgtttagcagcttaaaaaacatgcgcgcggaaaacgagggagaggggttagaaaaagggtgtgccgaacacaacatattcctctacaatagtcacaaacccgtgcgttacaacggaacgggatctggtgaacgtggttaacggagccatcgtttcgcttattgacatatttgcaaagcaaaaatactttgtgaataaaacttttatatacgtgttcttagcggtctaaaagcaaatattgaaaaataaacttcgatgaaaaaaccttaaaatcagctacaaatttaaagttgaaaattcaaattttggctgataaatataaacataaatgaaaagataaggccctaaaattttctgttcttctgtatttctctcttggctagtacaccagttttgttcatgggatcctataatcttataatactatacaagtgatccccacttagtgcagttattagggattttcctgagctgtggttaaggcacgtcaccctttttttcagccgttcgatcaaatcctcgccaaccgttcgattgcaatccatcacgcacatccctccgccactgatttgttgccgccgccgccgccgccccgggtctcccccatcgcgcactgcttcctcccaccaatccccacgcgcgctcgcttcctctcccccatcgcgcgcgcaccagcgcgggcccgccgccgaacgccctcgcttcctccatcgcacgtgcgccaggcgcgggcccgccaccgacgccctcgcttcctctcccgtgccgcgtcgcgtcatccctagcgcgagccagcctcttcggctccttggcatgtaggaatgaaacaacaatcgtcctatctcccccaatcgttgtgattccatgccgtaacgttaaattctttgctcgccctattgtgccacaaaatcgaagcaaaattaggatacgaatgtggtatattcatggttgccttcataagctgtctttaaatcccaactcgatctgtgcctatcatgctatggaggattgatcactgggttcatcattcgtgaaggctattgcaactggcatgcttctgatctctatcttggttggattattttgtgcaaatcatttcatcgtttcatctcggcttcttcacgtgagacaacagctgatttgtgtattccgtctaccctcaagtggataaggtagcattttctcatccctcatcctgtcatgtttagtttaattatgggctctccatactgaaacagggtggtttagcttttggatgagttcattgactgtactcatctttttctccctgtacaaaaaactgcaatgctgtaggtgttctttcggtgaggcccctgcatgatgcaattctttttcgttttgtattattatgttattttccctgtaatgttaaatcattcctatttgctgatcgatttggcagaacagctcttgcggtaattgctgggaagataaattctgatcattaatttttaccttcaattttttttaattccaaaagagaattcagttctcttctaaaatgcatgaaagtgatttccgaaaattcagcactatattaattgattttttaaatttattttcttacagcaatatcatttatttccattctataaccccatctctatcatatcgaccaaaagaacaatgcaactattggtctctgttttgtaccaaagcaaagcgcaatgaacatgtattctttctttcaggcctaaagtccatatgtgttaactacaaacattacctggcctcttcctgcttacagtttgcaagtttctgaccaaacttttaagagtagttgattttgccgatttacttcatccacatgatctatataaggacatagactatttatgatttataaaggtaaaattaatactccctccgtattttaatgtatgacgccgttgactttttaatcaacgtttgaccacttgtcttattcaaaatttttatgtaaatataaaaatacttatgtcatgcttaaagaacatttgatgagaaatcaagtcacaataaaataaattataattacataaattttttgaataagatgaatggtcaaacgtttgttaaaaaatcaacggtgtcatacattaaaatacggagggagtagaatatagctgtaatttagtacactaaaaccaatatgagaggttagatcgattaatgttagcatggactaggctaatatatttttatgttagccttaattactttgctaattactttgttaatcaagcaggggacgtactactacacgaggcggagccccggtacttgcccgttgtggtcggcccttggctacacccatgacggttatttcctacccgtataataaattacccatttaacacatactcagaatacgtacccacgagcatgttctcttttggcacatggacactaaggatgtgtttagttcacactagaattggaagtttgattgaaattaaaacaatgtgatgaaaaagttgaaagtttatgtgtgtagaaaagttttgatgtaatggaaaatttagaagtttaaagaaaaagttgggaaactaggcctaaaagataggagagaaacgataaaactttgaacatgagagtaagtttaatagtatagtcaactactaactccaattcatctatagccaatcttatagctcattcatacaataattacatactacactattaatatatagtcccacctgtcgtatacatactacgtcttggagtccgtgctacagctggctataaatctgtagaccgctgcttttctctctctttatttatcttactaaaatatgtttgcagctggcttatagcctgctattgtatctgctcttatgtgcatagtcatacgtcaattactaacttagagctagcatctcaatcaaagtggttacatacggaccatccgatttgatatcctacgtgtgaattcgctcactaaagttgcacattcgcctcaattgagcttccaaaaaccactctcgtctgttccatttggtgctcggtgtaggtgacagtgtcgtaggtgacgttcttgaggaagatcttgatcacgccacatgttcctcgtagatgagcctggagatgcgcttgggcatgccgcgggtctcctcgtaaatgaaactagatgataccccgcgcgttgctgtgggatatcgtgcctaaataactttggagaaatgggcacatatatataataaagatctatacaaaaattaacactgcaagctagttttcagtggcatgcataatttctaatgtcaacctgcttagtggagcatcactgcgtacggctgcaatcacgtggatgaaataaatcggcaaaatctaacgagatctctaattttattgggtgcatgcattatatttattagattaatccaaactataaggtgataataattatttcttagtttttagctaaggtggttgtgctttatattttggaatggagggagtatgtaataattggttatagtttatttgaaataaagaccagaacaaaaatagtatgtgtggatggtgtgtatacacgtgtacaatcttctatgtaaccataaaaaagagctcacaaggtcgtacttaggcattaagagcccattgtcgacgtttgatgtcgcgattccggtatttgcatattatgaggatcattggtactaggatatatgtgagattgtaataaaagagatggggccctgaattgtcaggtaataaccctactcctgttggccgaagccggtcgttgctcttatttatcataatcacaccagtacaatatttggggtagtctatctatctgtcgtcgacttggcggccataaaaccatctcgtagtcgacaagagagtaatcttcctcctcgaatccgtgtccggcgagatcaaagacagcgctatgtctctcctgacagtatccgtagacaccgtaggggactagccatgcttatctctgaagtcgatatccggcgtcttgtcttggcgtatgttggcttgtatgttgatcttgtgtttgatctattgttccgtgtcccctctccttctagggggtcttgtatttatacccgtaggtgtccccttgtccaagtagaactagggaaaccaatatggatacaatccgagtagttcttgtcgtttccatgtagaactctattcatccttccttatgcggaactcctcctatatccgaaggttgtttccgtataagacatggtatgtggtgggtcctgccgagatttagtcaactactattagatatgtggtatccataaccctaacacctatcttttgggttatattcatgcttacccataagtcgtattagcaacttaaaaaaataatttgtaggtaaaatttatacatatgtactcttaactatgcaacagcaaatgctataaaataaattatgattaaaaaggaaaaaataactctgaaataagttttaaaatttaaatttaaatttaagtaaaaacatgaggctgtaacactagtacgacctatatagcccgtatacgcttgcaatatggatcagtggatgcggccacgtagggggagtgggccgttcaatgtggtatggccgggccgtccttcacgtcttgcgcgtgacggcgcaagtacagggccaacacagccagcctgagaggaccaacacaactctcttaagactgtgcaggtaaaatgccttcccctttaggttgtgtttggattcaaagtttggatccaaacttcagacattttccatcacatcaatttatcatacatataacttttcagtcacatcattttcaatttcaaccaaaatttaaactttacgctgaactaaacacagccttaatggctttctcttcggcctcgcgagggagcgaatacatagctacagtagctcgcacgacccgtgcggccctgccacgagtaactgagaatcctgactactcaaggacgacgcatcaatgcatactccagtatgagggaaatgattaaatttgcacggttcacttcattgttctgttttccgttcacatcgcacatctagatgaggaaattgttttattttcctttctaaaaaaaagaaaaaaacatctgtttgtaggtgcgagtgtgatacgcgtgcgtcccacatgtactcgaaaagataggttctcttcatgaaacaatcatgtcaaattcataaattttagtatgacaaactttctttggtataacttggcaaaccattaccaattcagaaatttcggacaagacagggaggcgatctccctctcgaccctcaaagtatctccaacagtctctccaaattccactctccaaatgtctatttagccaactctccatttaatttggcaagtcaattcgttgtttctttcaacagcatctccattcatcctctctattctgagtctatgacagcaggacccacatgtcaccctatatactactttctttctcatcatcctgctcccactcttccccaagcccccttttgcttgcggtagtggtagttactcgcggcgatggcggggcggcggtggccgtgagcagcaacggcgagacattcctgagctcctccccacctctctccctctgctgcggtggcgacatgcacacgacggcggacagcaaggggaggcagcgagtgcagggggctaagtccacgcgacggtgagtgcagggagctaagtccacgcgacgtccgccctttcttattcctcatacttctttctttcctccacacccctcgtctccgtgctagtggcgctcctctgcgtggcggtggtgtcgccggcggaggtgggggggcacggtttgtgtgcctctgctccggcgatggaggctgacgatgggggcgacggtgagggatgacgaagactgcggcggcagcgaaatgggagaagccggccccactgctgcctcatctcctatctcactagcgccacccacctccttcccccgctcgctggcgtcacgagcccaccacccccttttcgcctgcccccaccgcctccaacgccgagacccacctctccttccgcggctggttcggtggcccccttcatcttctcctggggtgaggccagggagggcgacggttgaggcggtggcggcggaggaggcagtggtgggctcgggggcgtcttttgggcaggcgcagcgccgtcaccaccggcagtggcggctgcggccgcgggcggcatcggtggatggatggcgcgaggccgacagcgcggaggacgatggatgatgcgatggcgtgaggcagacgacgcgaaggacgatggatgatgcgagagtggagatagggagcaggaatgtgtggggcccatggttggctagtcacttttggctggccaaatttggctagtggagggaaggttttagccagctagatgacttagtcattcggttggagaggttgttggagggtgtttttttggctagaatggagagtggaatagtgaggctgttggagatgctcttagctagcaatccccactaccgcgccagctgcccttccctgctcccacttcacaaccccttccttttttttctcttctttctttgccttcatcgtcatcgtcatgcgaagcttcccaggtgatgggattttgttgctcacgccatcaccgaatcacggcgacttccatgccacgtggatggggctcggctgaatggagcgcctccccaactaggccagttggagcattgtcatggcaactcattgaggttgtggacgacggcgcgcgggctactcgtcggcagggttttaaatttcgatttcggctaaaatttcgaccatttcagtagaaccaaaatttctaaaatttcagtattttttgggccaaaattttatgaaattttgacacaatttaattgaatttgactaaattcacaaagaacatgagaaaaatcgaaaatttcggctgagatattgacttgccgggggaccggaatttcggaaatttcgaaataaaattttaatccctactcgtcggtgctagggcaagaggcgttgtaggcagcatggcgcctcggtggggccatggtgttgacgacacaacgatctaaggggggtagatcgccgctgtttatggcatgtctggcttgcccgcctccagtgcgttgttcgtggtgtttccatgacaatggtattctccaatactcactgtgtgtgatgagcaggttatgggatggtgaaaaccttgtaggattctaactgggatttgatgacactctcgagcaccatttcctcattggaggcgtcgccactgtcccccaagtgaaaacattgctttgtttttctggacgagcggtggtggtgtctcacgccccgtcctctatggaggcattgctttggaggatttgtgcgacggtgactatttttttatcggctttgatggctgtgtcggtggcaatatctagactaacgatttatctactactcagttactctcagcattatcttttgcctcgatttgacttcaatcgtcaatagtgatataagcaaaataagatcaacaaaatgattggtcactgatttcagagatgctatttcctaatttcataacttgcaagccgctatgaaacaacggttatacaattcctcgctaggctacgttcggatatgggagatgggaactcattctctctgcacgaaaaacggagcggtctattagcgcgcgattaattaagtagtattagttattttttttcaaaaatggattaatatgattttttaaaacaactttcgtatattaactttttttaaaaaacgcaccgtttagtagtttgaaaagcgtacgcgcggaacacgagggagtggggtcaggaaccctttgcaactagggctgtcaacgagccgagctcgagtgagtctggctatgtaggctcgagcttgacagtttaacttggtgaaactccaaagaactttctcttgtataagagatattaatgcaaattatcggtagtcaaaattaatgggtgctacttgtcttgaatgaagcctcttcagctttcttatgaattcatgactttgaaacgttgcaattaacaaaagctagctactacatctaataggaatagtagtactattactggcagccggataattgctttattgagaagcatttataaggtcttgagacattagtaggtcaagcacgctgataagtatacattgacccatcaagaatatcttcctacatgtaatgcatcttatactaatcaagccctaccgagctattcgagctcgagcttgctaggcttgtgagcctcagcctaggcttgagcttggcttgtctagtatttgagccgagctcgagtcaagcctataacgaatcaagctcgagcagcttgcgagctccgagctttttttacagccctatttgcaacaaacacagcctaaccatagatgggagttgttttctctgtcttcgggttggtgtttcatgtagttttcttgtcttgcatcaagttgtggttttggaagttgtaatcttaccttcaacctccgtaaaagttggttgtagctttttttttagcaaattaaagtcaataataaatttcattattagaaaattttcaaataacttagtagtggtgcctataattatgtaggaggggtatttttaattgggtttaaacgaggatactgattaatgattggcctttttttttgcttaaaaatatgttaaagtgggtaatactaaattatgggtatgtacgtatacatatggtatccggtacatagtagcgtgtatgctatgtacgttcctgtgtataataggaaaaaattgctgtcacagtacgtgtaacaggactacaggagtaagtagcagttgagttattgtactcgttcctgttcattgcacggaactgaaataaaggaacggtttttaattgcttcagaaccctggccattgattaacatatctagcaatgattcggctgactagtcagtagaagtccatttttatttttattttgcaaccatcaaatatatcggtgagtttactagtagtagtagcaaagaggagtattttaattataaatcgaagaaatttgagtgactaattaacatcaatggcccacttgaagtacacaaatgtatagcacggatttttggtcagtactacctccgtcccaaaataattaccgtcgtggatatccgtacccaacgtttgaccatctgtcttatttcaaaaatttgcgaaaaatttgaaaatatttagtcacacataaagtactatttatgttttatcatctaatagcaataaaaatattaataataaaaaattttcaaataagataaacggtcaaacgttgaacgtgaataatgtaaaactgcacttattttgagacggagggagtagtactctttcaagattgatttgtttcctggcaactgagcatgcaaggcaataatcaaattaaatacagtattaattagtcgtaaggtcgtgtgtcaaattgagagtatgtgtgtatgcatgattcttttctagcagtatcattttcgaattgaatttgccggttgcttgcatacgcgtacctggaggactaatactgttctatcatttatggctttgagaaattaaaacaagactgccaaaacccaaaccagttcaagcattcaattcaaagcgtgtatttaaaggacccgcaattaataggtacatttaatccctacattggccgcaggaattgattgactagctagctagagagacagttccatgctctctgaattccgaattaaaggaccgttgtacagtaaactgaattccgagtactttatagtagtatagcataaaaaaaatcattgttccagttcctctcgcatttttatgatagtaacagtagaattgataaatacatttgacaatattaaggttagagcaaggataataatagagcccacttcctactattagctcatcttaaagtcaacatatataatagattagctataagagcaggtacaattgcaggctataagctagctataaacatattttaaagagataaaggaagagagagaaaagcagcgggctacagatctgtagccagctgcagcacggactccaaaatacaatgtgtgtatgataggtgggaccaggtattaatagtatagtaagcaactattgtatgaattggctattacattgactatagatgatttggagctagcagtgggctatactattgaacttgctctaaggttggctacaattttcttctcctctctctatctctcacttatacatttaatgtatttgtcttggagcttgtgataagctagctcttgcattagagccaacatccttaatttttcactacctctctcctccacctaagtttatagtaggcttatagctcactattatacttgctcttagaccctgtttagatgggactaaaacttttaagtccctatcacatcggatgtttggacactaattataaatattaaacatagactattaataaaacttatccataatcttggactaattcgcgagacgaatctattgagcctaattaattcatgattagcctatgtgatgctacagtaaacattctctaattatagattaattaggcttaaaaaatttgtctcgcaaattagctttcatttatgtaattagttttgtaagtagtctatatttaatactctaaattagtatccaaatacagagataagtctctggatccaaacactaccttagatgtatgttgtcataactagggagtatattaaaaagaaaagaactgacagctttcagccacatgaaattctcatagattccaatcgaattcttctttttctccggcgaacacttcttttatgaatatataagcacagttgatttaatttattctataaataaatcatgacattgcacgtataaactagtatattcgtatcatatgatctacacatgtaactagacagtatattgaatattcaaaacatgtatcgaagattttggatgtatggctgcacaatacgaagaactcgcagtaccaggcgttaacgatagtgtgcaacacctgagtgcagaggaagacaagccgtgctggacgaaaagcaagtagtcacgtgaagtgattttcaaaaatcttattattgccttctccctatgcaagacatcgaagacgaaggttctggaggcgtgctctcccaataaccgcgcacgccagtgagtgggacagagttgactacgagtaacgagcgacgacgcaatacggaggaggaggcaaatcctagcttgattccgcgtgcgttgcgagaaggtggtggttcggttcatatagagatatcaggacacgtgataagagtgcctgcatgatctccataccgtgtaaccgaaccggataaatttcatataacttatccggactccatcccactctacgcactagattatttggtgtgtttccaaaaactacgtttccaaaaacaaaactgaactttgcagcaaaacaaaactgcaaaagaatggcacgtctgtgcaagggtgagtaaccaattttgacgggccattcacgcgccgtctcgcctagcctgacgagcgagcgcgcgtgtgttcctcttattttttccaccacacatgttttaagtggttaatagaacaccctcccttatagggagatctccctctcctagaataggcaaggtggtactaatcattctcatgtatgctagtggcgtttatgattttccaaagaattaatcttcaaatgtgctaaggcccatctattaatttcaacgatcttctcctcaagcaatggtctaaaggcagcgatgacacaacccagtgagagcagcgaagaatgaaaagaggagagagaggggagtgtggtacctatgacttaccaacggcgatgacagaatgtcccatacaactttccctacaatcggcgacaccaaaactctactccctccgtccctaaatataagggattttggtaggatgtaacacatcctagtccaacgaatctagactgtcgattcgttggactaagatatgtaacatcccaccaaagtttttatatataaggatggagggaatatctaccaaagaacctacagaatagggcttaagggttgggaagtggtggaggtggtaaggggcggtaatcaaggctactttcttaattgatactactcctatatgagtactagtactctataattctactcgaaagcggataaaaacatgctttgttagtgcagcaagtgtcaaaatacagtaatctgatcgacctgatagatacattttcaatgcctaagtataattgatactccctccgtttctaaatattagacaccgttaactttttagcacatatttaacaacttttgtgaaatatgtaaaactatatgtatacatataagtatatttaatattaaattaaatgatatgaaaataattaataattacttaaattttttaataaggtgaacggtcaaacatatttaaaaaagtcaacggcgtcgaatatttaggaatggagcgagtatttatttagctatgaatttcgctggaggtaattgaggtctgcatgctgaacctgacagactgtactatacaatatctgtagctgccaaaacggctgaaaatccatggggaacatgaacatgatcttcatttcagagcccaaaatcaggatgagcagatgatatatataaacacgatgcaacaggaatgcacattaacacagctagttacattcaggcactgaaattgttctgatcatgcatgcaggggagcgctacaggaagatgggtagtgataaaagagtacttaaaaaaaagacaagcattaggtttccttgtccaacgtttaactgttcgttttatttgaaaaaattataaaaaaaaatttaaaaagataagtcacgcataaagtattaatcatgttttatcatctaacaacaataaaaatactaattataaaaaattttcatataagacggacagtcaaactttggacacggaaaccagggtctgtctttttttttttttttttttttacggaggaagtacttcgcacaacttcaatgacaatagccatactagctaggtcagtaaaggctaattaagccgctgcactgtgggcttgtcaacatctggacaagtacccggtgagcaatcctgcagagtagcagtatgaatcatctgctaatgctagcactaattaacatctaaacgggtcccgccgaaattatctccattaacgtagggtaattaatcaaccatgcatcctggctcaccatttaattatacgcctccttttattgccctgctcttctttaacctggtgcgtaggggtacaaacggtacactagtggtatctaatcttctgtaccaacttgatatctgcccagttctgaactaccataaaattgtggatactgcattgatcatcgtagccctgctcagctcagtggtggcgacatgtaccccatgatccaattaaaaacttttaatacaaattgtacccgttctctatttaagctcaatatgcatggtagcttgatagtactaatgttttccaaatttatttcgtttacaatattccttgatagagtagatgtgctcattaacttaccatcaggttttgtctcatggtacgagtcctggaagctaattagaggtatagctaggacggcaaaaggagggcacggccgaccttgctatgaaccgtgtgatcgtatttggagtagacgtgggccgctctatgtatatcgttgatctactgtcgtttaaactagtagtgtagtacttgtgtacgtatttatacggttgatttagtttaagatctagtatttcatcaattgatttttatctatgtagtgttcacacttctcttttcttcttcaacctccaataggacttaatttagcttctctagaacactcctagataggccatcacgtgtcttaataaatcctgtaaattctgaaaaaaaaagaagataaaatttgtcccttaatttttatacttaaatgtatgggttcaatattctaaaccattagagattagattagtagatagattggtccaacctctcccctccctatttttaaggtattcatttaagataaaaggaaattaattaactagttacttgttgggtgctcatgagttgtaacggggaaaaatatacatcaatatcaaatcacagctgataaaatgatgtttaataatcattgagtgtaagcttgttgacattgttgtaacgagaaacattaacttccctttaaaatcttcttctgatataaagaccaatccataggaagttgataggattcttgcggtcctagtccttaatttcttccaaatgaacaaatagatcattttcttatatgatttaatcctaaaaaaatcatcaaaagaaacctttgttccattaatttaggtcctaattgagttaatgggcaccaaccaaatgacccattcctcgtgatcttttaagtacccggtccatccattctaaaatataacaatattatagagtagtccaaaatttatttcaattataacaatcttgttattttaaaagaacttttattgctaaactattcattctggctacctctactactatctaggagtattaatttattattgccaagtagtttgggcttacatacacctcaggtacctatcctgaaaagatagtaaagtatttacactcatcttcttaatagtcataaaacgtgcaatcgcgtatggttagaggaaagcaaggcacacaaacagtagatcgataattaaccgattaactttctctgtaaaaaaaaactaaaacaggtaaaacaggatatgtcatttctaattctaaatttgtttttttaccgagagacatgtaaaaaaaaaaacagcttcagctccttcatacctatttggtcctagagcgtactccctatagtcgtccctactgcaacttgtgccgctctctcgatcttgtactgtgctgctttgaaaagtccacatctaattaggcccgagccggccggagctcaactaataattgtacgagtctaattaggacctctcgcagtcttgggatcgatgacaacgatgcatgccggccgtcgtcctttcggccatgcacgaaattgatcgctccgacgacgtagtactgatctacgtacacggtgggcttgttcatgttttatctgtgccaataatgttaattaattggggtacaattctatgactgtgtttagatttaaactttcaacttttttcatcacatgtaactgttccggtcggactgcgtgctcatccgtgcacgttcacatggtacgtagtgtatacttttactgcagatttgtattgcgatataaaagtactttcattagtacgttaattaacaatgtagtagtacatgcattccccccaacgtacgtgcagtaatattattcgtatgtatatatatacgaatacgatggtaacagctatacgtactatactgtactccataagtgtagctacagtacaaccgattgatacaccaaggaggtgtcctttttctgattattaaggtacacattgttttcagatgtataaacaagccctaattatgtactctatccatacttgtaaaggaaatcgttttggacagtgacatggtctccaaaatacaactttgacttcttttttctataaaaaaatatttattgaaatgtgatatatgtatacttttattaaagtatttttcaagacaaatctatctatcttctattatatactaaaagtccattaaacttcctcaaaacgctctcaagtcgccacatggcgttctaataaattagagaaaatcctagaaattctgagaaaaaagcaaaacatctagcccttgattttcacttaaatttgtgggcctgttattttagaccatcagatcagatctattaaaaaaaactgaatatacaaacgtaacgggagatcagatcagatctacgtacgtactgatctatttcagactagcagaaaagtatgaacgtagtccttgtcaaaaaaaaaagaccgaatatacaaacaaacataatgtactaccggaaaaaataaagcccaaaaaacatagaagatatagataactattattattattagtgataataaacttcaaataattataatttttacaaagattatatattattatattattataattttcaccgccgcggatgacctcgcctccgccctcgtggctgcaagagccatgcctccaaccttgccgccacgggtgcccatgcctccgaccttgccaccatgggaatccacgccttcgacctccattgcggcttgctccggcggcctagctattgctgcgaccagtggtgtaggcggaagtttcttggggtagggaagaggctgagaagtggtggagagtgatgggaaaaaaagagaagaggggaggatggaggaagaagataaatctgacggatgggtcccatgtgcaaatggggaagatgatgtaaaacgtgacggcgattgcatggttccaattttgaaaatttcgagtaggcggaggtttcttggagtagggaagaggatgagaagtggtggagagtgatgggaaaaaaagataagaggggaggatggaggaagaatgtgaatctgacgtgtgggtcccccgtgcaaatggggaagaggatgtaaaacgtgatgtgtgggtcccccgtgcaaatggggaagaggatgtaaaacgtgacggtgattgcatggttccaattttgaaaaattttgagtggcacggctatgaatagacgaattgtaattgcatctatctgaacagacacatttacgaaaacacatatcaaattagcccttaaattaataataaagaatatttcttttcttaaatcggtggaccgttatatattattattttcaaataatgcactgtttaaaaagaaaagtttacaatattttatattttgaacccattaaataaacaatttacgatctatattgactaatttgtactgattcagtgaacccactattttagaataatttttaatgaaaatattttaccattgatttttatttaattagacaccgccagatctatcttttttttaaataataaagcctttgaagacctctctcggtccgtccgcactacgcaagcacacgccattgccttctacatgcacggcgaagtgtggtgcctgaggtagctaaagtggtctaccaaggtgatcacgactgccacaattcaaccgctttgctaaggtaaagacatatcaaatcattattgaatatgatcgggtctgttaataacatgaaaacaatttaaaggagtcagtaaagtatactaacatgcaatgagtagatagagaatataaacaaatagcttacaaacatatatgagtgattgcatgatgtgtcatatcgtgcaaagagttttaatagcgacaaagacatcaagaaaaaaggtgaatatgtgttaatttcaattgcaaaaaaacaaattaggcgaactattttttgttaattaagtagtcattaccctttttactaagtttcattagtactgatgatgtaaatcatatttaacttattaattataatcgaattacatgtaaaaatataatttactgcaaaacacttcaaaatttataaatgcactatacatactaattacatttgtataattcaggtcctattttaaacaaataagttccttcaaaccctgtagatatgtttgacctttagttttcagttagtttaggagtcttaatttctgaacaaactatatataatcttataatccaacaatacggatgcccgcgcatatgcgccggccaccttcctaggtcatataatttttatattttcaacctcaacaatttgagagttatttatgatttatattcctaaggtattaatggttttttttatgctcacacttaatctttattatgcaacataactcgatccaaggcctatggattattggctctctaattcttttcacatgaaacatatgatgattgcttcagcgaaacgcaagtctctcatcccatccaaatccaacatccagaaaagtccccggccggaggccgtctatagaaacgcgcgtcgatcgatccgtccgtccgacgaccccgcccgcattaaaaagggccgcgagacgcccgcgatggacggggactccaccgcagtttgttccccccaccactcctccgcgcggcctgcacgtacgcgtcgatccccgccgtcgacgcgagatccgacggccggcgcgcgtacgaaacacgcacgacgaccgccgggccgtcaggcttggccgtggcccacactactactagtacgcgcccgcgagtgtacggtgcacgtatatatgcgtacggcgctcgagtcctcggattggtctcaattacgagtaatgtcgatgatatagtcggtatattaattaagttggagacgggacagacgggccagttttctccgtatatatgggcacaccggcgcagcagccagcaggatatatcagcctcatcgtttcggtatacttgcaaacagaaaaaaaattgtggttaaaatttttatatatgtgttgctagtgatcttaaaagtaaaggctaaaaaataaacttcgatgagaaaatcttaaaatcaactcaaaatttaagattgaaaatttaaattttcactgataagcataggcgatgagatgagcagtatatctagctgcgcatcaaacagtaccctgctcggccccatcgagttaagcaatggcaggattgcaaaatggaaagttttttttttgccacgactataaatccatccgttttaaaatagaatcactttttagagttcttaatatgtgaaaatcagatgcaagcaagaacatgcacacacgcaacttcacattcacaaacacacgtgcacatcctaagggcctctttgaatcgtaggaatgaataaatggaggaataagaaaaacataggattctaataggaatataaatgtaaaacagaggattgcaaaacacatgaaaaacacaggaatgaccgtttgattgaaccacaggaaaaacataggaatcggatgagagagatagactcaaaggaaagtttgagctcttactaaatttcctccaaaatttctatagtattgtccattccataggaattttaaaggatatggtaggattcaatcctttgtttcaaatggcttcatagaaaattttactataggattcaaatcctccaaaattcctatgtttttcctttaaatcaaaggggccctaaacgtatacttatatactactccctccgtcccataatataagagattttgagtttttgtttgcactgtttgaccatttgtcttattaaaaaagtttagaattattatttattttctttgtgacttactttattatccaaaatactttaagcacaacttttcattttttatatttgcacaaattttttaaataagacgagtggtcaaacattgtaataaaaactcaaaatcccttatattatgggacggagggagtagtacttttgtggataaagattgatgtgtttagatccctgctaaaaaattttcaccctgtcacatcgaatgcttgacatatgcatggagtattaaatatcaacaaaaaataactaattacacagattgcctgtaaattgcgatacaaatcttttaagactaattgcaccatgatttgacaatgttgtgctacattaaacattttctaatgacggattaattaggcttaataaattcgtctcgcagtttacaggagaaatcagtaatttgtttggttattagtctatgtttaatactttaaatgtgtgttcgtatatccgatgtgacacgccaaaactttacacccatggatctaaacacccgtagaggccacaaaacctcagtgcaccctggtgaggcaatgcaacgtatgtcctgcaggatcgaacgcacaccagttaattctcatcgccgatgaacagggtttaccttttcgatttcgaagtagaaaccgctcctcactggtttatcgaaatccgaccaaaaaccggtaaaaacgatgaattcatgtcaacatcgtacgaaaaccggctaataccaatagcgatttcacaaaaactgaccggttttcatgaaattccagcgcagtcctcattcaggaacaaatcttgagtggtagtttttgctctttttgaaacagaggaagttttggctcagtgctctcattcaagacatagctaatgaaaaaaaactgaaagctctaaataaatattaaaatcaaatactaaattaggggtgaaaacggatcgaatattatccgctccgaatctgtcagaaacaaggatatattacgtgcttttagaaatccagcggatagtacaatggggattcatatgcggatatggtatctctaaaattcggcggatgcaaattatctaatatttttgccagattatcggatagaccgtttgtcggataatccaaaattatcaacccatataaccactctatctattttgtataacatgagctgacccatctaatggcctaattcatcaattaacctagatttctttgtcctcaacgtctatctcacacttgattagctgtatttttatattattgatatcatgcatttatgttttttaatacataaatacataattattacgatgggtcgttcattgattattgcattgtagatccttgtgttactaactcgatggtgtattggttgcatacacaataacatccgataaatttaatttattttcgaactaggtctgcactagatatgatataacccctgtccgtccgaatctgctccgtattcacccctaactaaaatcgagaattgtctccagttttaataacaagcgaaattacaagacgtatgacccggttatccctgtataggtgcaggacagtgtgacgtgtgcagcatacacgttcgatcgattaactggacgctcgtgcaggcagtactactaccaccgtccccaaataaatttatttatcacatatcacacacacatatcaatagaaaagaaaaaaaaaagctagaatatctctactttatcaaatcccaatacaactttaatcagtttatctactttcatccaattattctctacttttataaatttcgatgcaatgattactttaataatgaacttattttggaataaatggaggaagctaaaaatgaactttatcgacgagggatacccgtagaccggatatagagggtattggggtccgttggtacgagaatctacgtaatacaacatcaagcaaacaaaagacaaggattatactggctcaggccccttgataataatagccctaatccagttggtatgggattatatgaagaaaatcacagattataaagggaataacaaaactcgatgatactgacgagaccgtagtcgagttggtccgactagatctcccggcgacttggctcctgtaggctccgtaggctgtggtgggtatgttggcagtgatattcgatgctttaggtcctgcccagggggtcccttatataccgcaggtcagttgatctccaagtaggactcggagatatcggacccttcacgatatgtaaaaaacccagtcttgtccgagtagaactccttccatccgtaaataccatccctatcacgtgatagatatctttaatgtatacggggactacccgtatacgcgtgggtataccgtatcagtattgtcgaggagtgatcctctctagcgggacatcgtgagacccccctttcgtgagttcggctgggggaaaaagctcgcctctagaaatcacgcattcgttcccaaggctcctagctagctcgaacacaaccaaattatacaggttcggaccgctatagagcgtaataccctactcctgtgtatgggatttagactgagagttacaagagttcctagactcgggagaacactcttacttccctcctccacgagctcaggttttctgagagtcgtcctgttcctcggtgggcaaggtcctccttttatacctcaaggggataccacatgcaccgcatctacctactcttcttttgggtggggacccaccctatcttgaccaaaacttggcccgcgccttcgcctggaagctaaaccacagcttgtccttgagcgaggcccagcgccgtccctcgcctgacacgggggatagccctgtcattccctcattaatgggtgaatacttgcaatggccgccatccgaatgaccctccgatgggacgggtcatacctacctccactccgccggaagcagatgcaacgtgggagcacggttgtccgtccagtcagacgtgaccggcatcaggccagtcacagaccggtcattcttgaccatcacgcgtcagtttagcacgctgcacgtctgccctactgtattaaatgcgacagggggcagttggggcgctgcgcacattaaaggaggtttagccagggcccccctcctcgcttgctctccccgccaaatggtggctgggcgagggcctcggggcaaagcggcgcaagggcccgaggggcatgacgtggcaccccgaggctccgaccccccggccgctcctacggttcgcggaatgcgggggcaggaccaggctgtagtgacacatggcaggatgggaatgtagattcccctcacttcgcatacccccgggcccatatctctgacaagtatacaatttacatccaatgatagagggtataccttatccgtaaccctgacaaatttaatatgtaactaaggaagtaatattgtaacaagtacctgtaaataccgtcctataagtgaaaaaaaataagctagtacggagtaagagagttaatgagaggatagaaaaaaatacgaagaaatatttcacatgtaagaaaccacttttttatatatgtggtgtctatgtaacatagcgaatatgaataagtatttgggttgggatttccattagcatatacggtcctccatggattaatatagcttgctagcagttgtggtgcatgcgtgcatgacgtcatgctttgccacttgccagttagcacatgctaaaattccacgtgcggctaaacctgcgttgattctaacaacgttactactccatcaaacacaacagctgttttattttattttttttaacagacagctgtttttcttttgtttctttgaacgagatttttctttttcaattggggcgttgtcaatcgttatggtcggcaagccgtaacaataataacgctgacgataataagggaaaagtccgtgcaaatgtttgatttcaacacattcccggttactcgggtaggtgtgtgatatatgtcatatgtggatactactccctccattcaaaaatatttgacgctgttggcttttctaaacatatttgaccgttcatcttatttaaaaaatttaagtaattattaattctttttctatcatttgatttattgttaaatatacttttatattttatatatttcacaaaaggttttgaataagacgaatggtcaaacatgtttaaaaaagtcaatggcgtcaaacatttagggaaggagagagtattaaattatgaaagttgacacatatagtgtcacaactcagaaactaaccttcctaccacgaagttgtcactgatccaatctttgacctaattaatttgtcgacacaaaatagatactccctcctctgtatgacgcgttggctcatatataacgtatgacgagtacatttagctacttttccaaataaaaaaagaaaaataataaatccaaatttccccaaaaatttaaaaagttttcaaagttttattttctaatttttcaaactatacattatgcactccaaatctgccatcatcctaagaatattgctaccatacattatattctttgttcactccatgtgaagtaattttccgtattccttcgatcatccatttaatcccaaagcacctctcgtagtaataagttcttttatcggaattgttaaatgtcattcgacatattattggggttaaaatcttacagatttctaaccttaggatttgcatcgattcgtgctctgacgatcccagctcttctcctctagttcctgcgacaccttctcgttgccatcagaggaagacaatgcaagggcatctcattgctgccggcttgagggaaatgagagggtggaagggggtgaggggagggggaggaggccgcccgggggcatgggctcactggtgcgacaccttctcgttgccatcggaggaaaacaatgcaagggcctctcattgctgccggcttgaggaaaatgagagggtggaagggggtgaggggagggggaggaggccgcctgggggcatgggctcactgatgcgattgatgccttccagcagctaatgtggctaggcagcggcaatgacggggggagtcgagcgaacgagcgcttgatctactcagtcccatggcggctatgagtaaggagggaggagaggaagggaggagatatgattaagattgttgcatgaatcttgaagcagtcatactgtcgaagaaacaagaactagggtcccaattcccctagggcatcaggggacaacgatacatatcaagacgtacaagatctacatcttcaaggtatagtggcaggtgtgttcaagcaagggcctcatttccaagtcgtgcaaccatgaactccttcatcctcgacatcttcgagaagctcgtcctactccgaagaacagttcatgcctagtagtagggtggcctaagttcctagggtgccctagggatgtagggtgccccagatacgacggccgtccaaaaacgaagcccaatatctttgggtcccggagaggggcctaagtgcacttcatgccccgagcgagggccaaaatgcgttccatgcgctctcacttacgtttgtagtcacgtcaaggaaaagttatcgggctagggagttgctcaaccgctcccccatattaatagtgatatggtgcatgccttccatccatctcgtcgataacatggggagtgtgggggtacccatgcgagacgtcacctagatgggcctacggacaataaggacgggtgcatcttttttttactatcggcatgctcgctccatcaatcaacaagggaaacattgatccccgtctggatcaaaagacaatgattagaccaagcatgattcatttagtggtgtaggacccacttccacatcaatgtaatggcactgtggacttcccttaaactatataaagaggatccatgccaatggatagagggttttgattctagcaaactagcatacatccttaggctttcagttcccctcagttcctcaccatgtaaaccaatttcatcatccacacatagttcgtagataggagtagagtattacgcatcgatgcggtttgaacctgcataatcccatgtgttcatctttcgctcacggttagggcccgaactcaaaacttgcccctagtcgaatctcctaggggtagcacacacttacccgttagaggatttccacgctccgacatgtatggttcacaattcacatgattttatagggtatttttctgtcaaatactaatccatctgtttcatattataagtcgctttgattatttaaaagtcaaacttcttgaagtttgaccaagtttatagaaagtatagcaatatttatagaactaaattagttttattaaatctaacattgaatatactttgatagtttctttgttttacgtttaaaataggaaaaagtatgaattaccgccctgatctatcgtggtcgaccaaaattccctcatggaccacaaaaaccgaacattttaaaccctaaactatttataatagatgaataaccgcctagcggttttagtcctacattgccacacacgtggcacaagccccagatgtcaacctccacctcgttctccctctcttatgaagctagagggcccccacatgtaagctgctctctcctcttccattgtctacaggccacagctacagatgtctgcaccgcggtcctaggtcctgctgctgccctagggtcccgtcaactcctcgaggcacctgcgtcgccgccccatggtcccactgccgccactaggcactcacatcgtcgccctcatctcgaaccccgccttcttcagccggtcgtcactgccgttgcccccatccaaccgatgaagagagagggagaggggagagagagagagagagagagagaggaaaagagatgacaagcagcaccctccagggcaggtgggaaaagcggcgatggccgcggcagcctccaagactagcggggaaagcggcgacggctatggtggcggcatcggtgaaggtggcgccgtccagacaagttagaggaagaggaggatgtcaggagagtggaggtggtagcggcaagagagggaaaacgacaggcggctcctgcaaggcaggattcgacgaggcaagcgccatccgctgcggcccctcttccactcttcccccctgaagttatgtggacactggcgaggcgagccacgccaccgccatcccagtcgcgcccgttgctgctagccgccgactaaagcttcctctccgccgctcccatcgtcgcctggagcgcactcctagtcgtggcccctccccatcgctgcctagagccacccaaacatgcttgtcgccactcgccgccgatcaattcccactccccgctgcctgcagtgcactcctagccacgccccttcctcgctgctcccgctgctgaccagagctacccagtcacgccccgccgcccccactacaacaaaaggaatgtattaagacgcttggccgaagacgagattataatcgtcccaccctgaaaataaaggcgctccctgaccggttcccttcccattgtgcctaccgccagccggagccgcacccgcgcgtcgctcacctccaacaccaacagcacacaaagagagaaggggttaatatgacatgtgggccctatattttttattttattttttttttgctgattggatttccatatcggcgccacgtgtatgccatgtaggaccaaaacagctccagattaagtcggggggggggtaattcatccggtttcaatagtgtgtggtttaatatgtttgttggaggactgagaggcccctccttcttcagttcggccgggggcagcgggtgtagtttgaggaagcgagtatgctacaaagaaacgaggaggggggtcggggccgtgtccaagcggcgagacggcaaggattagacaggtttgggccgctgagaagcgtaacaccctactcctgtatatgatgatttttctgagctttggaagtctctgaatctctggtgtacaagctagggttgagtgtttttactccgactttggggaggatccctgtgattcttcatttaatggatgaagattggaggcttgcatgcactgggaacgtcatcccaggcattgcacctctcgtcaccttgatgggacagggcataccaaccgcgcgtggcttgccgctgtcccatctcgtccttgcaaggcacgctcgctccgcccacattgaatgcggttaggtgggcgcggaagggtgcctactaatcgcctttgcatggcggccacgtggtgaccaccccgaggggtcgaggcggcccgaccctctgggtcaggtatgggcggcctccactcgtccatggacgcgacccctcggggcgaacgccacgtggatgccgagggcggcacctcccctttaagcacggtacttctggtacccccaatccttatcatcgacaatattaattcgtactatcgcaatagttggagggtaattcatattttttctaaaagatattgctatattcttctataaacttagttaaagcttaaaaaaatttgactaaaaagttaaaacggtttataatatgaaataggggtagaataacattttttaacctaaaaccaccttaatagtttaactctttatattttttcacatggttagtatatatcgtagagcccactcataatttaccaatcccaaagaagatacctcgggcatgggtccctggaaatccccaacaaaagggccagtacgtgcgtgaatctggtagagtatggtaggagtactctatactcctactccgggtcatctacgccacctcccacatgcacacggattacataagcctcacgccccctcctctccattactccaaatcccctctgattagaaagagagagtgaaagcgagccatagatagatgctacgcgtagcgctagggagtagtagtagcagcagcagtcagcagtgcagtggagtacggtagtatagggagggctggtccaccgtcgcagtccgtcacacaccgggaggccttgccatcaatgcggaggggtcgggccgcattgattgcacatcttgtcctcatgccttgcctttccaacaccttaattaatggcgcccatgcgtgcctccaaaacctcccctgtttcccttccccctctccctctcccttgctctctcttctttaacctgtttatatttatctccccctctccgtctcgccgtctctcagctctctctgctactcctcctagctgcatgctaagctaaatcttctgttggattgcctagctttgctgctttgcttgcttgctgtggtgtggtgtggtgtgaattttgttgattggtcggagcttggggttgtgtatggtggtggtggtgtggtagctagtagctgctagtgctagatggtcgcaggggcgttggggtacatggcgagagcggcggacggcggcagggcggcggagctcgtcaccagggatttcctcggcggctgcgtcgccgccgacgacgccagggacgccgccgccgccgcagcagcaactgccaggcacgactccgtggtaaggccgtgttcttgacatatctctttcttcttcgctgttcaattgatgcttgattggctagtttggcttgtttagttgggtaattagagcgggagttaatgatcacaacctgctcagagtagtgatttatggccgtactgcgtgtttggtggaacagcaccgcagagtaacacaaaggggaggaattaattcgatccaagattttttctcttttcaaatttggtctctttttttaatggatagacaggtagataatcctaatctaagaaacttcgagcaagccattttaaatactagcaggagtatgttcattactaaattactttgctttgtcagaatatctactggccgattactcaatatgcgtaagagttggtacagtcaattcttttttttttctgtggccagtttatcttcctctgccgtgttatcttggcaacaagaattcttctcgtaattccaatggaaagaatgaaagcaaatattggtctcaattcattatttttatatgtaaccttgaaaaattcacagttttttttatccaaaattggtttatctttctcctctgatccgatttctaccttgatctgcttgtgtttgtgcagtccggcaagctgtccctgcagaagcagacgtgcccggcgacgccgacagacctcaacctcttccccgtccccggcgccgccgcgtccgccgccaagccgtgcccgtcgtctacggcggcggcggcctccggcgcaggcggcaccacgacgacgacgacgacgtaccacagcgtgtgcacgatcgagaaggtgaagacggcgctggagcggttcgagcgcggcaagcaccagcaccaccagcaccagcagcacagcgccggcgcgtccccgtcgtcgtcgtccgtcaccacctcctccgtgaagcgccgtggcggcggcggcgtcggcgacggcgcggtggagcagggcgacgggtgcgactcgccgtccgcggcgggcggcggcggcatggtggccgccgcgtgcccgaggtgcttcctgtacgtgctcatctcccggtcggacccgcggtgcccgcggtgcgagtcgcacgtgccgccgccgccgtcgccggcgccgaagaagaagccccggatcgacctcaacgtggggttcctcggcacctagctttcctaccctaccttcacctgcatcgccacggtggacacatgtgactagccatagctagctagccagccatgcccccaattctgttaggaaatcaatgaatcaatcaatcaaacacgtactccatagaacacgaggatgatcatgacgatgatgatgatgatactagtagtcctagctccactatgtaattgatcaaaaagcattttcgcccttaaatcaacttttccatttttgtcttcctcgaccaccatcctaatcatcatctcattagagcaattaatcaccagattagtagtagtgatctcatagtacagcagtagcagtactacatctgctcattaattgctcgacgtagtcgcagcagaaggtgcagttactacgattgctgcgcaaagtcgtgagttcgtgacgcgagttttaattagggatgtagcagtgcgtatcacgtttcgtctcgcgttcgtcgttgatgatgggggaggagttggtccagttggagttgacgtcgcagctgcagctttgatgaggtgcagtgcttggccgacatgaatggggggaagcaattaatggggcgcgatggagatggttgtccgtgccccgctgtcctcttgctcgctcggtcggggagggagggagggagggcagcctttgctaattgcgatggctgatgcccatcttgatgctgggcgcgagcgcgcggtggagtaggagtgagagtacacgtagtacggccatagcacagcgacgtttaaatggcgtgcagtgccgtgccgcgccgcgccgcaggctacatgccactccggaccgcgtcgtagttgcagtcgcgtcacgtacagtagtatcgtccctcgtatccgcctcgtcatttcgtgtctccggtctccccgatgattggacggacggactgctccccctgccgtacggagtactcccttcgtcaaaagaaaaaaaaaatcaacctgaaaataaatactccctctgtcaatataagaagtttcagttttggacatggttattaagaaagtagatataagtgagtggtggaggtttataattgaattagtagtagaggtaggtgggagaagtgaatggtgcaggtttgtgattggttgtgaagaaaatgtgggtggagaagttgttatattttagaacaaatcctaaagttgttatattttgggacggagggagtacttccttcgtctcattttaaatacaaccataagattccgcattcaactttgatcgtccgtattatttaaaacttttttataattagttttttattgttatgagatgataaaacatgaatattactttactcatgactcatgtttttaattttttttaaataagacggacgatcaaagttggacgcgaaaaaccatggctgcatttaaaatgggacggagagagtattcctataacaaatttagacaatctttccagatttgttagaatataaaatgtcattttcctatattgcttttttttttgacagagggagtactccctacatcctaaaacaagtataaccctgtaatttaaatttgaattacatgactacacttattttgaaatagatggagtagtttacactggagaatatccttagaataacttattttagaaatataaaatgaaccattttcatgatgtcaacgtttttaactaatgttggtgctgttgttcaacggttatttgacatcaatgttattgacatcggggaatctatttataaatatattttgttgcaaatttatagatccttttctttagcaaatatattctcgaggccaacataattgccgctgactcccttcttattattgagttagttttcgtggaaaggttaggggacatcgtcagacgctattatgttgaaccccaacatcaatgatgtcggcgccataaaaaagatctattccttaaataagtttttgaaaagatcaatttataaaataagtttttaaaaaagttttaaaatgtggaaaatccagcttgtttcacggcgcacactgagttacagtactaactactactacttcgtagtatacggttatatactgctcttgtgccgtggtacaacgtttcaaattcatcaaatccacggcgctgcacgcacgcacgtacgacgacggttacacattgtttccggtgactgcagcgacagtagttccgtgcgctgttgctacagggatgacacgatttaattaccctgcctcaacacccgctccggtctaccgtgtggacgagatggcgttcatttactgtagcagttttatctggagggttgattcacttgattgtactactcctagatcagatgatgagatcctgcgtaatggcaattactgtgtgcccctgtgctgtggaaactgttcatcatttactccttgagtggccgaccagcctagatgcaaacttataacaagggtaaactgcattagaatagaaagtcaagctattgaaaaacacaaaggctcaagtaattcatgctccactattctacagcgcggagaatttgacgataaattttctcaaaaaaaaattaacatatgtaaatataatgcaatcataatataattataatacaacttgaatgtagctttcaaaaatcttgcgataacatgctattttcgtgaagcggcagcaattcatgctccgctactctacagcggtgcggcattagagtaactccaatagaatggccaaatggctggccaagttaaattttagtaagtatggaaaaaaaaaaagccctccaacagcctctctatcctattagctaagctatccagatggccaaatcttatccctcactggccaaacttggagagtcaccctgcctggcaattcgtgggccccaccactccctctcccaccccatctctctctcccccggcaagaaggcagtgcagcagaaccgcacgacggcgacagtagggaggagagaggcgccggagccagccgccgtccgcactgtccccagccgcgcccaccgctgtccgcgctgtcctcggccgcacgcacctccgccgccgtcagcgtcgtccgcaccgtcgtcggaagtgctaacaggaagagatagagggtgagaaagagggggagaaagatgggaaagaatgggtatagatgctgacgcatggatcgcaatgtcatagactcaaaatagagaggacggatggagaggctgttggagtaaacaaccattttgacttgacaaatgaaatggagagacttttgaagatgctcttagcggagtactcctacagccatgaactgatctcagctgtagattttccatccgacgcagtatcgactacagaggatccgtccgtgtccctgaacttcaggttggggcggacttgtcttggactgtcaggcccatttcgaccggatatctgggccgaaaaatttactggtctggattttgacaattctatgcggaataagttcaccggaggcccctcaacttaacagcgagaatttttgagatcacacaaactagaaatgtgtacccctaaactcacacaaactgttcaaaggaggtcccatggcagtatctgtggatggtttcgctgacatggtatcctagtcagaaattttttttaaaaaagtatgtggggtacacatgtcagtagcacatattttttttcttttcttttattttcatcaccttctcttctctttctcttcttcttcttcagtggatgaggccggcggcgattggcgagcggcgggtgagcgttgcggcgggtccgcgggcagccgagcagcaccgggtggc

SEQ ID NO: 10279 - DNA, 935 bp, Oryza sativa
ggaaccaagaatatatatatatatatatatatatagctgttagagaaacattgatcccaattgctgtaagtagaagtacatcactgaaacacatgttcaacagaacaatttccaagacaagctcatccctgaatcaaaacttacactgacactcatggtaaaacgagcctgatatagtcacataaaacaaattaattgcacgggataaacattgaaacaggtatgaacatgaactacgagaatcaatcaaaacattgaagataaaatatgttcttccttcataacataatgtgtgcaattgtcaagaatcaagcaatcgtatcacaagataattcagatattcctcaaatatgattcttaatgagcttacaaagttacaacttacaaatcaacaataatgaatggagtaaccatcacctcggttttgtcgataggcaatataattggccaggtgtagaagtcatgctgccttctcttgatcaaatcctgaaaaaagttgttcccttgcatcagaaagcaacttttctgcaaacccccgtgatttctccagcccaagtaatttcgggtatgtcgtcttgtcactcgccaagtcctcccctgctgtcttgccaacctcctcagaagacttggtcacatcaattatatcatcaacaatcctatcaacctcgcatacatgcgcaaccgttcaatctgctcataagagcaacctcccaagattgccccaatatccattgatgcctcaagaatttgatgcctattcttttttctaattaaaatgttactaatccaaccaagacaatgtaatctcttcagtaaaattgtgcttaagcagctgtgagatttgagcctaaatgatatctcgagttaaatcttgttacttattttcaagtattataccacaagagggagaagcaaaagcctcacctcatggagag

SEQ ID NO: 10280 - DNA, 13668 bp, Oryza sativa
accgggactaccaatccgggactaaagatcgctatctttggtacaccaaccgggacgaaagatcgatctttagtcccggttggggttactaaccgggactaaagatggctcagccgtcccggttggtattaacaaccaggactaaagatcgagctgaccttttttttttttgcatggccctgttgccgcatggtttatatatatatatatataaaccatgcatatatatgtttcagtacatatatgcatatatatatatatatatattatattatatttatatatgtttcaatacatatgtacatgcataatatatatgtatttatacatatatatgttatgcaaatgcatatgtatatatatatatatatatatatgaccaaaatatatttacattatagaaaatgtgtacacatgcatatagaaacatatgtagtcatgtattaattacaatccattatatgtcctagctagctacgatttcgacgtagtagtagtcgctagctcagaagctaaggacctatgaattgtatttccgtcgtagtagaattcacccttgggatcaaggatttgttcgttgatgaatcccatgagttgttcttgaaccgccgcgataaattccttgtgcgtggtcaggttatccctcatgcgaataaactatatgaatgtatgaaattgattagtaattaaacaagaaatcaacacgtaatgaaattttgaatttatttgtacgtacattgagctctcttatggtgatgatttggtctgcaaggcagtggcaatactcgcacacgtaatagccgcacaagttagttcccttcttttgctttgcgcactacaaataaatgacaaacaacgagagatctaattaatatacacttgtatgtatttgaatcggagaaatataaatgtagagcatgtgtactcacaggaaatttgaaattccgcctaagtctttctctccatttgccgcggaccaaatgatggaaccgataccaagccttacatggagtttaaagatatgattcgtagtagcaattaacataacaagattttcttaattaacagagaaacttatgacggtacctgtctataagttcgaaaaccttgtcaaacgtagactattttttatccattaagtcatatacgttgacggtccaggccgacaggtcgaagagtaaaagcacccagtggaatctgcaatgtgcgtgggatgcattacatatgaaacacttagcaagttcgtacgggaatgaaatttggtataggaagacaataaaattaaactaactctgtgttgtacggcaacagtatgaacgtcttgtaatgctgtgccttcaggagatggacgagattgtcctctgtggcttgcggatattggtcgagcattgtgacgtttactttatgagggtcgatgaatccaatatcgaaaaccccccgccatcgggccctttgaatctccattctacaacgataaaagggagtatattattttctatagtctacttatatacaaggacctaattaattaaaggagacgtagtaagaaatctaactgaacgatatacttacaaaatccagcaactcataatagagacgtcgagggcgtccagctggtatagttcgtagattcccttgaaattgatccagagaatgtcatctccttgcaagaagtccgtgtccctgatcctcgctccgatcatctctctaccggtggcgctcatctccatgtacagctgatggaacttgtacatttgtgtgggtagggactgcagcagctcaggcttgacaagcggtttaccgagttcgtacatgtatttcacttccgccttttcgattggtgcgactcctagcaattgatccgtagttagaccgggatcagtaataaattcttctatcgtcatttctttaccggtcaccaacggctcgatctcctggtttggttgctctccaagctgagggactgatttggactttccagaagatgctttcttcagcgttcgctcatagtccgatagcttaatggcctccttggcaggtgcagacatacccctgaagaagttcatgacactcgggtctatatgaatcttcttttctggacttcgaggcttgaattgtctcttgacttctgatgccacgtaagcgtcaagctcctcttgcgtgcaatcgtaccccgggtccttgttcttggcggtgtcaactttcgccttcttcgttgcccttgtgtgggcaggcagtggagcttggggggtccttgactttgaaggtgccagaagaggagcttgcggaggagtcggtgtaggagaccaaggaggagtcgatgcaggagcctgaggaggagtcggtgcaagagcctgaggtggagacggtgctggagcatgagaaggagtcggtgcaggagcctgaggtggagacggtgctggagcatgaggaggagacggtgcaggatcctgaggaggagatggcagagccggaggagatggtgcacgagacgccgcttgtcgcccagggaggatgatgtaccgccgccatagaataatggcatggcttgtgtctcgtagatgcgtctcaccttctcctccagggtaatccagctcgagatcctcgtacgcgccttcgaccaactcaacttcgaccttggaatatcctgctggaatcggcctgcagtggtaagtacctgaagggtccgttgggatggccatgcccgacgccaccttcatgtggtgagaggttatttattagtaatcaacatatataagcagcaactagcggaatggtcaaatctaaaatatataaactacgagcttacctttattgataagttcttgaaaggaatatgcagctcacatggtgtccgctgagtgatgtcatcaatggggcaggtggattcgtcctgggtttgcatggcgtccatgctcttcttcgttagctgcccgtcaacttctcctggatcgtctcgtcaaatcttgtatcgtagtactttgcaaacagggcatgcttctaggttctcatactcctcaccgcgatataggatacaatcattcggacatgcgtgaatcttctgaacttccagtcctagcgggcagacaatcttcttagcctcgtacattgtctcgggcaatttgtttccctccggaagaatgttcttgacgagtttcaataaatcgccaaatgccttgtcactaaccccattttttgccttccattgcaagaactccagagtggtatccaactttttgtgcccctgctcgcaacttgggtacaacgaagttctgtggtcctctaacatcttgtccaatttataggctcccttttcactttcgcagttctccttggcgtcctgcaacatctgaccaagatcatccgtaacgtcgttaccatcagcatccatttcctcctcgcctgtttgatttcctttaaatccaacgtactgagcaaagtccgaaatattgtcgtcttccacttcatcttcttccatttcaacaccttgctctccatgggatgtccaacaattatagcttggcatgaaccccgactcaaacaagtggaaatgaatagtcctggttgtagaatactccttctgattcttacacttattgcatggacaacaaataaaacccctttgcctgttagcttcggccactctcaaaaaatagtgcacgctgtcaataaactcttgggaccgccggttagcgtacatccattgccgatccatctacatgagtcaaaaaaaaatcgtacaaaaataattattcttacaataatgacagtcatacaataattataagataattacaaactgtttcaacagtcatacaataatgacatatctttattcatataaaaatcataaaatattacaccaaataattcttatttactatttctaaagttttaaactaattttaatatgttttacttcttttaattttcattttagtttgttttctagtattcaagattaactttcactatagttttccttctcaactattttataaaaccttctttagcaaatcaactaaatttctatatattctttcttccccacacaaattttctccctcatcaacttacaactaaattttggagacaaaaaagtgtgcaaaacatagctgcaaatgtaatatgacaaaaaaaaacattggaggatgaagttgcaaaccttttaggaacctccgatttgtatgtaatcaccaaaataaattcactagaaattttggcatgacctcccctcttttttgaagaaattttgaagcttgctcgggcagctggaggaggaagaagacatatatatataggggtgggactttagtcccggttggtgttagatcccgggggactaaagatcaaatatgcccgttaccttttttaaccgggactaaagatcatctttagccccgatttttattgcatccgggactattgtggaattcggccgaccgacgaaagatgagtttctccaccagtgtatgagccaccagccggtagtagctaacaccttctacctcttgcggcagctcgtctcctagccgcggggccgcaccggcgccgcctcccttctggcgccccttcgtgtttgccacgagaagtgagccagccagccaccgtgaacagaacgatgccctgcttgttgtccgcacgaaaaaaaccttaaatctataaagatattagtttttggtgaggtacaaccactgcatcgctcctctcgccacgcaatcacggtactgttgccctgttcatgtgcttgctcgccgttcgatgaacatagctatgagtgtttctagccgtccaacgtacggatggagacatcgcttctggtcgcgtattaggttccagtcagccatcaggtctcttccctgtttatcgtactagtgttgctttcctgttaatctcgcgacacatgtatgtgagcggtcgtgcaagcatgcagaaggaggaacggcgatttcctgggacgacgctctgcaactaggcatgagaagtttcgatcaaagttctataatctgttcacctgcaattgctactcattttgtggcaaactgcttgaatcggcttgcctacaatggctccgtgaagtggaatgtgttgaatgtggctgctcttgtttggttgcatggccaatgggtggataaaatgcctgttgttcgttcattctttccttttctaactgtgacacgcgttggcatcttaatggctggctggctttcctaatagggatggcagccttctcttctctcttgattggatggtttgtatttgctgtatactgcatgaaggatatagtgtgctgactgttttaaagaacatttgcactaaatcctgtgatgaattatggaacgaaccaagaactcactgaaatgattcattctcatgattatcatggaataaatcacaccttgtattgaacttggaagaaaacacatgttacctacgccacaaatgcgctacatgttatgatgtcctctgtttttttttgtgatcctagatctaagttggtggcatcctgcaaacggtggattccttgttcttattagagtttttatttatccattgccatcgccgttctgttaatctgtcgatcgtacgcaaaacgatggcggttgctcactacaagaaaaatactctgtatagacatttttctagtactgtagaggcacttatcaaatacctttacaacaatgtagaggcattttaaaaaatgtctaataagtgtcttatggtgaattgtctctacagacgaagagacattttataaaatgtctataagatggtagaggcattttttagagacactaaattgtaccgcaaacatataaaaccagtccaaaaaagagaataaaatagtttccttgcttttgataagtcttgaactcatgatcttttggttaaatcattctaatctttgatacactaaccaactcaactccatgtcattacttgtatacttgttcctttagttacttatatttaatcctttagtacacattatcattctaaaaagtgtctctacatagtttaaaatgtctcaacaaaatgcctttatatattagacgcattttatagtgccgaaagaatgcctctacgagataaaatctaacaaaatgatataaaaatgtctctagagtaaaagttttctaggcaatttttaaagtgcctctataaagtgtctctacactataaaacttctgattttagaagcaatttataaaatgcctctacaaaagtgcctctatacgaggtttttgttgtagtggctgcaccatgttcacaaattcacgaccacatggcgcggtgaaaatcaccggccagccatcgtgagagttcgtaaggtgacacggttgctttacgactttgtcacgagtgtgtggatcgcccagcaaataatgagctagaccaatcataaagccaataactcctcctgctcccacctaacctaacgcgacacaagaaaaaagcacgcaacgggagggagacatgcggatacgataccggaccggctgccatgccaactcctttgcctttgcgagcaacaataatctcgctgaatttggaagaagccggcccactcccgcgaaaaaagaaaaaaaaaacagagcaatgaaagcaagaggagccgatcacggccctgaagtctgaatcgaactcgcgacgaccggcggggcaaagtccaaaatccacacgagcgcgaacccgcatcccgttcggccacgtctccctcccgcgaaatctgggccgtctgctttgtcacttctcccaccctttatcgtcataattaatatttgtgatgaataaattgactttgcaaataatttaattaatgaattggtttaaagatgtgtggatgttggtgtgagtgtgtgtgactaattggggtcatgttgtgatatctgtgctcaggaacggttgtcttgtctgattgtgtgcaggtgacttgaggtcaaccttggtcaatggtgaggaccataactatgcttagggaggaccagaggtttagtgcagtcaggataccatgtgagaaggtgactagagtcaagattcttgtatgtcaacttcggtcaacaatggggatcgggactacactcagggaggagttgaggtccagatagttaaggataccagatgacgaagttgaatactagatggcacatggtggatggaccccgtgtggaagagatcttcacaacgggcttcacgatgtgtgtgcagcgtcggtgtttacaaagaaaattggaagaagaattagagactatggttgctacagtagtatgcagtatgcacgtatgtgttgcacatgtgtactgcatgtggttgtcgacatggtccaggaagcatatgcatgtatgtgtggtgcatggcatccacatgtgtgttgatctgcggaaaggctagttagcgcgcgccggcggcacgcgccctccttcacgctcttttttttttcttttttttttttactttttttcctcactttttttctaatttttttttatctttttagcatgttttgagtttgaaagtttttaaattttgagttgaaaattttcaaatctggatttaaaagttttcgaatctcgatttgaaaattttcaaacttttcaaatctggatttgaaagttttcgaatctcgatttgaaatcgaatctcgagttaaaagttttcaaatctcgagttgaaagttttcaaatctcaaattgaaagtttttaaattttttcaaatctggacttgaaagtttttgaatctcgattctcgagttgaaagttttcaaatctcaagtagaaagttttcaaatttggatttgaaagttttcgaatctcgagttgaaagttttcaaatcttaaattgaaagttttcaatttttttcaaatctggacttgaaagtttttgaatctcgattctcgagtttgaaagtttttaaatctgagttgaaagttttcaaatctcaagttgaaagttttcaaatcttagttgaaagtttttaaaatttgactttaaaatttaaaacttaaatcgaaaattttcaaatctaacttcaaaaattttcaatatgttggtaaaaagatctcccaaaaaaatctccagaatattttcttaattactaccattagtgttaagtatattaactaatatacgtaattaagactaaaagggaggaagtgctcgccaggtccttttcccggcgcgcacgcgcgcgctagcactccccgttgatctgattggttggtttggcacccaagctggtctacacgggtagatggggctcgttggttggctgcatgccgagtgggctggcccaggaagcagcagcgggcggtgaaggcctacgcgcgaggagatcgagtcccacttggtgtgattatctgtagccggggcggctgcaggttttggaaattgtattttgctttggaaatcgagggatgagtcctattggaaatacgagctctacttctactctgagtaggagttttttaagtataaatagatgagaggttgaggctagaagcatatcagctttttgggagagaaaagttagggtttgctttgagctttaattctagttcaagagtttgatcctagtaggtttgtttggtcttgttcgatcctacattatcatcaccttccgtggcttccgccctccccgccttgctcgcctaatccgaagcccaaactctcctcgtccgaagcccaaactctcctcgtccgaagcccaaactctcctcgctcgaaaacttgccgcctcatcacgccggagagcatcatcaccgcatctcccaccgcagcagccatgaacgggatcggtgagcactcgcctctcccctatttcactttttgtcgcgctctggctgttttttttgggtgtttccgtgattggggtttatggcttactgtttgcggcggcgggtttcttatgcagagctctcatcaggggacaaggctaaactcgtggagacgctcaaggtataacctcttcctctcttgctgtgatgatcacttcaattggagcgatcgtgcaatgatgttttgttgattcggtgatgtgcttgtgcagaacaagctgcaggcattggcggagcaacatgttgacatgctcgagagcctggcgcccgcggtcaggaagcgcgtcgatgtgctcatggagattcaggtaaagacaaaactgctaagactagagagagcttcgatttgtggcatattttcgttcatcctactgtttattatgcaaacccattgtggcatacatagtgacaatatcgtcaatgaaacgagtttttgcatggtttaattccctctattccagaggctttcttatacatattttagtattgttatgttcgtgaggataaaacggttggattagatattttatcctttattatctgtagttgcttctatactcttaagaaattacaaattatgctctcgtatgccagcgatatccattgatttcgtaaatagatttttttaccttagccttttaatgttatttagttgattgtgtatatttactacaaactttattccacatatttaaaagtttctaaaacatgttaaatgtttcagagccaacatgatgaactagaagcgaagttcttcgagtaaaaagctgctctagaagctaaatatcagtagctttatggaccattgttctcaaaggtaacacatactttttgttgcaatgtaacacaatctggccttacctcacttatctttcctttcaaaaagagttgcatgttttgtgtacatgcaactcttctctaagaaacatatcttgaattatattcctgagttttcaatatgatgtgttgttctggtgaccttttttgtgcttgcaaatttccagcgttctaaaattgtgagtggtgttcttgaagtagagggcgagaccgaagaaagaggtgatatatcattcttgttcatacaataggtgttctgggcatgtctggggttattgatagattgggtacccttttagttttttctataatcttgtcacgatgctttcatgcagaggaaaagggtgttccagatttctggctcaatgcaatgaagaagaatgagattcttgctgaggaggtgagaggcttttctagtttgtaaatttccactttccaaagttatcaatgtttatgctgtcattagaacttgagcttatttatttgttaagtgtgccgatttgcttagtgccgatgatttttgtaatgaatatttttttccttttccactgccatagatccatgagagcgatgagtaagctctgaagtaccttaaggacatcaaatggtgcggaattgatgatccaaagggttttaagtttgaattcttcttcgatacaaatcccttcttaaaaaatcaagtgctgactaaaacataccacatgatcgatgaagatgataacccatcctagagaaagcaattgggtatatatcattttgttcctgcaaatttgtgtttttgttaggatgaaaaaaaatctctcttgcatttcctatttgaaatattccttgactgctttattttttaggactgaaattgaatggcatctaggatattgtttgacacaacaggtgctaacaaaggagagttcagagagcactaaacctataacaaagactgaagaatgtgagagcttctttaacttcttcagcccccctcaagttccagatgatgacgcaaaaaatgacgaatataccgtaagttgaacaagtatttattctatatacattgattcctgaaacattatgcctaaacttatgtcctttttggttgctgcttcttaactggctgaagaattgcataaccaaatggaacgagattatgacatcgcgtaagctattatgctccatttcattcttaaccaattagaattggttttttatttttggaaaggagaagcgattaatattgtgttattatgcatgatgtatactgaaatacacaattctttaaattatttatgaacagcatacttcctgcatatattatctacttataaattagcttgcccatgttgccagatctactcttagggacaagattataccacacgctgtttcttggttcactagagaggctgttcaagacgaggattatggggcttcttgggtggatgatgaagaagaggatgacgacgatgatgaatatagtgatgaagaagcataaggcattcaagtgtcgtttgttctactggggtattagaaatttagatgcttttatctccattgttattcctctattttgaacggaaggctagcagagttgatggacagcagcatgagcgacctgcggagtgcaagcagcagcagtttttcttttcctttttttatcttagttctccgaagtcagatggagtgaaggatatgtaactactaaaagttgatttttcaacttttctatgtgcttttttttattttctcccattgttgccatatactagaagtacaagcgcaacgcgacgccgtgcatgctaacatctacattgggttagtaagaggcatatcaaaagcaacaacatcaaatcaacgccaagatgaaggaatcctgaaaaagaagtcccaaattttcatgcttcaccaatcacacacaacaacacaaacacagggaggcaccttacccaccggaagtccaccatgccggcgacgcctccttcctcgagcagctccactcctcctatgtcgtgccctgtcccgctaccttagttgctatatggccacaaccttgtgcagcatccagcctcagttccggccgccagcaacggagcagcgccgctgcaagcttcagcgtggcaacggcagccaatgtcactgccaactccggtggtttcctcatctggctggcactctaccttgtaccctctccccgctccattcccaaaggcggccggtggggagaaaggagcagcgtggctacattcactatgaaaggctttgagcaataaacaggattaaccgaattcggtcttgccttttcctaataacaattcattccttgagttttgactaaccaaattttgattgaatgcgcacccgtagacaggaatcaattatatagccaatttatttactatggcactgtaactaaacactttctctgaaagtttcctgcatgcttggaaccaagaatatatatatatatatatatatatatatatatatatatatatatatatatatatatatatatatatatagctgttagagaaacattgatcccaattgttgtaagtagaagtacatcactgaaacacatgttcaacagaacaatttccaagacaagctcatccctgaatcaaaacttacaatgacactcatggtaaaacgagcctgatacaatcacataaaacaaaatcaattgcgcaggataaacattgaaacaggtatgaacatgaactacgagaatcaatcaaaacattgaagataaaatattttcttccttcataacataatttgtgcaattgtcaagaatcaagcaatcgtatcacaagataattcagatattcctcaaatatgattcttaatgagcttacaaagttacaacttacaaatcaacaataatgaatggagtaaccatcacctcggttttgtcgataggcaatataattggccaggtgtagaagtcatgctgccttctcttgatcaaatcctgaaaaaagttgttcccttgcatcagaaagcaacttttctgcaaacccccgtgatttctctagcccaagtaattttgggtatatcgtcttgtcactcgccaagtccttccccgctgtcttgccaagctcgtcagaagacatggtcacatcaagtatatcatcaacaatcctatcgacatcgcatacatgcgcaaacgttcaatctgctcataagagcgacctcccaagattgccccaataaccattgatgcctcaagaatttgatgcctattcttttttctaattaaaatgtttctaatccaaccaacacactgtcatttcttcagtaaaattgtgcttaagcagctgtgagctttgagtctaaatgatatctcgagttaaatcttgttacttattttcaagtattataccacaagagggagaggcaaaagcctcacctcatggtcgcaatcgaccatctactgcctgttgccaggacgcgagctgcacgatccctgcaaaaaaaaaacttggaatagagcggtcgatgagtcaaagggggagttctttggtttgggggaaattttggaatagacctggttgttgatggagctgacggcatcgtggtccctccaagcgaagtcgtcggtggggaggacgacccgccgagctcctacaggaaggcgcggcacaacgtggactgcggaagggccaagcagacagtcagtacgcgtgctcgtcggcgtccctgtaggacttgcacgaagctggcgaggtggtgctccatgttcagctcaagctcgttgtcgccgctgccgaccacccgccggatcagcggctcctcctcctggttggacactccacgcactgccggagacaccggaactcaccctccaccgcagaaggcttgatccggtggggggagggcgaacgaagcggaggcaggatccgcgacgaggagggcagccaccggtggtgtgacgatacggtggccgggcgggaggaggtggggaatgggaagcgattgggggtaggtgtggttgtttttcaa

SEQ ID NO: 10281 - DNA, 2754 bp, Oryza sativa
ttcaaatgaatttattatgaattttacaagattaaatctatttaaagcccatttaaaaagaattaaataaatttaattcaatttatggacaattttaatatgtagatctttattttatacaacttttgcaacttgaaccacattaaactgagttaagatgaattagttatgaatttttaaagattaaatcggattaaaacctttatatggattttaattaaattatgacgcatttatatggattttaattaaattatgacgcaataatgaattatttttgaaaaggaaaagagaattattgcgtcagcggctagggtttcggtggaccgggcgcacgggcgacggttcacgcgaacggacggccgagatcaatccatccaaaacggacggccgagatcgatcggtccacgaccggctcacggggaacggcaacgatgacgtcagcgacgacgtcacctccggcggcggcggctcggcggctcggacggcgcacgctcgccggcgaacggcggcgcttcgacacgaacggaaggcaccaacggatagaggacaacgcggcgaactcaccggtgaccaaaaccacggcggaagagcaacggacggcgccggcgacgaggaagaagcggcggcaaccttcgggtcgacggcggcaacggcgctccggcggtcttcggcggcggtgaagcggcagacggggacggcgacgaccttgcgaacccgatggtggcgacggcgatcgacgacggcggctgcaacggcggcgcgacgcggctgaaccaacggcaacgacggcggcgactagggctacgcggaggcggcgctagacgcgacggcaggctaaagcaaaggtggcggcggatagaggagagctcgggggtccttttataggtgcaagaaggcggcggcgaaggcccacggcgaccggtgacgagaaggaaagatcgggttcgggagagagagaggaatccgattcgatctcgaatccaacactttccaagccgatttagccgatgtttccaaaggggaaaaggaagaggagatcgaggagattgtttcccctctatcgattcggccggagaaggaaaggagcggccggatttggaaggagacggcggcggcttgcgctagggtttcgggcggcggcggcggcgcgaggaggaagacaggcctgacagacgggccccacctgtcagcggctgagagagagaggagagcggcggctcggcggattgggccggactgggccgagggaaagagagagagagagggttttgggccggctttcggcccaaagccaaaagaagacttttaaaaacctttttcaatttaaattattcatgaaatgcaattccatttattaaaaatacttccttagctcaaataaatcccagaaaaatctaggaattatagaattaagcaaagtatttaacaaaattttatctagcccaattttatattgagatttagcaaattaaaattagatcttctcttctaggcttttaaaatcatttctaataattccttttaaacaacaatttataatttaaggatttttaaacaagaaaagctcttaacaattataattagatcattaatgatcaaataattactgaactgttctttgtatcatttaggaattgagctctgaaaaatccgagaaaatttcagagagttgacttaatcatggagaatttaataaaaattaaatccatccatgctttagatttaggaaattttatttcccacattttacttcacttgtaaattaaagaacatttaacataaattctattattaatttattaaattatttataaatcctgaaacaaaaatcaggatgtgacaggtaagctccaataacatgtgtcttaggctcttagacacatctattacacccgtgcggctcttagacacgtctattacacccgtgcggcgcagcgcgcgagacctttctagtactattcttatgcccaagaggaatcaagccatatgaattaaattagtagctaaatcaaaaggaggaatttggaatatttggaaggagaactaaggatagctttaatatcaagagacgggtcaacaattaattccaataaaattggaattgcaaggatttggtttggaggattttcttggaccataattcataaaagggtttcaaataatttgaataaaggatttttaataaaaaaagtttaatattcaaaattagatttcaatcaagaaattcctcaatttaacaaaatatatttttaaataaaaaccacaaaagagattgaataccaaggagaggttttatgcaagttagttttaggaggtctctctaattatttttttctaggtttagaaggttattagaaatataagaatcggcatgacacatgactagaaaatagttaatttttaggatgttacaaacctaccccattaaataatctcatcctcgagatttctgaagagtccaggtagtagtgtgggaattttattctttctttggtccttcccaaaattccggatatccgactgattaatctgctggtagataacttgtattcttggaatattcttggatgtatgcattgggtaataaaaagctgtagattacttgatttaacttcatgtggttcaaagtttgaaaatccgacacttgacagcctttccaaatagagacatgtcatagggtatttctgcataggattcgatctttcgagcatatatatatatatacacttattgaggaggtcagactttttt

SEQ ID NO: 10282 - DNA, 28409 bp, Oryza sativa
ccatttgatccttatctgctaaaagaatccgacaggtgtgcatcactaatatccaataaactcttttggtagcaattctccagtgctgcttaccttttttttttgtgctttatgtgggttaaaatagtctctctagcaaaccttaaatgcattttaaaaaagagtcttgttgaatatataattgtgagctgtccacattattacatattatacatttatactaatgctctgttctgtctgattgccctgcagatatatgcgtccaaattttgagtactggtccatggtcaagacgacatacaacaattataacagtgatgttgatgatgagctagtggacctcgatgcacctgaaatgaatgtcggcagtttagatgatcatgttgagatagatctcaacagtgatgatgacttggaatactccatgaacaagatgtccataacgccgaaccgctctttctttcatcaaattatggcaaatagtgacactggccttaccatgcctgcgaggatcagaccatcaataagccccccatcataatgggtccaaagatcatcgccgccgccaacttgttgttcacttcacaaaagaaacagccgtatgctgggagtgcattaggatccagcttgtataagagtacaagtatcggatagaattggagctttacttcatagctggtagaagggtcgaacgacccatcttttgcgatgtatccagcccaaataggttagttgttgggatgaaatgtgaagtacagatgtgttattaaaaacgaagcgggagtggttgtgactatagactagcaggtagccctctggtatgtaaaagacaggcctgttttgatgtagaacgatttaccaatattttttatatcggaacagcagctgtctaactttgatactagatttggttggtcggtgctgtttcctgaatatgcgttgacacttgacgaattcctatatcgtccattcgtctgtgaagtgtcaacttgttcaatactgtttaaatttcaccatacaaatatctcaagtgccgagttgttcaatactccctccatactcgtaaaagaagttgtttagaacagcgacacggtcttagatcaaaacacaactttgacttcttatttctataaaaatatttattaaaaagtgatatatgtatacttttatgaaagtatttttcaagataaatctatacatataatttttacatttttaaactcaacaactttagagttatttatgatttatattctcaatgtttgatttaaacattgtcctaaacgacttcttttatgagtatggagtagtactctttaatttcaccatacaaataaacgtgtcaacttgttcaataggactgtttaattttaccatacaaataggcaacgcagtttgtcctgtcaagtgtcacaactggttcaatactgtttaattgcaccatacaaatactaggcaacaaggtctgttcacgtaatctcaaagttctcagctcagccagtgaatctgaccatcaccttattcaattgataaaggcctatatataatgctctggtttttttttttgaacagaaaaaacagcacagtagtgctttttcattgaatatagaaggagaaaatacaacccctaggggtaaaacaaaaagatctttagactatacactatacagagtgcgggatgagctcgcactctgcaaatataatgctctggtttttacgtacaagacagcatcacgctttattctcgacacttgtactcgctgcaaatgtgacgagcttatttatacagatcgacgcattcctgaacctgtgaagcgtgaaccattcagaccctgcaaagccaccatcacacggacacggagagcgagtcagctagcgaaacacataagaaagcacgaaaatacaatatagatgcatataaaagcgtactggttgtagtcgatgacgatcctgccggcgtcgaggttgccgatggcggcgaaggcctccctggagaggtcgagggtggaggtgcaacccggcgacgggcagcggtcgacgatcttgacggtgaccgtgccgccgttgcaggggttgggcacggcgttggtgcccctgacgcaacgcaccgtgtacatcctcccgcacgcccgcccgccgtcccacagcccgtcgctcgccgccgcgatcatcgtcccctggtcctggaacccgtagcacgccgacgctgcaccgcaacagcacaagttactacagaaaatatgttccagaaatggaatagtagaagactgtccaaatgtccaatggccccattcttttctccttaagatgtataaattttatctcggtttctattgacacgtttttcaaaccgctaaacggtaagttccttacaaaaactaaactattaaatagatctatttttaagtttgtaataattgaaactcaattattcatgcgctaatagatttatcgtttgtgtgcgctaatatcatctttatcttaatctatctcaaacagacaaacaccaccacatgtttggtttatgttattttcatctttactaattttagcattatcaaaattttacaagcagaaaccaaacacattattattaccatcataagttcatggccctagcaaattttagtaatttgggcactctgcaatccgaaaactctcatcagagaatttggcgagagcttttctcctatcaaaatttggtattattggcaagttctttttttccgacaacaaaccaaacacatcattcagaattaaggagcagtttggagatgtacgggtgtaaacggtgtagaaggtggcggtcccttcgatggcctgcgacgccgagacgaggcccaggagcagagctgcagcgagcaggatgccaactctagccatggccgccgctagatcagacacaggttctcgtgtaggattggatgagcaagaagctgaagtgatgagttatccattgctagctacgaggttgatttatagaacagctgctagcctggtacgtactctgggccgtggaaaatcgtgcctgatgcatggaaagttcagacttgcattccgtccagtccgtaggcaacaaacttggaaaatttttagtcctgtgttgtcgaaactagatttcggcaataataaaagggggtggctatcaagctggaaaagtgtatgggtttggagacaaaggatttatacaggttcaggccttcttataaaagaagtaataccctactcctgtccggggatgaatccgccgagtgtattattgattgtatgatttagagaaaatcaacatctgcccctagaggcacccggaccccccttatatataagaaggagtccggattacaaaagataatctatgtccctaacggaatacagtcgtgaccgactaagtcttaaggtgtttccttgatatacaagttaggaaacaaacccaggatacatataagatattctatctatattcggtatcctatattcagtccaaatatcatcgccgtgtagatatgggatatccataatctccacagtagcccccgagacctttgcagtcaatcatcgtagccttctcaaagataataatccgagtgcttcaaacttttcatgccaaggcctgccgagtagcgaagacaaagactgtaaagggcgaaaagataaaaatatggtgcatcgaatagatgcacctaattaggtgtagcccccaactatgtgattagttaacgaactaaacatatagttgagagaccaaataatagcacaatcgtgcatcatatgacaaaagcacacacggcgcctaaataggcatgctagccgaccgctttttagccataatgaaaagagtccgagtggtttacactctaaaaggttcacgaatgaacacactggacaggcatccgaatataaaactctaaagattacccaccaagtattataaaaattatggtaatgaataagtctaatagcctaggctatgactatttaccataatgaaaataggtatataacataccaaggaagtgactatgataaaaacaagtcattccaaataacccagacagcttttgtagcctaataaagctaacaaaaagcagtataacacctttctgtcgggcaccttttaatttgcattgcaataattccaaagaattatatgaccgcataaaaaggattttatcagcattgggcaacactattgtgcgcataatattgccaaagcaaaatatgcctaagtccctaaggaacacaatgggccacgcttttaaaagtattgggctgaagtactgttcaggcctaggcccatttgcacctccgatacccttaacaagaaatcccgagatccaagcgacgcttcgtcttccccgccggaactctcaccattttccccactccttgctacagtgtagaactgcgccggcgaactagggttcaccactccactcaaatccaccttcgaaaagtgcatcaaaatccttcccgtgatccaccgccttaatccctcatttctccctagccatccctcgaatcaaatcagcgcattcggataaaatcgatggcggaagagaaggaaagcttcgaaggccaatgggcgccgtccgacgtaacggaagagaacctgaaggagatggtggcgcacggcgttctcccagccaaggagatcatcgggtggcggccagcgtgcggtgaggcttttccgacccctgatacacatgagatcgtagtcttctcgcatttcttctatggcggcttcgctcttccgacctcgagatttttccgcgggatattaagcttctatggaatcagcttgcatcacctaaacccaaattccatagtccacattgccaatttcatccatgtatgtgaagccttcttaggaattaaaccccacttcgccctgttccgccgaatcttctttctcaaaccccaaccaaacaagagtaagccatgtgtagtcggaggggccggatttcagctgaggggaactctgagccagaaatacttctcaatgcccttcaagacttcaaacaaaggatggcatgcgaactggttttatgttcagaatcctgagcctgctcttcccgaatactcttgtcttcccccggtgtaccaagacacttggaactctcttccaatcggagatgaagctgcccaagccttggaattgttggatcgcatgttaaaactcaaagaacgaggcttgcaaggagagcagatcactcggcacttcatcaaatgccgactggcgccaattaaagaaagatcccgtacagcttttgagtttgacggcaagcatgatcctaatcgcgaagaaccagactctctggatttcaaaatcatgaaggagagaatgtataaaatcttctcaaatgccattgtcgtcagctactcacaccagctgccagttgtgccatataatgcattcaatccgcctccgcaggtatgtatctgaaatcttcaacttatgaccaaaatagtatcttgtcttcatgttgagttaactaaccatggaggcatctcattcaggaatacgtattgatgaaatctgatcccccaattgctcagcgccgatctcctcgccagcacaccattcagggaagtggagggccgacaaacaggtcagacccacaacctcaaacctccaaaccggctggtcagacaggtcctcgtaagagaaagctggtgcttaatgacgacgagggcgatgacagcaacaaatctggggacaagggcacgcccaacaaactcccaaagcataccatgcccaggaaaaaactggctggctgtcaaatgccaaagattagaacatcttccaggtataaacttctcggtaccatctccctttgatatgcttctctcatagaaattatgctgaatatcgaaaggacactttgcaggaaaccgtccgacatagatccaactggaaaagatcctgatccggctgtgacagagccaaatttatccaaagatgctaagccgtctgccgaaaaccagccgactgccgaaagccagccgactgccgaaagccagccgactggcgcccatgcttcggatgacaaagccgatccgagtgaccagccgcaactggagaccagtcggcaacagctgaaactgcaacaacacaagagcccccgactggaaaccagtcggatgtaggtcccgatgaagaaatccctgaagttgaagtgcaaacgacaacttcccaaggaccagaggccggtaaagactcaatgattaggtctctaaataaagaacaaggaccacctcatgttcagccaggaacatcctcaggtaacacatcttctcaagtgatgccgatttaaataacttcagcttactcgtccaatgtcttggaaatacatcaggaacactaggcgatgacgaagaaacaattcctcgcataaaggcggctgatgactcccgtcctcctatcttgctcaaatggtgggacgagaactcgcaagttgccggcatcgttataaatcgtcaaaaagaagatgaggaagtgtgccagctgaagaaagcacttggagaagccacttgcattgtgaatgtaaatcttccgggtgactgcctttaataactttgttctctctttagcagaactgaatcatgatccatcatgcagagaatccatcttcgcaatgaggccaagactacaactttggaaaagctggttcctcatttgggaactcttgaagcagttagggaccagctgcatgaggccaaggagtatgctaaaaagacagagaaggagttaagggaccgaattgcccagctccaggattcaaacttcgagctaagtggttcatcaaaaggtaaccttccagatctattccattgatttatgctgtcataactgtatcctcaaatatttggatttcaaacagcacaagctaccaggatggcacaaatggagaaacagattgaagccttgaaaagagacaaagtagaactagctgtgcaaagggactcagccttaaaggaggttgaaggtactgccagctgacaatttgaactttcctctctttaatgcagcaaattcttattataaatgtgttttgtagaccgtaaaatcaaatctcaagctcagtttgatgtcctggttggtaagatcaagaagcttgaaggagcaagagacgaagtcgccaatgtcgctacaccacttgtccaagctatgttccttaatgacagtggtccgagtgcacttgacgcaaccgaaatctttgacaagctgagagtagcaccggatgtatacttcaagaatatcaagaaagctggaagtatgggagctagtatggcattggcgatgaccaaatccttgtacccgaggattgaaattgacgccattgatggctttgcagacgggacaagcgaagaagctgctcttgatcttatcagtaatgctcaaagtgcggctgacaagattgcaagtgatgttgtagaacaattccgcaacaacgaccttcagccgagcaataataactctgatgatgaaaggactgattctgactgagtgtagatgtagcaaatggaggcttaatttgtacaatactggtgtatttatgctgtgcttgatagttctaaccaagtctttgatttcttaaaagcttttatcaagctttgttgagcctaaaacccaaagaagctattaaaaactttcagtcctcgcagactaagtagaaaaaatcaaacaaggcaatgatagaccaagtaagcaaattaaattgataaaaaatcacactccattattatgatgatagcccccgactgacaacggcaagaagaaaacttgatgttgacagtcaagatagggaagtacaatgataaacttaagcgtagaaacgacgaagatgttcaatgttccaagagttgtcgacaagagtaccgtcttcgcgcttgagtcgataagaacctggccgggtgacttcagagataataaatggcccttcccatagaggagataacttgtgccgatctcgtgtagtttgaattttcctcaaaaccaggtcaccgactaaaagggcacgagatcgaacattgcgattatgatagcgccgcaacccttgtaaatatcgagccgaccgaatcaaagctgcttcgcgggcttcttccaatcggtgcaagtcatccactcggtcttcttcgtagcgttcttcacgaaaattacgaaagcgcaaagactcaaattcgacttcactcggcaacattgcttctgccccatagacaaggaaaaaaggtgactggcctgtggcccgactgggtgtagttcgcaaagaccaaagtaccgatggcagttgttgcacccatttgccggcatagggttttagccggtcaaagacacgcgctttaatcccttgaagtatcatgccattagctcgctccacctgtccattgctcatggggtgtgccactgaggcgtagcaaatcttaattccgaagtcctcacaaaagtctttaaaaactccgccagtgaattgtgtgccattatcagtgattatccgattgggcactccaaatctatgcacaatgttgatgaagaagtctcgagcattatctgctgtgattgtgacaaccggtttggcctcaatccacttggagaatttgtcaatggccacaaagagatgcgtgtaaccgccaactgcctttttgaacgggccaaccatgtcgagcccccaaaccgcaaacggccaagacagcgggatagtttgcaactcttgagctggtagatgaatttgtctggcgaaaaattggcaaccttcacatgtgcgcacaattttgtcggcgtcggacactgcagtaggccagaaaaaaccctgccggtaagctttgccgacaatggtgcgtgcagcagcatggtttccgcatatcccagaatgtatgtctttcagcaattgtctcccttcctctaaagatacgcagcgttgcagaattcctgaagggcttttcttgtataactcagattcatgcataacataaagtttgctccgccttgaaatccgctcggcttcatcttcatcttgagggagctcttgagaagttaaaaatcgtatgaagggctctcgccagtcggcttcaaccatagctacgtcatgagtgtccgcatcttgagtagtatctttatgaggtacggtcggtgtataaaggtgttcgacgaaaacatctgagggcgccgcctcgcgcttggatccaaaattggcaagtctgtcggcggcttcattgttgtgtcgaagaacgtgactgagctcgagtccctcgaacttgtcttccaatttgcgcacctcttgtcgatatgccatcatattgtcgtcaatgcaggaccactctttcataacttggttgacaaccaactgtgaatcgcctcgaacaatcagacgctttatccctagggaaattgcaatccgtagtccatgaaggagggcctcatactcggcaacgttgtgggacgccgaaaaatgtatccaaagcacatagctcaatctttctccagttggggaaatcaaaaccactcctgctccagtgcccgaaagtcgtttggatccgtcaaaatgcatggtccagtgctccatgttctccgcgggggtatcctcctggcactcggtccattcggcgacaaaatcagctaacgcttgggacttgattgaaattcggggcttgaatgatatgtccaaagacatcaactccaaagcccacttagcaatacgtccgtttgcttcgcggttgtgcagtatatcaccgagtggaaatgatgtgaccaccgttaccgagtgaccttgaaagtagtgagatagcttcctggtagtaattagaataccatataacagcttctgaacctgagggtacctcgttttggagtcggctaggacctcgctgacaaaataaatcggtcgctggactttttggacatggccttcttcctcgcgctcaacgaccaagactgtgctcacaacctgggaggtagctgatacgtacagcaacaacggctcctgcgggtgtggtgaggctaagactggtggctcggtgagaagtttcttgaaatcttcgaaggccttctgtgcttcgggtctccactggaagttatctgttttcttcagcagcttaaagaagggcatcccccgctcgccaagtcttgaaacaaatcggctgagcgccgccatgcatccagtcagcttctgaacatctttctgggtacttggcggtttcatgttgaggatagcagtaactttctccgggttggcttggatgcccctatgagacaccataaagccaagcagcttccctgacggtactccgaaggtgcacttttcagggttcaatttcatcctgaaagcgcggatgctcacgaaggtttcttctagatccgagatcaaatcatccttttgcttggtcttgacgactacatcatccacataggcttcaacgttgcggccgatctgcgttgagaagcatctttggatcatacgttgataagttgctcctgcgttttttagtccgaacggcatggtgacatagcaataagctccaaagggcgtaatgaatgaagtcttcaagcagtcggattccttcagtcggatctgatgataccctgagtagcaatccagaaaactgagaagctcacagtcggcggttgagtcaactacctggtcaatgcgaggcaacccaaaaggatctttgggacaagacttgttgaggtcggtataatcaacacacatgcgccattgccctgttttcttccgaactagaaccgggtttgccagccagtcgggatgaaggacttctttgatgaagcctgctgctaacagcttggttaattcctccttgatcgcgtccttcctgtcttgtgcgaatcggcggagtcgttgtttgataggcttggcatcttctttgacatgtaaggagtgctcaatcacctctctaggaataccgggcatatcagatggtttccacgcaaagatatctttattgttctgaagaaaggtgatgagcgcgctttcctatttacaatctaactcggcgcctattacagcagttttagtaggatcagagggatctaggggaatcttcttagtcttggcttcgctttctccactctttgaaatcttggtagcgggcacttctccttcgctcgccgtggctgcagccagtcggatatcctctcgggcggacgccatctcgcgggtttgagccatgtcgcaactctccttgttgcatgtgacggcttgcttgatgtcactccgtagggataggactcctcggggaccagacatcttcatcatcatgtaagtgtagtgcgggacggccatgaacttggctaacgccgggcgtccgagtatggcatggtatgctgtctcgaaatcggcgacttcgaagctgatgttctctgtgcgaaagttttcccgagtaccaaaagtgaccgggagggtgatctggccgagtggagttgcggatagtcctggaattactccgtgaaaaggcgcattgcttggttttagctcggagcgaggaatctgcatatcatccaaggtcttggcgaagaggatattgagtgcactgccaccgtcgatgagagttctgcgaagcttgacattacggaccactgggtctagtaccagggggtaccgccccgggtggaccactcggtcaggatgatccgagcggtcaaacttgattgcaatctctgaccatcgaagatactggggcgtgtcgggctgaacagcattgatctcccgttcagtcaacttctgcttccgtttagactcataagccagggggccgccgaagatatggttgagctccttgcggtgatcttgaaaacctgccggggtgtcgccgtcatccttcttcctcgacgtgctttgttcttcgtcagagttctttcgtgcagtcttggtgtattgatccgcgaattgcttgtagacgaaacaatctttggccacgtggttggagttaggatggtgcgggcattgggagttcatgatcttgtcgaacgtgttgacgcgcgaacgctgtcgagaagagtgactggcggttgcaacaagttccgcaggcttacgcttgcggtccttatgattgttacttccacctcctcccgtagccggcgtacccttgttttgcttccaactgggacccgactgctttgatgcggtgacggcgtcttcagctttggcgtactcgttggctttttcaaacatgagcttgactgtcctgggaggcttacgcccaaacttgccgactagttcttcgtggcgaatccctttggtgaacgcggcgatgatgacgtcgtcggtgatgtcggagatcttgttacgttgttcagaaaatcgccggatgtaatctcgatgggattctccggacttctgaatgacgttgtagagatcatattgtgtgccgggacgctcgaaggtgccttggaagttggcgatgaagtggtcgcgtagttcggcccaagatccaattgtaccacggggcaatccatggagccaagatcgggcggaatccgctaaagccactggtaaatagttcgccatggccttgttgtctcctcctgctgcgcggattgcgagaccgtagacggtaagccacgattcggggttagtggtgccgtcatacttctctattccagtcggtttgaagccggctggccaatccactcgacgcaggtcgtcggtgaaggctgctactccgtcaaggtcgtcgtcgtggcggtccggcgagtgatggtagcctcgagctgctcggcgctgtatgattgtgtcgcgaagatcgatggggcggcgacgaggtggtgagcgaggccgttccactcggcgctccctatgaaggtcgggaggtgagtgaacagaccgctcgtcgtgacccctgctcctgcggttggatcctgcgccggtgatgctgaggcttggatgacggtagtcatgagatcggaagtggggaactcggctgccagtcggcgtgtggacgctttcggagttaactgggaccgaagccgcaatcatggtcttcgtctggttcaagatgttgacgacgtggtcggatcgattgagctcgttttggttgaggagggtgtcgagaagggtgatcgcggcaaccgcattctgttgaggggtgcggaaaaccggtgtcccttcgacatcttgctggccgatgagatcacgcgctcggcgccctgcttccaaagctcgctgacgtcgatcctcagcctccttcgcggtccgctcacggtcctgctgctcacgccgtagccgttcttgttcttgtgcttgatgctcctcctccagtcggcaacgttcttcggtctcccgggcttggcgttgctcctccgtctcattattggccatgaaaacgccaaagtagagaggggtgtagttgtcatctaggcttccgtcgaagtcgtcgaagtcgttgtagcgagaactaaattcgtcgtactccacgatgtcagtaggacgtgagtcgacggtgggagagctgttgtagtcatccagctgatccgtcgaaaccgtgccgagtggttggaggatgacgccgacttccctgaagctaggcgaaatcggtgttgaagccgacttccgcctaggcctacgggatgaagacgctgtcgtggtggagacggccgctaaatcgtcggggagcttcatcaggactggtgggtaagccccatcatcttgatctggtgtcgttggagaagatgcgatctcggccgagtggtttgaagccgactcggttgagatggtcttgaagtagctttcagccgcgttcgggaatccaaacgggaccgaaatccggttctctcccgactggtctgattccgagtcgaggagagaaatcttgccgaagttgttggtgacgaagtcgaggctgccgaaccgaaacgtctgcccgggcgggaagacgaggtcgtcgatgccggagatggaacccattgcactgatcggcgaaaagcttgacgctacccctacctggcgcgccaactgtcgaaactagatttcggcaataataaaagggggtggctatcaagctggaaaagtgtatgggtttggagacaaaggatttatacaggttcaggccttcttataaaagaagtaataccctactcctgtccggggatgaatccgccgagtgtattattgattgtatgatttagagaaaatcaacatctgcccctagaggcacccggaccccccttatatataagaaggagtccggattacaaaagataatctatgtccctaacggaatacagtcgtgaccgactaagtctcaaggtatttccttgatatacaagttaggaaacaaacccaggatacacataagatattctatctatattcggtatcctatattcagtccaaatatcatcgccgtgtagatatgggatatccataatctccacatgtgtgtcttaaggttaatcttgagagagatagaaagagactttaccggcagaacatactacaaccatttgttttagtcagaagagaaaaatgaaccgcacaacattgtgcatctggaaatagccaaatttccagtccagaagctcaatacgccgccataatgttgacaaactagcgcctatctatataccgacctattataggcaatttgcgtaattttttgaactgttggaaaaaaataaagggttgaatccactggaaaattcagcaagttcgctatcctcatctggaagctgatctgtaaccaggaaaaatattatttcttcagttacgttcatcggtttatgcaatggaaaaatgtgccaagtttcttcaacattgtgcctgatttcttcaaaaatgtattaattactaattagtagcagagctactgggatgaacacgaagaaaatgcggatgaggagcaaaccggatgaacatccatgacgccatggactcctctacgctatagcgattagcgatgacgaggacaccgtgtgggcgcttcgcaacttgccggagatcctacggagttcgccgccgcgtgttcttgcgtcaacatcgccggagaacgcagcggccatcacggcagcgccagacgcgcccggcgcaagggaaaaacaaagtacagcaacgaacggaccgatcaacttcgagtcccagcgaacggtgcagattgggccgaacatcaataggagggacaaaatggtccgctgcttctcgccttctcgtgggttcaattgggctgtgacgggatgaattcataccgtggactcgatttgcaccgggttttcaaagatagggaagacgttacaccgagtattgtgattgagggggcgattcaatcaggattaagagtcaagggaaacaaaatagacttattcatttttagagaatctctggttgttgtttttttcataggaaacagtagtggttttgaagcaggaattcgttcacttcataaatcatttctttttattgaatttcgattctgtatgtacatatgagccaagtccacctaagcagtgaaccatgagacctacgactctcagatgatcatttcttcatctagagcctgcaaaattgcaaaaacaacacctagtgagtgaaaaataaacattgtatattttatacattacacacgactgacacgagtatttatatgtatatatgcagagtatggtacgtactgttggtagtcgatgaggaccttgccggcgacggggttggcgatggcggcgaaggcctccctggagaggtcgatggtagcggtgctgccggggcagcggtcgacgatcttgacggtgatggcgccgccgcggcacgggttgggcacggcgttggttgcccgacgcaccgcaccgtgaacatcgtcccgcagatcttgccgccggcccacagcccgtcgctagccgccgcgatcatcctcccgttgtcctggtttccgtagcacgccgacgctgccaaaaattaagcaagatgtcggcaaaacgaatgttagatctcacgaaaattataggtgaatttggagcttcggaaatgcgaaatgtgaagatgtattcgaggtaaagcttaagactgaagtggtgtacggttgtaagtggtgtagaaggtcgcggtgccttggatggcttgcgacactgacacgaggccgaggagcagagcggcagcgagcaggaatgcgatctttgccattgactacttgtggtgttttgatttgacaaaggcaagattattgcaggttgcaacttcagttcttgtcaggacgaaaaatctttgacggtaacaaatttgttccaatacggacagtcggacagaagaatttataggagaataagagatactaaatctgtctctggagtagtaaataaagggagttaagaggtaccaaattaaatccgaccttacgctaatgtggatatatacatcactttatcttatcctgggagacatattaaaatgtgtgatttgtttagagaaaaaaacaaaaaagtggaaaaattgtcctggtgtggatagaggatcagcatgataaagagactaaacttactacgttgatttagcaacataatgacgagtcttataatttctcatacgatcgaatataagactgacatttgttaatgataaaatgtacataaaattttatatatctgtttctaccgatttgtaagttaatatatgttgaaaaataaactacgataaaaacatcaaaatcaacttaaaattaagttttaaaatgtaaatcttatctacgacttataagaggagcaaacgatgaagccgttaaactctcggacagttctacttttttccaacatggacggctctatctcctcaatgttgcatttgttacaattctaaagactactaaaattgactacacattacgtaagattcgttgaaattgagtagtcccatttgggagctttttttagtttgaaagactgacaggtgttacattttagtgagcacaataataataaaaaattttctcatcaatactcgatcataatccttgaatattcccaactatttttatgtactatatccaaatacaatctccgggtcattaaatcgttgtaaaatgcctaagcagaaggtacaccataaatgcacacctatctctcccttccccaatcgcacacaactccaaaaaaaaacatataattgtttacgctgtaaattatattatattatattgtaaaatttaaaatatttgcatatgcaattttgctaatccatacaatataataaaagtgagataaaaataattgatgacctacttaaaaaaggaaatagaagaaacataaaaaaccttacatctaaaagaaacgagatgtagcaatcacacatgaaaaaagtgtctggaataaggtaacaaaaaagagattatctaaaaaattgccgcaatttttttatgggaaaaaactttcaaatctctaaagtacaattgtaatatagttccatataactatactataactataatataattttatataagtattaaaataatatatgtaactttatttatatctaatttatatagagattataatatagttacaatgtctaccattgtagttacactataactataattaatatagctacatttaaaagttttttgccaaattataaaaaaaactcgcgacattttttagcaatttccaaaaaagaatatggcataccatatttttaacagaaatatagaagtttgaattattcaataatcatttacataatactttggagcacttgagatctcaaagctaagccacctttcatctcgcttgatgcattttctctgaatagaactccagctgggcggctgcagtccaggcatgagtccacgaaggatgcctttcattagcttgtcacagtcttctaccgacagagatttgctctcctcgtcagacagcctcggcagccggccggcggcgagctccaccgcgacgtccgtgagacggccgacgctctccacacagacctcgtcggcgaagcagcatctccactcgaacacgcgcagcttgggcgcgcgcacgacgagtaccgggtgaagagggcacggaaccgcgggagcaggtggtaggcggcagggctggacgacgacatgggctcggtcgggcagcggcacgacacgcggatctccctcagctcgtcggcgaggacggcgatcccggccttggtggtggcgctcattaggtgacgtcggtgatgcggaggcgcttgagccgcggcatggtgtcggacgtgatgtcgatgctggccgggagcgtgcagtcgacgatgtgcagctcctccagcgaagggaagacgacggtagagaggaaatcgctcgggcgcagcaccgtcaggccgtccaacgcaagccaccggagggaggtgacgccggggccacgcacgcgtggcggcctcaccgcgtaccagtacaggcctagctcaagctcggtggtcgccggcggcagctcgagcgaccacacgccggcgtcctcgtcagggagtcccctcttgcactggacgtgcagctctagcctcgacgcgttggccagcgcgacgaactcgttcgcgtaccggcactcgaacgggacgtccttccggtaaccaatgtggagcgtctcgatggtgtcgtgcaggccaccgtcgtcgtgacagcgttggcgaagcatgcgctccatgctctgcacgcgcggttcgctcgactcgcctagagatgcaaggttgccaagtaccgacatacgaaaccgaacgtttggaagccgggtgtggagatgttgccacctccgtgaaaccgcggcagtgcgcacggcgtcgtgataggggcacatggataggatgtgcaggaggatgtcatcggggagcttgctgatcagatcctcctgtttctcagtgactttcttaggctccgcttgtggctttgacacttttccatttcttttgttctgcctcttctttccagccatgatgggcgagtcctaatttacctcctcacgctggagtacgtgaaagaccaacaactgcacaccttatttatagggtgcacgtctattgttttccgaatacatgttgtacttactagtacctattttaccaaaaccgaactggattcggtacagagctctcaggctctcaccccggcacgtacactaaacggaaaagaactccagcgcggacacggactacaccatgtccaagttgcacgctgcacatggcctaattaaccagccatgcaagtccacaggccagtaattaaggtcaaacgagtgatggtcgattttaaacaagaaggaaaaataccggtttttgggtgccagtaccggtgtttgaagcagctatgcgcgtcacgactctcatgacgtgccagggcgccgcgacagcgaagaaaaaggctattgggcgatcgcgcgcgagcgagggacgagcgatcggtcagatttgctatttctattttccacgtgaaacgtgttggctgttcccttgccgtcatcagcccttctcaacgaatgaacaagtatatgtgaccttgctttatggtcggctcgatcattattcatgccttgttcgcagtgtctgagatggaaagtgaataggtctattttgtctccctcatctcttgctcttggttaaatcgcatccctcaaccacaaaaccgcttataacacctcccacaatttaaaaaacagtgcaaattgacaccttaggtggtttggaaagtaattttgctaacgtggtaggtcgacttagtttaagtgtactgacgtggtagcctagtcatcaaagaagtgaaaagagaagtggatcctacatataaatgacaatgataaaagaaaaaggtaggacccacttatcaacctccttctccttcttcctctcttctatttctctcgcgttgccgcgacgacgagcatgaattgtgaccacgggagaggatcttggcaatgcagcggtagttcccctccctagcaccaacgaggttcccaacgggataagacaccggcgtcgtctgcggcggcaaagttgcaaaggaagagaagcggcgagcaactacgcgtggggaggcgatcgagtagcgccatgggtggaggatggcgagcttgatgtccttggtgcggaatacaatctcgctgtggacccgactgacatctgggtcgtcaatgacgactgaggagagatcatgcatgtcacgtcagtaaaactgctttcaaaaccatccaaggagtccatttgcactggttttaaaaaattatgggaggtgttatacccggttttgtggttggggatgtgactcaatcaaggacaaaagatgagggatgcaaatagacttataccgatgaaaaacgaaagagcccattttgttacctgttttgggctagatttgttccatttttattgtcttcgcaagggaaaagtacaccaaaggtccctcaacttgtcatcaagttacaaaatcgtcccgaccacaaaactagatatcggccgtcccttaactaatcaaaatcggtcacagtaggccctttggtggtgttgaccccggttttgtcctacgtggcgactgagtcagcgtgggacccacgagtcaggatgccacgtcatctatctccttcctcctctctctcactctcctcttctctgggcaagccggccggcggctggagaggaggtcaccgggtgaggcgggagaggaggagagcagcgccgcgacggcggctggctgcggccgttccatggaggccacatcccgcgtcagcaacaccaacaaccacccggcggcgacgacgaaccttctcgttggcggcgacgacgcggccgtccacggggagacagccgttgctcgcccctgctgccgccagcttctcctccgcctcccgcgcccaggacggcgacagccgcagcgcacgcatcaggcggtcgcagcgtttccatctcaatgtttcagttccagacaaacactgcgatggcgagcacagcggcagcaacaacaagtgagcagttcccaccggcggccatggggcccgtcgccgctgcgccgttgctggaagaaccgtcgtactgggcagtgacaacctcgaaacagctgacgatgcatacgacgagcagcacgagcgcaatgaccggcttggaagaagagcgctccatcttgttctgctttcgcttgcatgttcaaagttcagaactcagagcagagacgatacacttgagcattttgctcaaaatggcaggatttatatagaattgcttgatggaattatctgtgaatgttgacatggtaaacatagtacatatgcacaatacaagtttgtccttttctctcgatcgtgttctgctcgccaggttgagttggggttgatctgaacggctggtttgctgttgcatactcgtctgaaaagttcaacaagcagatgaggtgctggctttgattttattgctggtgttccttcctttctgcctgtaccccaaccaccccgctctcctcgaggcgcagcagccgttcgcctaaaaggaaaccagtactaacctcaggatggtgatggccgcgacagcctgatgcgtgcgctgcggctgtcgccatcccggcgcgggaggcggaggagaagctgtcggctgccgggggcgagcaacggctgtctccccgtggacagccgcgtcgtcgacgtacgccgacgagaaggagagcatcccctcattcgccgtcgctgcggggtggttgttggtgttgctggcgcgggatgtggcctccatggaacggccgcctccccactgcggccgccgccggcagccgtcgtagcgccgctctcctcctctcccgcctcgccccggtggcctcctccccagccgccgaacagtttgcctagcgccgctctcctcctctcccgcctcgccccggcggcctcctccccagccgccgaacagtttgcctagagaagaggagaagagaagaagagaagagagagagagagtgtgtgaggaggaagggaaagagatggcatagcatcctgacatgtagggtccacgtaggtcccaggtcccacgctgactcagccgtcacgtaggataaaaccggagtcaaaaccaccgaagagtgaccggttttgattaattaagggacggccgatatgtggttttgcggttccgggacgattttttaactccatgacaagttgagggaccttgggtgtactttttcctcttcgcaatggggctaggctttttcgtttttggagtggcccaggaaggtccaaaaccaagtgatggctaacctgttagtaataagtccactttgactcccttaaacgtggcccgaatctaatccataaccctaaaccgtaaaaccggatatctcgactccccgaactattgaaaccggtgcaatttgactcccttgatggttttggagagtggtttcgctaacatggcgctgatgtagcaatgttgacctagtatgtgggttgacgtggcgcttaggtggcatttgaattaaaaacgtatacgtgggacccgtttgtcattcacacattaaaaattgtggggcccactgacatgtgggccccacatgtcatcccctccctctcttcttcctcccttcttcctcccttccctctttctttctctttctcttctctctccttcggccggccgcggggggcacaggacaggctgtagcggcggcgggcgagggccagagcggcggcgacggtgggctggatcaactactgtgtaccgcgtcgagctcaccttccacgacgaccacgtcgtgacctgcctcgccacgacggcgcgcggtggtcaccgcccaacgccccagcgctgtccgtggcgcgcaccacgcaggccaacggcgtgtggttgtagagctcaggggcgtgttccgcatcgtggccagctcggtgcccatcacgagggaggagtcgcgccgtcgcgcgtccacaactacagcgtcaccgacgacgactgcctcgtccacctcaacctcggcttcaagttcgaggcgtgtcacgccccgaactagtcccgaccggaactagcccgtgacactccaatttagcctgttaatcgataccagtcccaggaaacagtgctggtatcacagggagacagaatatcacagcaacagaggtctctttattatagagtagaagtacagtcatgttgggctgcggacagatcccgagctcacaactgcattacaaaagggaaacggaagccaggacttggaccaaacatcacaggcgcgacttgggaactaggccgaaaccctaaaactcatcgtagccggcttgctcctggaagaactcctcatcagcatgatccgcttcatcttcttcagcaactggggggggatatttatatagagcaagggtgagtacgggggatactcagcaagccaggggaaataagtgtttgatgcaggcttcaagggaaggctgttgtttttgcaattgattttatttgaactcttttatgaaaacaactaagtgagtgcttctcaaacgacacggatgagacagtgcgtctcgtccggtcggagtatgtgcaatgtgtcaatctttaggatttaaacaaggttggcacccggccaacagctttttcaacggccacccgggccaacaacttttcaaacggccacccgggccaacaacttttcaaacggccatccgggcctagctgatcccatcagctgtagatttttcaaacaccgaacccccttttcacacagcaacttcacaagcagtagtcaaaccaaactacgctaggaatcacctcacatccgcccatgaccgtgggcacggctgttcgaacagtttgttaacctctgcagagggggtacactttacccacacgacattactaacccgggtcacccagcccgtggggatcagccacgtcgggagacctccaagctttcatgacaaggcatttcgaaagccgacacaggtttaccatatgccgacgagaggggtcccagaccatactgtgccaggaagcccaggggtcctccccgacaccaccccggcgaatccacatgtctctcggcatcaaggctcccccgattagcaattcactcagccaggggcgtcccattccacccatgtggtcgtacttgtcttatgttcggatgaaattccaaggaaacggtccttaagtgcaagagcggaaaaccgtacacccggtacgttccccggtccgcggttttggaaattcatttagttcgcaagcaccgacccaggtgtcgggttttccaagtctttttgtaaaactccaattttacccaagttgttactcagattttaagtttgaaggcgaccgtcgatacttgcacagagtgcaccagtatcgaggcgcaactgggtggttacaaggggacatggtatagcaattaacaaaggaaggatcaaatgcgacaaattaggtaggtccgccaatctgccatgcagacgggacaaacagattaagtgcgatcctatcaatgcataatattttgcaagcaacataattaaatttcaaatataggctcaagatgttcaaaggtggcttgccttgctcgagatctggagcttgatcctcgaaatcctcgcactgcgggtcttcgggctccgaaactatacgcgaaacggaacaactcaacaaacggcgaaaaataagccctattaatgacctctaagcgtgccattagatagatctcgagatttggggaattttggaagttgaacggagtcaaacggatttacggttgggaagatattgaacttctaagattattgaatttttgatctaaaggaaaaggatttaattaaatcctttttggaaaagaaaaagaaaagaagggagggagggaatatagacttttctcggacggctagggcgcggcccaagagaaatggagcggtccggccgagctaaatgggccggccggcccaaggcgacccaaactcgcgcgcacgcgggagggaggagagagagagccggtggaccgggctcaccacgcgcggtcccgggtgggacccgcttgtcagtggctcggctcaccgtgcggagggagcacgcgacgcacgcgcgcgggcagggaagggacgcggtgcatgcgcgcggtccgcggtggacgcaggtgcggcgggcccacgcgtagcctcacggctcgcggtggatcgcgcgcacgcggagggaccgaccggggtcggcccgacccggtctggctgagctggcgccgacgtggcgcctacgtgactgccacgcgggccggcgggaggtagacgacgacccggccgcgaatggacggcgggcggcggcggcgagcggcggagcgaaccacggcgatacgggcaacagcgagcacaccgggcggttgcacgtgacaaggggaggcgagccaacggctcggattcgccggaggttgctcgacggcggcggattgcggcggcggcaaccggcggcgggagaagagggaaacggcgacgaggtcacgagaggtcgattcccggcggtgagagcatctacgcggcttcgggaactcgacgctagcgtcggattgggcggaactacgccgagcgaggccggcgacgagcgggtgctacggagctcgggcggcgacggcggcgagcacacggcgagcgacggcaacggtcggggcggcgccggctaactacggggagtctactcaagctactaccgaaagctagggggaggagatggagcgaggaggaagaacggagagaggcactaccgtgcgggacggggcgcagtgacgagaggccgacggcgcgggagtgatctctccggcctcgggccgaggaagaggaagaagagggcgcgctcggagtccccttccgcgtccacgaacgcaccggctctcccggcgcttggcgatggacggcggaggcgaggcagagcacgggaacggcgacaacggtgaggaggcgaatgggagaggaaaggaagggagggggaagacgggtttaaaagggcggcaatgtcggtttgagaggggaaccgacatgggcggtcaagccggcgagctggcgttccggctagcgtccaaagcggcgacaggaggtgacgccggcgagaggggaaaaaggggagaaaaaaaggaaaaggagggagagaaagggggctcgcccctttgccgattcgggaaaaggaggagggagcggggcgactcggcagagggagaggggctctctgcctccgccccttggaggctagcgcgcgaagtggcgggggccgggcgatgaccacggcgatgacggcggggcggtttggagcggcgcgacgacacgggcgacgggcgcgggctggcgcggcagaaggtgactgcggcggcgaccgggcggtcggccactcggcacgcgcgcgcgggaaacaacgggcggcgcggctgggcagcgggacagggcgacgcggacggcgcaacacgcggctcgggcgggaaaccaccgggcgcgcgcgcgagcgacggcgcgcggggccggctttgcgagcggggagctcgcgcgagaggagggggcgctcagcgcggctctcgcacgcgcgagcagcgagcggggggggggggggaactccccggggaaagcgagagacatagagagagagagggagggagcgtcccgggagagagggggccggggaagagatgggccgagcggaattcggcccatcgaacctgggggaggcaaactagacttttgcggagggattcgatttggaaggaattggattcggaattgaactcgacgatagatcggggattgagatcttgagatggcacggacactagacaacaatcagagaaacaaatttcgcaattagggtttttaagagataatttttcccgctaggcgccacgacggaacgggcgctacaaggcgctcaccgacgacgtccatggcgtgctcggccagacttccttcatctaactactctactgatttcatttgatgatgatgattacccatttaccctgatgagttactgactgacatggacgaaaattttataggacaacttgtctcgaatgcatgcctccactaattgccaattggcagggcagataatctccccaacaaccaacacaatcatgatgcactgatacacggtctgaagctgcatggactggaccaccggcgactccttctccggagcggcgtagcgcctccgccttcgtgcgattccggcaaccgcggagtccttcgcctatactcgccgcatttcatgccctaggaggctgccgtctcggccccccatggccagaaccctccacgaccccaactccaggtcaggaggcgaaaagcggcgcccactccaactactcctcccgtggtcgcgccgttcgcccagtacgtagccgactcctcctccacattgcaatccgccgccaccggtctggcccccacccaccgccgctgcagcctatgccccccgcgggccgcggccggccgaaggggagagaagagaaagagaaagaaagagggaagggaggaagaggggaggaagaagagagggaggggatgacatatggggcccacatgtcagtgggccccacaatttttaatatgtgtgaatggcaaacgggtctcacatatgtttttaattcaaatgccacctaagcgtcacgtcaacccacatactaggtcaacattgccacatcaacgccatgtcagcgaaaccgccctccaaaaccatcaagggagtcaaattgcaccggtttcaatagttcgggggtcgagatatccggttttgcggtttagggtcacggattagattcgggccacttttaagggagtcaaagtggacttattccaacctgttagtagtaacaaggacacatgaggttcacgtgggttttttttcttttactttttctaattcttttaaacccatttgcaaaagtttatatacataaatttacttatgcaaagtttctatatacaaagtttatatgtacgatgcatacatatataatttttatgtactataattgagtagtctaaatgcacataaatagatggaataagttcacattgggtctctctatttgtcgtccaattcgattttcgtcccttgaccgcaaaaccgagtacaaaccgtctcccaacttacaaaaccgggcaaatgtggtcctatggcagtatggagggcggtattggcctacgtggcacattgaccatcctacgtggcgcgctgaccacgtttctcctctcttttttacagcgtcgcgcacggaccagtggtcctcgcggcggagcgggagcagcgttggatggcgggagcggccgccgcggcgctcgcggcggaggacggcggagcgcggcccattcgagcacgaagatggcggcgccgaggccgccgacgagcttgaggatgacctcgccgtcgtccttccagacgtaggaccgcagctcggcgaggaagtcgccgacctgcgtgaaggcgagcagcgcggcggcgccttggaagatggcggtgactacggcgggagcgggagcagcg

SEQ ID NO: 10283 - DNA, 3954 bp, Oryza sativa
ctcgcagaatatatgcatatggtacgagaaacgctccaaaaaatattggagataagtcacttggagaaagagagagagagaaagagagaggggcactcacagctataggactaggagagaggggtgcctccttccttccttccatgcggctgcgaaagtgggaggctcgtgcaaatcaacgagatatccaacgctttgtttcatcactgggaacaagaatcgtataacaagagttaggggaaaatccaaatacccgcctacaattcattactttttctgctttctactctcctccctacaactcaatattgttcaaaggatttcccaccactattcaattttcacgatttttcgtgatgccctcaatttctcgttatcgtgggccttcaacacatcccacggggtaagttgcctcgtaccatcttggtggcaaaagcgtgcacacctcctttcattttccatctttcgcaagcttaaattccgcaatcgccacttttcaaattggaaagtggaagaagatccgtgtgcttttgccatcaagttggcacgaggcaattgtgcctgcaagtcaccattaaggcccacgataacaagaaatagagtgtattagtagaaatcgtgaaaactaaatagggatgggaaactgaaagagaaattaacttacgtggagtgttttgaacaataatagaattgtagagggaagagtagaaagagtagtgacttatacgtgtatttggatttaaccccaagagtaaatgtcccgttcccgttctcggtaggtttccgaatatatgttatcgaggacgtcactcctctcaagtctcaaccttctaaaccatagtatgtttttaagtgttaaacgggatgcaacatcctaacgagttaacatggatccatatagtcgtacaaaaatgaaaactaaaattaaaaaaaaaaagatccaaacaattattctaccacatggaaacaaaggttgttcaggtcaaaggaatagctacagtcaagttcatcccactgagaaggacaaatatattcatacttcacttgccctcaggcatttatctcttatccagcatatccattttgtttacagtaacacggtaaaatcatatcaaacaagcttggagcaagcaaaatggatagagtaggaaaggactagcagctttatgcactgtggttgtaagcaagccgccgccagagaaatgcacttgccgtgcatacacaaatgaggccaacttgatgtacagctctaccacttcatctacaatgtacaatctaccaatctgctaacacaagggcgcgtggcgtgtgcttgccttgcgcatgagcaatctgtacaaatcagcctaccattcggggctactgcaagacttcagggagtaactggagttaatcaggcttgtagctgcttggatcttcgaaaaactctgctggaattgatggtggagagtacttctttgctacgaatttgtactgagaacaaatagataggtgatagaaacaatttattaccaaatagaagtaaatgcgttccagcaacaatggccttattttgacttcactcaccttgtgttgactgtatttttctctaactgctcgaaggttgcctccagggccaaccaagaaaagccggtgtagtccttttgcacaattgcataggtcggatggtttgtattgtgtgtagaatgaaagtgttgaattctgtttccaatttaagagagaaagaaatcaatacatttagtctagtttgcagaatagcaataaaatctgcaaagtttaaagcattatacccaaggattctctgttggcttaaggataaacttcgccaagaaaatagaagacgcagctataagtgacggtacatagcaaattaagctgtactccagaagtgatagctccgcaatgtaattagctaggaactcaagatgcaaaactggagcctgcagaaggaaaggttgattgagtaagctacatgagaatgcaggagtggcagagtctgtaagctattgaagaaaacaagtacctcatggcatacttgagcagctcgtagaaatctcctattgtggaaccatgaacaatatttggtattagtaactataggcatgataataatcattgttgtaacagaaaatactacctcaaaaagcattttgttgtaggtgcagtcatctcaaacttcaagtatttcaggacagaagcttccattttcaaaacctgttcgttagaagatgagaataagagacaaggaaataaaaagaacaaagcccaatctatactgggacacagacctcatccttagtgtatgtattgtcagaaatatagcagagctcttctacttggggtgggcatatctcttcatacttactgaaatttgaccatatataaactgaatcagaataaaacataaaaaagaagataaaagaaaaacaagagaacataaacagaagcaaatgggatcttacgaagctataagcaggcaagcgacaccaagtaattgcattttccgccgattgatcaccttgctcgagagataccggtcaatgtaattgactgtgaggtataaggtttcaggtacaagccgatattcttctgtgacctgaattggtacgagtcatgaatgtaatagaaattaaatggatcatttgctgtgcctctagcttctgaaccctgtttttatcctgaaatagagtagcttacttccacaagccagtctattaacactgccctcatgcttgtgtcaatgttcttctgaatggtttccacaaaatctgttgaaggccttttcttggtctgctaaaatgcagcatcacagcacaacagcaacaaacataatatcagattcttttgtgagcaaaacaaacagggaataaccaagtcagtgatgctacgtagcattatattttacaataagaatatgctaagcaagaagctaaatcggaaagcagacaaggatgacgcaatgcatcactctatacaggtgacggaatatggcatgtaaaagaatctatcacctcagccactcgcaagtgcttgtaaatgtcaaaagcaagagttgcacacagctgtggatcctcatggttgttgtcaatgtcgacgatataatcaatttctactgaattacaaccatgcttcgtccatttggatgccacacctgtaaacaaaccgctaatcaccaattctttcataggatgcacaaatggccaaaacagaattgccaattccggcaagaaaacaaacctgcaacatccctgttgtcagaaatatgaagcttatcatctgccaaatgttgcaaggaagataccacttcggagtccccatcatcaaggcaatcaatatcaaggctttccgttgaatcaccagttgacatagcatcttccttagacatagaattgtcagataggccgggtgaacagtcatggtgccccactgacggcacaatggtgggcagataagggttacaagctaattctttctgaagggtactgcctcgatgtggtattgcttgatcaaactggccagaagttggttttgggacagaacccccttctgtgttccaattgcaaaggcttcccaaaaatcaggggcggatccaacttgggacatgggggttcagttgaacccccaaacttttgggtgaacaaacaaactgttattccttgaattatttaagagaggtttaaggctatcaaattaaggaggaggagaagatctagaagagaagcgcaagcaaattccagtcccggtggggtgggagagagagagagagagaggaatcagaaagaggacgcaccaggatcccctcccctccgctgcgatggagatcgccgcccggccctcccctgttcagccgcgactcgtcttggcggcggcgcaaggaggcaaggagcggaggagacaacgagaggtactcgactactctgcccttatctcaatatttttacttacctctccttc

SEQ ID NO: 10284 - DNA, 17684 bp, Oryza sativa
aattcctgcagccctaataacaaaacaaattacataatccgcatgtaaactgtgagacaaatttattaatcctaattaatccataattagtaaatatttactgtagcaccatattgtcagatcataacacaattaggattaaaagattcgtctcgtaactcatacgcaaactgtgtaattatttttgggaattatatattttttaaaaatatttacgtgtgtttcgatgtgacgggacaaaaaaaattaccggttcgtttcctttgtttatgtagcctatagtggcaacgcatgctgacgttacggtgtaccgccgtcgaaaaccaccctcgctatctctccgcgttgtcagacgcacgcctcccaccccaccccaccccaccccaaaccaacaaacgccgtgacaaaccgattccacgcacagcacggaggtgggagaggacgacaccccgtcccccccgtgtccagccaccaccaccgcgtcgtcgtcgtcgacccagccatccatcccacccacacgtcaccacccgcgcatcctccccccgtgctgcggcggcggcggcggccggcggccatggacatggacagcgtggagtgcctctccctcccggactcgtccatggacgtggacgacgtcgacggcggcggctcggtgcaccaccaccaccaccaccaccacgccctcccgcctcacctccccgcgggggtcgccgtcggggtcggccccggggggcgcgcgttccccaaggcgaatgtcgctggggttggtggtggcggagccgccggggcccccgcggcggggggagcggtggccgaaggtgggggccccggcggcgggcctcccgccaccagcgtgcacgagctgctcgagtgccccgtatgcaccaactccatgttcccgcccatccaccaggtgggtttgcgcccctctctctctccccgcgccttcgatttggggggacgttctgttctgtagcgcgcctggatttgaattgaaatgggcttgcgcttgattcagttgggtgcggatttgtgggtttcgattcgcaaacgcgggatctttgcggtagcttgctgtcgtttcgagttaattggcgtgttgttcgccaatttgatgcagttcgaattggggaaattatcccctctatatgattgggttgtgcgatttgggtaatcttaggctggggatttgaattaggcccattcggtttcgtcgactctattttcctcagcgatttgggggctttttttgtgagacatccttgctgatgtggtttatttgagaaatattttaaatgaaacgtaatttccgttttggatctgaattcgtgcgcgctaatgtccatcgtattccttgtgtgctggttaatttggacccttttgtcgataatttattgcatttgttgtttacccaagctccaaatgccttggaatactgggaaagaattgtccctttgcatacttgttagcttatcgatgtcaatgttctgtcttgttgttagtaatagttgattcttctaattattgggacctcgttgagatgctcccttcacaaatgggtgattaaccagtcttgctgcaaatttaatgccacaaaattcttccatttgatgcctcgataccttagttagtgatagtgtagactgcattaacaagggagaacattcatcttgatggaggtgagctggatttctaaagataactacacaagattgtggtctgttagaagttagacaactatcccatggaagacgctaataatttattttacctgattaattgttattatggttagtctggcactcattttatcgacttgataggttggttgttctgctagcttctttaggatgaacttgtccttgtaattgattagtaactatattctttttcccctagtttgtcctagtgggtgtagcactgatagtaacgcaagggagtgaagtcgcatagctaatttccattgtaatttggatacagtgcactgggttcatctccctcaatggctaagttttatgaaacaagttggtttagggttcctcaatctatcatgtcttttctatatggtccatttgatctgagctcttcttgctgatgtggatggagcatatcaatcagccatagcggtcactgcatcttcactggccttctcccttgagcctggccttcttccttcagtccttgctggctctggcctcctgaatcatttctatatatttctctgtagccaatgaatgttttggagggctctaattgaagcataatcttgtgtatcatggacatggtgaggtatggtccaaggattgaggatatggggcaatgggatactgtaggattcctcttaggctgttaattctttgcttgatttgaaaacactgcatggcttgatctgcaaatactaaacgtcctataaaattgtagtggttatgatattgtgtcaacaactaaagaatgagaagccaacaaatttacatagggtgtgtttagttcacgccaaaattggaagtttggttgaaattggaatgatgtgatggaaaagttggaagtttatgtgtgtaagaaagttttgatgtgatggaaaagttggaagtttgaataaaaagtttggaactaaacaaggccataatgcctactagtgatctttatcttctgctgccgcatgggaatcttactgagttgctgtgactgctgctttgctaaacgcaccctctctttgtcctcgagctatgactaaggtggctgcgatggaagcatggcaccatgcactaaacctgtactgttgttggaagaggaaaaacaaagtttcaaggaatgatggcagttcaagggaacacctctaagtgtctagacattaagaactctaaattgacacagcgaagcaactgcacccttgctaccatagcgtggttgtggcagagctgtgatgatggcatgataccctagaaggtaccaatcatcttctacagtgaggcaggtgataatggatgacagtgaggcaaatactaaggaagctcttccggttgttacagcctcaccattgttatgacgccctgacatgatgctgcatggagaactgtcaaaattggccagttagtggagcatttttttgctccatctcatgattcaagacgccactgatctcaagattcaatcttcttttcaggaggtactccaaattggccaatccttgtgtcatgagaactactagcaaggtaggatgcttgctatttgtcagttggtacggatctctccccacatgatggcctacaactaaaactctataaggctctgattcatgggtggagaagagtagagtagataactcctgtgtattcaatgccacaaatttttctgtaagcacctgtcacctaacaaaatagtcacctaacaaaatagcaatcaataatgtaccatctgtctgtgccaacaactacacgataaaagccaacaaaataggaaaagaatccctaaagcactaataagtaataatctttatcttatcttccgttactgcgtggagttctttcatgtgattgctgtgcaccctttcttggtccttgtcgtagggcaagccatatcaccacccttactagtttggtacattgttaatcaatattagtataattttattttgttccccaatgattattggtgacatacattgtcttatatacattgcatctgaagtaatagatgagcaagaaactatgattgagggtatgcacctgatgtaaaaggtacatttcaattttcaatatgggctgttcattgtgagaaaaaaactagcatagctaatctagtttgggttgcgtgtgttttgatggtgttcttatgttgttcatgcttagagatgatcagaattaggactatgatcatgcaaaattataatgatggacagtacatcaaccagccatctactaaacatctagggcctatttggtagcccatgctgctgcagccctgcaggtgcactgcaacagccatagcactaaggtacagcgctggtatactagttactgttggtatagctgcagccacagccccatcaagctatgctgaacagccctctagtctgaatatccaaatactacattaagtcgaatggtacacatcatccaatatatgcatatacagttgtgtcaactcagcttatttgcctcatttacctgcatatatttacatctgctagctacagtcttattagttccctcgaacctataaaaatgattatatatgtatgcaacaatttatctggcaaatgatcattattgtctttcctcacaatagattgatatggtagtactcacagagtcacatattgttctcttacacggtattgtatgatctttattctacaatagctgtgctaggcacataccagagatgaattcaccattctttatgtttaaatcctgttgctgcgtacactcctttcttttcttttctttttctaaattatatgtactttttatgtatcgaattttggaaaactacattccaaaggacaagttccaatctattgtgctgctgtcgaagcatcttttacagaaaaatcgataacgattatgttgcactagaaatattgggcctcatctaatatgtactactggcatagttttgttacttggttgtcactaattttatttttttacagtgccaaaatggacacactttatgttcaacatgcaaggctagagtccacaaccggtgccctacctgcagacaagagctcggtgatattaggtgcttggcactggagaaagtagcagagtcactcgagcttccttgcaagtattgttctttaggttgcccagaaatttttccatactacagcaagataaagcatgaagcacagtgcagctttaggccatataactgcccttatgctggttctgaatgtgctgtggctggtgatattcctttccttgttgcacatttgagggacgaccacaaagttgatatgcacagtggctgcacattcaaccacagatatgtcaaatctaatccacgcgaggttgagaatgcgacctggatgctaacagtaagtactataatagctcatagtattcatttttggatacctatttacaaacactgttcttatgatctttcctctcaatcaggtgttccattgtttcgggcagtatttctgcctgcatttcgaggcgttccagcttggaatggcaccagtttatatggccttcctccgtttcatgggggatgagaatgaagcgaggaactacacctacagcctagaggttggtggtaatggcaggaagatggtgtgggaaggcacccctaggagcatccgcgacagccaccggaaggtgcgggacagccatgacggcctcatcatccagaggaacatggcactcttcttctccggcggtgacaggaaggagctgaagctgagggtgaccggccgtatctggaaagaacagacgaacccggatggggcctgcataccgaacctttgtagctgatgagcaaagcgtacgacagatgaaacgatttgttgctatttggctggcttgttatttttatccattgccatgtcctgttttcgatagtccagtgatcgtgccagtgctgttgtatgttaagaagcaaattttagaggtgtaaaacattactgtaaagtaatattgtgtatatcgaattcaagaaaatcccacaagttggccaataaacgtctgtcatccatctgttcttatgctgtttacatcctgcctcgtattcttgctttcttgaggtagaaaacaggacagttttgcaaggagactgaagttctggataatctctggtgtttatcttgcaagattggtctaaaataaccatgtacgtagaataacatttattggtatgtaaggaatttttgtcttctggaactctaaaatactcctaggaacaaagcatggccatgtggcctgtatctaaacttctgaagtcccaatccgtggtagctgaactgctacggcaaggcgctacagtgtattggagtagcaattgagcactcagattaaaaccctaaaaacaaacggttcagatcagccaggtactgtagcatcaatacttcacttttcagcttgtactgtcacatttatattgtagaggttgatcatatccctaggattgtgaagggatggtgcagatttctcataatttaatttactacctgtgccttttgtactctaatacagaggatcccaatccgtggtggcttttgagggttcgcatcttctgctaagagcaaccacaatgtggcatagaggctggtagtaagcaataaaataaccttactatttaggaacaaacattgtgaaagctagcaatagcaattactaggtagtatggctactaccagcaataagaaactaaactatattattagtacagtgaatagtgtaggtgcagggtgtgggaggctagggattggtctttttttctattgcggggcataccttatgttcaccttttgcattcacacattgtggcatatgtattagctactaccactgattcttgggcccaccttattaccaagtttagcaataagcatttctttttgcctctagggaagaatggcaaaggcgcacttatgaaatgtgaggagagttacatgctatgccataggtacagtgataaatattgtttgattaattttttgaggctgttgtaacgattgatctcgtgcatccaaacttgatacaactgctgtaaatagataatgacatggggcactgtagctctccgccattccaactcagggcatctacaatataaggcacgggtagtagtagccttacgtaggctatactgtctaaagccacatataggaaactctacccccaataaaggatactctcaaatggttctacaaaatctgagggtactagtatcccacaatacgtgtctcagcccacaaagccacagagttattttcctcttctatcctttttctatttagccttttcttcttttgttttctccacctccttgcctttttcctttcgtcaccgtctctctttctctttcatcgccgcctctctccctctctctcgttgccgcgcgtctctgccgttctcgtggccgcccgtctcctccgcttccgccgccgcccgtctctgcgtggtggccaacggagagccgcgcgcagacgcgttggtcgacggcgagcggcgcgaggggtggggtggccgacagcgagtagcgggtgactgacggcgcgagaatgcaggagcgggtggaagacagtgtcgaagcttctcttcactgcctctctcccagatctgtcatgccggcagccggatctggcatgccagcggtcggatctagccgacgtcgcctctctctctcctgctgcccgtcaccatccaccactccgacgagggcgcggggcctactccgactccgcccaccgttggctccgcttcaccatgcagaggtgagaggggcaagaagggaaaaagtagggggaggaggcgggggacggggcaccgagatcgcccaacggtagcatcgattcgtggctcaagaaaagaggattggaggaggtagaggcacccgttcccctcgtgaggatcgcacctccctccagtggcacggctagtggacgggagatgaacggcatgagcaaggatacgagttcaagctacgcattgaacatggcctcatgggatacgatcccggcttttgaacactgtgcagacagaaactgcacagtaagttccaaatacaatacccagcacaatcttcaccaagatctatggatagatgcattcctgcagtagaacatagtgctttacgctagagatgaaaatggccagaaatgaatattacttatatgaaagcagctgtcgggaatttactatatctataaatttaattatttattaacgtaaatttgacgttgacagtaattagaaaattaaagtttatatgtaactattactaaccaaaagatagaaacgatatatattttatattatgttttaaaaaaaccgtcttacatgaattttcgtactaactccatccccaaacatagtaattttaaatttatacccttgccctgtgcagccaaagattcgatgcactggaggcacttcagagttcagagttgcagtcattgtcctctactgagctgctccgccgttgactgcagcggtgacacaacgcagttacaggttcggacggcatgtcggcacatcaccacaagagctacaaccacaacaggtactcctccactacggacagtaggtacaagtacgtagtattgccttgtaagaaaaggttacacgcacacgaatactagcagtattcgtacaagccgtacaggtacagctcggtgtaaggttcgtttgccagtgcccactgcctagcggtgggcagcagacatgcgcaggtggatggatggctttttgttgttttgctctcatcagtgccagggaacctcacacgttcgcctcaacattgcaagcctcttggactctaatgtctcgtgccttatactagtaattactccctccgtcccataatataaagtattttgagttttcttttttactgtttgaccactcgccttattcaaaaattttaaaattattatttatttttttgacctattttattatccaaagtattttaagcacaactttacattttttatatttacacaaattttttaaataaaacgagtggtcaaacagtgcaagaaaaaactcaaaatcacttatattatgggacggagggagtactactctccccgtctcattttagtgtagctatgagctttagtaacaccaattattttataattagttttttcattgttattagatgataaagtataaatagtactttacgtatgatttattttgaaaaacattttaaataagatgtacggtcaaatgttgaacacgaaatctacaactacatttaaaatgggatgggggagaccccatcctagtatggactagataaggacggttcatttcatcaccaaaataaacccgattaaattttagctttactaaatatttgataaggtattaacaatctaaactttgttcgtattagcctccactactaaagtttgataattctatagcctttctcgcagaaaattgataaaagtagcaagccaaacataacttaaatatctcaacattattaaatattgacactggtaaaatttatcattgctgaaatttagtaggaataaatcatgcatgaaagtgagcaaccccatataataatagtaattgagcgtatgcaatgccgtagtatgccgacgttcaaatggtctgtccaatatttgtgacacttccaagtggaaaatgactcacatgtctcacatgtgaggaatctctttgactatggttgtgtttggatccagggactttgttcctatcatatcggatgaatttagagtattaaatatagactacttataaaactaattacataaatgagagctaattcgcgtgataaattttttaagcctaattaattcataattagcgcatgtttactctagcatcacataggctaatcatggattaattaggctcaatagattcgtctcgcgaattagttcagtgttatagaatgagttttattaatagtctacgtttaatatttataattaatgtccaaacatccgatatgatagagactccctatctaaatagggtctatggcaccataacgaagtagtcatttattaaaaaaaatgggattaacagcactatgtacatattaaaagttgagtaaattgagaaaagatgaaaattttcattttacagctatgtacttttgtgaaaaatctgaaaaccaatactgaacttcaaaaccaaataatatttatttagcctgtgtttacaatactttttcccctagcccaaaaattaactggttttgaatggtattgtgctaacatggctacgtgttcactactagtggtaaaatcaaaagaaaaaaaatgaaataatttcacatgagaaggaagaaaaaaaaattctccattgcaaaggcagcatgaatgttactactactccatccaaaaatacaagaggctttatgggtaaaatccctaatcttttagataagagatattaccatccaaatatcgtacctcttgtcaccgtatgatttaatcaacaagtttgatcattgggtaggattattattaccagagtaaatgaagatgagaaacgattggccgcactcgcacgtgctccatggttgacactatagtgagtgtagtgatcacccaagtgagtgaccagcaatgcactaaccactcccctcgtctgtatcctatcattgtctgatctctcaagatccaacaattatgctcaccaaacaattcaggctactaaagtaaattacagcaaactgccgcgagacacggttaaatgtccaatcatgtccactaaatatcagctcaatctggcgaatatgcgagaataacattttcaacttgcatttctgagaatatttcaacttgcatccaaagtcataagcatctaactggaactgattccgatgcaaaaatgtcacaattattctgcaagaatggataagattacaagtccaaaacataattttgataatacattgtaattataagctttaatttcctcactatggttgcttagcaaaacaaattgtccaactgaacatctcaagaaccaaatctttctttggcctggactctgaaaacacctagaaaatctattaaaattacaacaagaaggctgcagaaatctaccaaagatgagaagattcaagagaaaaatacacactcagaaaatcatcacagaaagaagaagaattctaagttacaaatcaaactaacttatcttacaaatttgacacgaattcactgaagagattgacaggggacaccaccgattaaccccaaaatgggcaaatggaggagagtcagatcttggcctggtcttggtcagcaccggaatccgagcacgcggccgtccgccggcgagacgccgatgcggcacaccttggcggcgacgacgtggtgggtgaacacccggaggatggtcaccttccctttcaccaccagcagcgagtccacctccatcaccggcagcgccgccacctgctgctgctgcggcggcggctgttcttgctgcagcgccaccgcgcccaccgccgccggtgaggggccggaggcggggacggtgattgtctgcgccggggaggaggaagcggcggcggtggcggaggaggtgacggcgaaggccgggacggtgaagctggtggccatgtactgcgtgcgccccccgtcgatctggccggcggggatgtacatcgagccgacctcgccgccggcgtaggcgacgcggagcgagctgtcgtagtgcgcgagcggggagcggttggggttgcggacggaggcgagctgctggaacgtgaaggcgacggtgccgttgcgggaggcgaaggaggggagctgcacggccgtcacggcgatggccggcgcctgcggccggtagagcaggaacagcgcagccgcggcgccgcccgcggcgagcaggatgaacagcgccgccacgacgcaggacgccgccacggaggagaagggcgaggggcggtggtagcccgcggcggcgtagtagcgcggcggctccggcgatctggccatggcgaatcttgcggtggttcttggccggcgaggcgaggaagggaagcgagctgagagagtgggagggtagtcgctagtcaggagtcggctaaagttcaccgcttcacacgacacgagcggaaaagcgatggaagcgaggttggtgtgttttgatggtgtttttagatggttttgggtggctgaaaaggtttgttttagtggtaccagtaatactgtagccgagcactttgactcgagttgacttgaattgacgctttaccaggttgctataactatatgttccttcttttcccttttccttcatttgtcttctacaaatcgaatgttcgatattaagagtgtgtttgattgtatctgtttagtctggctcatctttctcatccagattgagctcgtcctagttaaggggatacacatccaattgtttggttgtttgtattagtctagcctggcttgtatgagatattgtttggttgtctgcacgagagatacggttcagaggagaatttgtttggttggttgtatgatacgcatgtatgatgatccagaacttaacttttcatatatcaatcttcttattgttagtaaaacaattcatcaattgagctaatgtagtggcgaaccacgggtggtgttcttttctcctgaagatgaagataaagatgaagattaaatgttttacacaaaacaaggtggtattaacatataattaattgagttttaattattacaaacttgaaaaatatattaatttgatatttttagagcaactttcatatagaaagtttttgcacgaaacacaccgtttagcagtttgaaaaacgtaccacgagtatccaatttttgttggagaaaagaacgaggtttatattagtgactaattacgggcttagagaatgagaacggtagaaaaaaaagaaaaagcgctctcgcgtcccgtcgcactccttgccaccgagcatgacccccactggcagcctgctctggcgagcccgattgctcaccatcgtcgtaatcaccgcatccatcacttcctgccgctcgctgcacgtcttgctccactactctctagtcgcgccgacacgtcgctccctgtcatcgtcgtggtggcgatgattgccgctgttgctcgccgccgtcgtggtggtcgcgatggttgttgctgtgctcgccccgtcgccgtcgtggcaaccagatctgacgggaaatgctggaggtgtcagatgcgaaagggattatgtggcaatagcgcggacaccaaggaatggatgggggaagacatcggtgatcgcgagacaaggtcgattgtgagcttccaaatctagaatcctctcctagtcttctccttcctcccgcccatctccttcctctcgaatctagctgaggtcgagcccggcgatgagcaatgcagcagcaacaaaacctagccttttcgttttcggggagaaatgagaaaggggcaaggtggtgaccagtgaccccttcgcaccgcttgcacacgcggctgcaatacgtgcacgtgcgggtgcagcgttgctgcacgcgttgggccaggacaagcaacgaagctcaattcgcccgttcctacttagcatatctgagggggcacttttgcatctactcgtcctggctccaagacatttacaggcaaccaaataggctgcaagttgcgatgagggtgagattgcaatttgtgcaatctcactatgtggagaaagtcttagccagctcatactccttacgatattagtgtactattaaggaaaaacaaagaatagcatgggattaactgagatactgtaacgtcccgcctctcctaggccgggcccgcttacatctggcagctttcataggtcatagattgccctcacagaccaacacatgtcttttctgcacactttgtcctcactcgggaagaatttcccggtcaccctcacagaccaacacatgtcttttctgcacactttgtcctcactcgggaagaatttcccggtcagtcacccatcctaaattgcttcaggccaagcatgcttaaccctggagttctttgaaaatcggcttctggaaaagaagttacaacttgttgatatgagtattctattaatcctattaagccctgtgccggaatgttgcagatactcccaaatcattggttcattaatgtatttggctagtgcaacgaggcctcacatctcatttgctacgagcaagatgagccggttttatttcaaatccgggagatgatcactggcaatactctggaaaaggtaatgcgctatcttaaaagcacagtgggctatggaattcactatactaggtacccaaaagtactagagggttattgtgattcaaacttgacatatggtgctgatgagaaaaaccacaagtggatatgtgttcacacttggagttggcgttgttttctgtaagtcttgcaagcagaccatcttaacgaggttaacaatggaagcagaactcacaatattagacaccgccacgattgaggccgagtggctttcttgagctcctgatggatttgccggtggttgaaaaaccagtaccagctatcctgataaactgtgataatcaaacattgattattaaggtgaacagttcgaaggacaatatgaagtcatttaggcatttaaaaagaagactgaaatctgtcagcaagcagaaaaactcaggagtgatagcgttagactatgtccagatagctaaaaattggcagaccagtttagggactatcacgtaatgtgatagataatacatcgagggagatggacttaagacccacttgagttacacaatagtgataacctatcttatgtgatcggatatcctgtgaattaggatgacaaaacaaactattgagtgactgcgaggagagaccctgaaatgggtccatctctatgatgtacttctatccttttctgtacggcaggatggtgtataccttaatgtcatccgtgtggttttcttaggcagagatattgtcctacaaaacatcttacaagcaacacaactatataagttcgactgctagtcacagtctatgatgtttgcgtgatctccagagaaaggcttggaatttgaacataggggacgcaaatggtagcctagtatcagttaaggagttgagtaaagcctgactacacaagactaataattcaaggtatagcccattgttcagttgcggtctggtgtatctccttttctaggtagaagttcaacttaacagtctccaccgaaacactggtataacaaataagtgcagaactgagaacatttcctgtgagccctgaaatttagtagggattgttggaataaataggctaagcccaatttatttccagtaaatttcattggctcacaattaatgttatagcattaataccaccttagaaattcaagtgaaaaaatctcaacttaaatacggagttattagagagcccatattgaccaattgaggtggtggtaggactgctacacgtgcacgcgcgtgccgatccgggtcggccggggcgaggacgaggcttggcttgcgtggccgctctctcgttttgcaacggctgattaattctgtactaacaagcgacttgatttcgctattaaccatataattgaatcggattgattttgagattactcctgaacgttactcgttggtgcgcagtataaaaatgcccaccaggacagatagaagggctcatcccattctgctcagttcatctcttgcttgattctcctcgaactcttccttctctgtacatgtgtagccaccacgtccccggttctgatcacctgcacgtattggtgctcatgacgagcaggtgcctccagaactccgtccgcttgcatacctgcacgggtaggtgggcgatcaagtttttaggagtgtctgggcatgactgctcctattcccgatctgcttctacttcctcgactacattgcaacctcttcgtcggcctcttcttcctctacatcaacatgccgaacactggtactggtgctattggtggaagcataggaaacgacagtggcattgctggaagagacggcactgagaacgacaacaccaatggagacaatacaattgctttgtcatccactggagcgttctccaagtatttctcaattcttctattggtgctgaacatgttgttagaagcttttctctctttagcattttcatgtttatcaccatgatcgctttcttatatgaatgtcatgattattactcaaattttctagattaaaaataccaatttatgaccatattttcaacacagtattgatctacaacaggtagtatgtgtgtttatagatcttcagtgagttcaacatagaaaggcaggagtattggagtaagaagaggataagaaaaaaggaagatgaatcaggagaaaagaagttaacgggatgactggtgaccagtggcggaggacggcaaaaaatctaggtatggtggtgtgcccatgaactagcacgaaaattagatcatgacaagaagaaagggaaaaaaacaatcccaatgcacgaaattatatgacgcaatctcaattctcaagcatggcaataagcactagtcataagttcataattcatcacccatttgtaaaaagtgtaaatagaagaggcactcataaatacctcaagattgcagttgtcaacaatacatcacatgtaagaacgaactagtgaggatagatagacatgtagtgatgtagaaactgcaaaatactagtaaatagcaaagattgattagtatactatagtctcctctgcctgcctcactgcctggatgcctgctggctgctgcccttctgccgtgctgtgcagctcagcctgcgctggccgcctgcgggctgcggcctgcctcccgcggccgccgcaccgctgcccagtgcggccgcgggagatcaaggtatggcgagcgccatacctcgccataccgactcctccgccactgctggtgacgtttagtcttcgttaaacctccgttacatgataattacgtgcggttaccttgctacgtgcggtgcggtgccctgcacggctgcacctgagccgaactggtactacaagaggtcgacgcgacgcgctgtgcagaggaggcgccaaggagagccgcgtcgcgtcagggcgtgcaacaccggaaccaggacgaaggcgaggaaacgcggttcccttccctttctttggatggactggacggaggagagttgggcttatgggcaggatttcaacagtgaggacgtattgggcattggtaacatgggcctgcggccgagatattaaaactgggccacgattgagctgcatggtggaaagaagatcggacggaggctgatggctggaataattaacaatggcttactccatccgtcccataatatagtaatctaggcctggataggctatattatgggaacggagagagtagttatatatgtttagaaataatagatttatatgtttaaataatatgaaaatgatgttgatataataatttgacattgcttgcatattaagttctaaaaataaaaaaaatgtaaataatatgtcatgtttgcatgacatttaaaatactcgaggtaacaattgctaatggatgatgatgtggtacaattgcatcttgagctttaaaagttagtggatatcaattttatagtaagataggatgtggctgcacagaaaagagagagtcggtattgtatcagttagtgagaagttgtatagatatatagaattcctcattacataaccgcctgggaaaaccgtgtggccttattaaaaatcatgaccccgttcgtttcaggataaatttttggattaaaatgatacgctttttaaactgctaaacggtgtattttgtgtgaaaattttctatatgaaagttgttctaaaatatcagattaatcctttttcaagtttgtaataattaaagctcaattaatcacacgttattatcacatcgttttagctaaacacttaatttttatcttcaccttc

SEQ ID NO: 10285 - DNA, 24191 bp, Oryza sativa
tgcgagacgaatctattaagcctaattaatccatcattagcaaatatttactgtagcaccacattgttaaatcatggatcaattagctttaaaagatttgtctcacaatttacacgcaatctgtgtaattagttattttttcgtttatatttaatactttatgcatgtgttaaacactcaatgtgacagggtgaaaaattttaccggggatctaaacaggcccttattctatactactccctctgtcccaaaatataagggattttgagtttttgtttgtaacgtttgaccattcgtcttattcaaaatttttttgcaaatataaaaaacgaaaagttgtacttaaagtactgtaggtaagtcacaaataacataaataataatttcaaaaatttttgaataagatgagtggtcaaacattgtaagcaaaaactcaaaatctcttatattatgggacagagggagtaggttgttatattatgagatgaagaaagtgacaaagcatatgtttatatggcagagagataaagaaaaattaggttgctataatacgaaggaagtaacaaactactccctccatctacttttgataatcaatttttgataggcatatttcaatccaacaacttatcatcttaatgactttctcggatttaatgcgtgactctccattcttccacacaagattggctatatgggcatcgagaaatgtaaaatattaatgaatcgtagtactccctccatctacttttgatagtcatattttatcttcgcacacagaccaaggataaataattctacttatgatccatttaaacctgctactggttattggtaaccgtcttcatggtaactgttttcagagggtgtaaggaacgtgccaaactcagagatgatgacccccagaaggccgctgaactagccgggccaacatacttggtaactgacgattgcccggaaaagtacgaacatgggaaagcactcttgccggattgggcactaaacaaaggaccatgggagatgagaaggttacataccttctacatgcatgctagcaaaaaaggcttcggccatataactgctcgatcaccggcagattgtttcagcgccgaaggttacgtatggctagatttctcagatctccacgccatatatcatcaggataagatgaacgtcaactatgttggtgtttggtgcatgtgagtagatgagttttaattaattatatgaaaagtatgtacaatacaaatccatgtgattgttactaacaagcttcttttgtaggatgcaatacatggatgctaagaagaaaaaagaacctatcggcttctccaactcggatctgtcaaacacagcataccgtgaggctagcaccagggtcagaccagctgaagggcaagactccaaaagagatagctgaatacaagaagggcttgcacaaggagaaattgattactgtctgttgacgaaaaaatcgaacacaccggcctgggagatctgcttaactccagtgcaggtccaaagattggtgagatgtgagtgtgccagtcagtttgatcttgcaactgacaagatatgcaaatagtagatcaaaacagccgatcggctgacaagccgatggagtagttccagccgatgccgataatagtcgatgccgataccagccgatagcgatagggtttaagcaatcggctatatgtccaatgtagataatgatataaaggcaatcagctgacgacgatgtaataaaataacaatataatccagtataaaccaatcagcaaataatgatatgataaataagcatcgatccgaaggtcaaagcacacatcggcaggaggtccgatgtcatgaaatccacaagattagattaaacagtgaagcctttgttgtcatcggctaaatccaacttatatgtatatgcaatccttatgagccgatgcaacgtccagataaatcaccggctaaaaccccgatgaaacccttattggcaatcaagaagcaggctagagattatggttctaagcacgacttagtagatcaaacttaactgatgcagcactaagtatgaaaagaaacataatatctagacaatcaagccgttgactgagttttcagggtggtagatgtctaagctagtctaatctagcaacgcgatttagccgataccggcagaaaccctaaaacgagaagtagccgatagagctaaattgatatgctaagactagattaacagagacatatgataaataggcaggcaagtatatcatccaaaccagagtaatccaagaggtcgaatgtactgatgcagccttgaacgacgccgacgtaaacgatacaattgcctgggccggcggagcattggacttaccccttcgccggagatcgaacaccgatgcagccccgtgtcaggtgccaagtcccgccggatgataaaataaagtagaaaaggtaaaaggtggcgatgcgccgaattgtattgatcatgaagatagattacatagaccccgggtgtacatatttatacccatgggttgatacaagtccttgtcggacaagaaagaaactaacctaaagataaaagaaaactaacaaactattcctaattaatagataaactgccatgccgcatcctctttaaactcggtcacttagggataagcttcctttagtagattgatttccttaaccgaatatagcaggaacccgactattggtgacttgataactcccatcggctgattccaagatgctgcagtcgataatgattctaagccgatgacgtctttgccgattaccaaattttactgttaacactgtcgcacagaacattggactagccttcttgcactttcaaaataagagagtcgtcatggccgcttacttgcacgttaatatttgtttgtgataaaaattatggattgtaaaaaaaataaaattttccacgagacgatatattagacacactagcgacaagagacactagcggtggagctgtcgtgggactttgactcatttcacacataggataggataattgttcctgagatgtgcacgagatgcaaagatatgccatcagctcaattccacttattttcttcaggtaaatagttcagacctatcattacctggtgcaacgcatgggcattttgctagtgcttgataatcttccaatatatgtacataataatctacctgcaagaacttctattaaataatttaaaaataatttacgggcaaattattattaaaatttaaaattttctacctatcttcgcaggcggatgttttttttttgcaggcggccactttctattttcgtaggcggaccggactagccaacgtccgcctgcgaaaactatcttcgcagacggacggccgccccgcctgcgaagatcggcgatcttcacagtcgtttgcttacaggcggatggccgccccgcctgcgaagaccgttttcggccgcttgcgataatgtttttcctagtagtggaagaggatatggatcaatcaaattcattcaatccttgtaataccggggcaagagcaaaattgatgaatttgtctttttatgtggctaataatatgtgcgaaaaatcaaaaatggaaactagcatttcttcaagcctcactagtcgggttgcaactcatcaatttttctcatcacaagactcattatgacagagataataaatgaactttataatgtcactaatcatcaacaagcagttataagtagctgcttaaaaaactgaagctccagtataataaactaccgtatattgtcgtcgtgcatttgcgtgaatttaacctccttctataccgaatgtgtttacatgttattttttttataaacatacgttgaggttcaattgtattttctgaaagtagttcgtatgtaaacaaagatttcagctagtgcaatagatatggctagggtttgtgctcatcttatttgtcagagtttccctccccctattcgctcaaccctaaccgtctttttcgcttgtacttgagccaccgctttaccaccaaatcaccaatcatcatctacattgttgcatgaccttttatcttcctatatattatattctatccattctctattttagcaaattattttatgcacatacttggatatataggtgttcagattacctatttggcaggaaaccgaagtacaaaacaaatggaaaatactatgcatatgacttgaacgtcgtgtgttgcatcactagaaaacagttgaaaaacgctatgggctttcgctgggaaacgttagtcatacgagtatcgtacgtatagcagccctcaacacatagatttacatgatctataataaataaatgttatcatggaaataaatagtttacagtaattatgctaagcttgtgaaattaccctaagaacagaatttcataattttactactcctctattcccaaatattgttggtttacatttgttttaaactacgtatcatacccataactatataatataagctgttttcagatattgcttttattctttccactgttttcgtatattgaaatatatgcagattcaaatcaacgacagccctagagttgcagtttttcttctttctatttttcttttcatttgctctgtctctctcccacgtatgacggtacgagggaggagctggatgtacaactgcagaagacccaaaaaggaaaaaaaaaacagttttgctgtccttttaccgatctgatcctacggcttcctccttgctttttttcctccatctgatggtatatatgttttttttgctgatcaggtagtgttttggcattcaccattcacttatagagattattagctcattctttacatgaattttatttcagttctgttatctttattctgatagttgaggcagaacagccctgatggctctattttcaccaaaaatatttaagcttttgagtgcattgttccagcattttattctccatagccccctggcagagtagcatagccaattcaagctcgtattctgaaagtccaaaacaaacattttagatgttggtaaatagattttaggaaaaagtatgaattaccccctgaaccacaaaaccggacattcttcaccccaactatgcaaaccggacgcggtggttttggtctacgtggcgcacgtgtggcagtccggtcagcattctatttataaaaaaaatatgggacccacctatcatactcttcctctctctctcacgggtgcggcacgagcggcagcggcgggcgcggctggtggagggcggcggctgacgggcggacggcgcatgggggcggacggtggtcttacggggtggtgccgtgacatctcacttgggggaggtcgcgacggcggtgggtggcgtgctcgtcggcgtgggagtgggggggtcacggctccagctgagtaccaccggcacctccacggccggctgcggcggaggatgtccccggcgtgagcagcctaacaccgccagagatgcggcggcggagatcctgccacgtccacaccacggcgccgctccacgggaagcagccgtcgtcgtcgtcggcagcgccctagtagtacccaatcctcctctcccgccgccaccccttctcctcctcaccggaggagctcgccttggatccctcctcctcctcctcactgtcggtgccgtcagagtcggagtcatcgccagtggctcccacatctccaccagtagcgccgccatgctcggcccccgaaacctccccaccctggtctctagcatcgccgctgccgccgtctccatcgtcctcacctccgccaccaccgcccaccgctcgtccgcccccgcgcacacccaccgcccatgcgcccccgcgcacccctgccgcccgtccgctctcgcacaccgccgctcaccagcagccgagcctgccgccgctcgccgctagttgcaccggctgtcgctcaccaccagccgcgcccaccactcccgctcgcgccgctacccacttcctgcccctgcatcgccccatgagagagagagagagagtgaagagagagtggggaagaggggaagtggagttatgacatgtaggtcccacattttttaaaaattagaaaatgctgactagattgccacgtgtacgccacgtaggacaaaaccgctttgaattggatcgaggggggtaatttgtccggtattgaaagttcaggatgaacaatgtctggttttgtagttcaggggggtaattcggttgaccgtgatagttaggggggtaattcgtatcttttcctagattttatggtcacatataacttcacgggtgcatggatatcaacgtatcactttacctcagagcatttagaaatatcgaatcataaaaaatgtgtgcgtataattttataacggggcgacgggggtgagaatcgggatactgctcaactcggaggacatagcgccatgatggcgttgtagccctgcgctcgcactcaggcgatatggagagagacgaggcgcatcgttattttttccatgtgtttggtttagggatgaggtgggatgggttaggttcattcctctttttctgggatgggatgaacctagtctctgtttggttggagggatggagcgaaccctattttttgtttagtttgagggatacaatgggtcggaatgattctatcccttgtttggatgggggattgttggcggctgttaagtgccaaatatataccgccaacacctgcataatactcaaataatagaacatccgacatagtgatagggattatttctaacatattccacgagtgttggtgttttttcgatgcaggacataaacaccgaggttgggaggaaaatcagactaaaggtgaggaaggagtatatccatacaaggatgggatttgaactttatcaaaatagcagagaatcaactcaaaattcacagaaatagatagagcaagctcagagggagagatgggctaaaggccagaccaggaggccccagccagggttcggccgaaccaatacctccaccgttagatgtggggtttggcatggacgctcctgatcactccttgatggcggttggagggcacttcgagtatttccccttccacaaccgtcattaactgtcctataaatagacttcacttcttcactttcaagacacactcccaagcttgagctgaattataagaggctctattgtactatttgtatactacaattaggaagagcgtatagtagaagacgtcagagaaattccggagctgtcggtaatcctctcctatttattttgttctgtttattactctgatattaatagcattatcttcctgagtaatatagatttatcttgtgagaatcatctcttggctagttcctaatcagcatacgggattattgttcactataatcaactaaaatatagtgatttcttttgtgttttataaacactaaagtagataataattgtttagatgtggtgtttaggtaattattatccagtaattgttgcgtatcccatagtacatttgaggtgggtgtagaggtggtgatagccctcaagaacacttaagtcctctctatccgggtacatactagagcgacatctgagaacagtgggttgccaatgcctgaagtattgcgttaggattaaaattaagcttttcctatgtttctcagtagaaaattctctgtatcctttgcctatcttcgcttggtatccttggatgaaccggaggaagagctaatcacacacgttttcctagatttgatacccttggaatactccgtagggaaagtgctacatcggtatatccgtgcgcttgcggattttatctgtgatcgtaagaaataccaacagggataaaggtgggttgtctagatagagacacctcctggtgaggttacatctctcatactaggtgattccccgcgctttgctacggtaattactaagcaatttttaatatattttttcgacaatcaagctaggagtaaaaaagaaaaaaaaatgaaacgtcagaatttatcagtacttatcatgaactgatactcgtactttaatgtggaacatgttgataagtatgtgttaaatattataaaaatgatagatagactagttaaaatatcatagaaatgatgtgagaggtgatgattggatatgcttgcatattgatttgtttaattaaaaacaaatccaattttcatccttcaacaggaaaacctgatacaacaggtccctcaactgtgaaaccagtgcagatgaggtccctcggcggttttgacggtggttttggctgacgtggtgcctacgtggcaaatttgatttggtcttcatctgacgtggcgcttacgtggcaatttgatccagaaaaataataaacttcgtgggacccacatgtcagtctcacacataaattaataaaaaatggtggggcatatatgtcagtcaaacaaaaaaagtgggacccacaagtcagtggtcccacttcctctaccttatccttccaactcccaacctctatcttctcaccagcgctctatgctctccccacatcggcgagcgcgcatagaggacgaggcgggtaggccggcggggttgccggcgcttgggaggacaggagccccatcctcgctggtggtgtccgcgtgtctctacctatgcgactgccaccttgccgctgatgccacgtctttcctcctccagatctggtccgcctcacccgcgatgggcgaagatccggcagggtcccgccactagtagtgtgacgccgacgaagaccaaggttggctctcctcctccgctgccggccttggtgacgaccacttcgaccgcctacccaacccactcctactcgtcatcttatactttcttcccccagatcacacgcatcgtgctcggcggcatcgtcaaccccatccaggtgctcgcccaaatactttcgctgccaactccacctctatcctcgcggcatctgtaccctcttccccctcgtcatcgtcctgctccttctctttgccgcggcgacgggctctctcaccgccgtgtttcacctctccaaggccgacggagcgcacctgtcgggcacctcgccatccgtcaagccgataaagtaggccttgtccttgtcacccagccatggcggtcgaggagcatctcgaagatgaggtcggggaccgggagctcaccgtcgcgtaggtatggcaggaggaagagctccatgagcatctagtcgcccgcttcgaacatgaacctcggcgagaaccccctgcgacctcgccgccgcccgcttcctctcccatagcccgtaacccgccgcgcgccgctccttctccccatcacccatcgtgcccgcctccgcctccgctgctagctaggaggcgtcctcctgcgagtccgccaccacagcgtcgtcgcgacggcattcacgccgcaccccgctccatcagtagccgcgccgcgaagaacggagaaggaagaagagcagcaacaaccgtaggggattgaggatgacatgtggggcccaccattttttattattttgtggcgaaactggcaagtgggttccacgggttttattattttctagatcgaattgatacgtaagcgccacgtcagatgaagaccgagtcaaattagccacgtaggcgccacgtcagctaaaactgctatctaaaccgctgagggagctagtctgcaccggttttaataattgagagactcgttgtatctggtttctggttgaagaacggaaatcggattagttgacaagtcaagggaccacagatgaacttattccttatttttatgttgccttccgaggccttttaatcttccgggtgtattgggcctaatagctggaattttaattctaaaaacaaaaatcacccaagcagccatttttgcgcgacagaaatgaattcgcgggcctatttcggcccgaaaaccacccatcaaagcttgcccttacggataaaaatgttttttttaaaacacagtacaaaacgcaggcgctcacaacgtacgcacactcacccctatgaacgcacacacgcacaccctaccctatgagcacctccgaaagactaggcctcgctgtcgacgggtacgtcgcctaccactgaaagaataattagccgtaaatgcgagcacccgtgtattttgaatggatataaacatgcacaactctcattaacattcaactaattaaactgccgacccagaactcttttaacgcggttaaaatatttttctagttaacaatcggttagggatgggtttcatctcttttacggataagatcgtattttagacacggtttttacagataatttcccgagaccacgcgctcccctcgccgctatatatattttgcgttagcccttcatctcctcctcctccctacctagatcaccgacggaggtagttgccgccgccgccgccgccgccaccgccggcgaggaagaaccaagatgtcggcgacggaagtgatggaggagtgcacggagacggcgagggagcggcgggaggaggagcggctgaggaatgtgaacctcgacgactggctccccatcacctcgtcccgcaccgccaagtggtactactccgcgttccacaacgtcaccgccatggtcggcgccggcgtcctcggcctccccttcgccatgtcccagctcggctggcccaccggcgtcgccgccatcgcctcctccttcgccatcacgctctacacgctgtggcagctggtggagctccacgagccggcgcccggcggcgggaagcggttcgaccggtaccacgagctcggccaggcggcgttcggccggcgcctcggcgtctgcctcatcgtgccgctccagctcatcgtccaggtcggcaccgacatcgtctacatggtcaccggcggccagacgctgaagaagttcgtcgagctcgcctgcgacggccgctgcgccgacatccgcctcacgttctacatcatgatgttcgcgtcggcgcagttcgtgctctcgcagtgccccaacttcaactccatctccgccgtctccgccgccgccgccgccatgtcgctctgctactccatgatcgcgttcttcgcctcggtcctcaaggcccacccggccgccgccgccgccgtggactacgggttcaaggcgacgacggcggcggggcgggtgttcggcgcgttcaacgcgctgggcgcggtgtcgttcgcgttcgcggggcacaacgtggtgctggagatccaggccaccatcccgtcgacgccggagcggccgtcgaagaggcccatgtggcggggcgtcgtcgtcgcctacgccgtcgtggcgctctgctacttcaccgtggcgttcggcggctaccacgcgttcggcaacgccgtggcgcccaacgtgctcatctcgctggagaagccgcggtggctggtggcggcggcgaacctgatggtggtcgtgcacgtcatcggcgcgtaccaggtgtacgccatgccggtgttcgacatgatcgagacggtgctcgccaagaagctccacctccgccccggcctgccgctccgcgtcaccgcccgctccgcctacgtcggtaagacttcaccttttggatctaagattttataagatggtatactctcttcgggctaataatacttatcattttggacaaaagtgaggtcaaacattaaaatctctagttataaataatttataaaatatttgtctttgaaatatggtgactacatgtatatgtatagattagttttaaaaaatacttcaataaaatcatttattaagatttatatacatattataataaaaataatgattaaagttgttttttttaagatcgtgcctttgtctaaacgacaagtattattaatccgaaggaagtacttatgttgtatgagtgtatcaaaattttcaagaatttttcataaccgtttagatagcttttacactctctggagcgatcaaaacaatttaatgtgttttgatctgtcaactttgtgcagcattgaccatgttcatcgggataaccttccccttcttcgacggcctcctcggcttcttcggaggtttcggattcgcgccaacaacttacttcgtaagatttatttatatatccgatcaccattaatctccattaattaatttttatgttcttggttaatttgtttgcttattattatttgttcatgttatttaattagatcccctgcatcatatggctcataatgcgcaagcccgccaagtacagcctctcatggttaatgaactgggtaagtttcagttttcattacgctcctgaaaataaacaatcaaatcgattcttttaatcatgttgttcttacttcttaccgttcaatttggccagtgtttcatcatcatcggaatgctgctcatgctggtttcacccatcggaggattacggcagatcatccttgacgctagcaaatacaagttttactcttagtccgatccggcctagaagatgatagagtaggattagttgtcaaaagagctagtagtagtagtttttaagatttctttagcaatgcacggtgcaagttatcagtgtctagaagaccaggcatcagagatgtaatagagtgcctgagtttatctctattattattataaaaatttaagatgtttttatcaaattttcgtccgtcacatgtagtcaaattcaacccgtatggccgtattcaaagagcatgcgatttataatccacatccgattccgtttcttcccaccggtgtttttggttgtttggcagcacgagaaccaggcagtaggctgcgtagcatgggccactgctgcaatctcccacccaacgttggagaaaattgcaatgttgagactgcaaacatgggggcttggctgttttaacatttcgagtggatgacaaatggacccatctgtgtgtatgaaatgtgggtctagtgtctgtggggagatagaaaaaagaagttgcaatatatattcctcgtatcatttattaatatatatttttatttttaactgttagtgtgttactataatgttatcgttaaattttgttagattattcgtcttatttaacaaattatatatattattatttattttgttatgtcttgttttatcattaaagaaactctaagtcgatatggcttacactaaattttaaataaaataaatgatcaaacattattttaaatgttaacgattgtaatatagtatatcttagaatgtgcacatcaaatgtgtatatgactcaatgtcaatatgatcctgcttggatgagtcttgctatcttttttaaaatttgaaaacaaacatataaacagttgtgtcccggaacgttgcagtagataatttttttcattgcagacaaggtaacttgttaatcaaaatcaagcagatataacaggagttggaacagatacgattggattgggcggatcaatgcatccaataaacagatacgatatgttagattcgaaattttgcatttaccatttgactttattttaaatataattaaaatgcgattaaaattgtatttagggtaaaaacaaaattagcacgttgtattttaaatttgtactccacaaatatgcgatatcattcataaattactcccctcaccttattattaacgtgttccctgtattaatgaatattatttttctttccttattatgaggtcgatcttacctctagcaaggtaatagcgtgctttgacagttggatcttggtctaatggacggctggaaaaaaaaaacttagaacactttagataagtcctaacagaacacatcatggtctgaatagtcaatattccaggatgaattgtcgtgctatccttttggatctgggaagaccacatttcagccataagagcatgacatcgaacagaaataaatagcatccagataaaagatgaattactgcaaaacgaattaatggtggtgtaacctgcaactgtgtaatggttctcttttttgtttagagtactgtaaaattaaccaactagctagaagagttgagagggaaaccttcgatcggaggaaaaacttctacgattgtgacatgagatgagactacgatccagtaacatgctagtgagcggaaggagaatgcaagcaatgtttaacttagctcggtgatataaactcaccgttttctaattggatagtaaaagtggaatcgctgtcaccatgaggagattgctgaagacgacctgaccatgttgaaaagtgggagagttatcggggagtgtgcttaattgagagtgtacatgtgcctggctgctcgtggtgacgcgcgcaagtgcaaaggagatgttgcaagacatactgatcatggttaaactgactgttgtagaattggataagatggcatgcaattttagatcatggttaaactgactgttgtagagttggagaagatggcatgcgattttaggtgtaggagtgggggaatgaccctgcgcatcagtgtagggctgtaaaaaagggtcgaggctcgcgagcatgtctcataaaccagggccgaatctgagcccgaacaaaaactcacgaactttaacaaattgagctcaagcttctatcgagcttgactgtgtgtatagtttatattatttgttgaacttattgatttaataaattaatagataaatatataaatatatatatatatatattagtatctattcacacaagcatgttttagcacaatatgattattttaacacttttttactcttttattagtttggttgactagaaaataattatactaatcaagaaattatcatcaaaatatatattatactacttatgaccgagctcggtagttgagctcaatctcaaacgagctcgaaccgagcttgtctaaaagctcgaaggtgtaataggtgttggaaatatggtcataaatcggcatattttaatccaaaatattgagacaataatcatggcataaacaatgtagagtgatctagtgacaacatgtaacataaccagtagcatactaaaagcatcattcgcatcatgaacatagcagtaacgcagtagcatgctaaaggcatcatgaatatcaggaacaggaacatagcagtaaagcgctaacaacaggaacaggagaaggatatacctcgagaatggccctccgctggattgtgaggcagaattgcctccgttagtgttgttgttcgcggcatcggctcctggcgcaccacctccggctcctggcgcaccacctccggctccagctccaggcgcgctgtcacgcccagaaattcactagtaatttccgaactttttttgtgcataaaatcctcgtccaggaatcagccgaggtacacaaactgacaatttaatatacaaatccatcataataataacgtcacatacttacaaaagaaaagaaaaacagcagcggaattaacggtctagcgatggcttctgctccactcccacaagcagctcaactggggtataagccaaacgtcttctccttctggatcctttatcttcaactgaggtttgattgattattgcaagaatgagcatatgacatactcaacaagccacacagccaatatgcaagtgcacaaggattccaaatgatggcataatataggctcatttgcgaaagtagcatttagcaaagagttaagagtagtaaaatagtagagtaattaatcagaaattttaatcaacactgaacagcacacccatgctgtacaggcccaaccatcctgaacaaccatacccggctgaacagatctaactccaaaccaggagctaagcaaattattaccagttataatcatcaataattattgtgagaggtgtgagactaatcacgaaaaacattgctcaactcgcccataaccgcgggcacgactattcgaatagttttactctggccagaggtgtaccactgtacccacaagacacgattccgcacatgtcgccatgccccgaaataccaccacggcattgcaaagggggaaatcgtgacaataccctttgcacaacacaactcaaaacagtgcaccgttcccggatcatagtcacccccttataaacaaggcttggactccccagcgacccccgtggacttctcgccacttctcagtctggcgcactataatgaatcacgctatacaaaagataaagccgttgcccacgctggcttgtggttggcacgataaatgtttcacaacagtagctcgcgaaccggtccttaattgccatgagcacgaccttcaaaaccatgtgctcacaacccaccattaatcatattttaattaccaattaattatcataacacgattaaccatcgtgagctaccattaaatataaccataaataataatgtagtatatatgattcatcccattagtgagctaatgtttctaagcattgctaagcaattatatatatataacatttagctgaaccaaaccaatacataaggttcaagctaatcaattttattacccaaggtatcaaggaatagggcattcaatgcaaattggccataacaaagaaataggttcacaccacccggtgacattcgaaaataaatgcacagttgaaataaatagagaatttaaatataggatcaacatgctcaaaggattgtgtttaggatctgtgtgacttgccttgcaataatcggtcttcaattaatcttcttgatcacttccgacgcactcacgaaccttcgcaacgacggaaacgacaaactaacacgcaaaacgaagaaaaagactaataaaaaccaaataaacagtacataaaaagtaaacaaacacgtaggtcataattttagatgaattatgagacttgaacggcctcattctgacttcaaatgaatttattatgaattttacaagattaaatctaattaaagcccattaaaaaagaattaaataaatttaattcaatttatggacaattttaatatgtagatctttattttagaaaaatttagcaacttgaaccacctgaaacggatctacggttatttagttatgattttccgaagatttaatctattaaaagaaattggaaaaagaggagatgatgacgtcggcatgacgtcatccatagcggccggttagggtttgcgagctcgccggagctagggcgatcggccgggactttggaggacaccttcacgaagaggacgacgagacgaacccaacggtactcaccaacgcgacgaacggcgacggacgacggccggcgatgacgcaagaggcggcggcggctcggttgaacggcggcgacggctctacggtggccggcggcgaagaaggacgggcggccgggcttcctcactccacggcgcacctcttggcggcggcggcaagcggcggcgacggcagacgcggcggcgcggcgcgaccggaggatggccggcggcggcggcggcttgacacgcgcggcgcggcggctaggaggcacgggagaggacgggagagggggcaaacgaaagagggcgacgaggggatgctttatatagcattagattagagagattggactccaaacgagagaaatcgatccaagaaaatcaaaactcggttttggagataaactcgaaaacgagtttgattcgggcaagatacccaaccatttgctccaattcttgaggggaaagatagaggagaacgagaggataaaaacccctcaaacaatcggaagaaaaggggagagattggggaggaaacggcgcggcaaggcggcacggcgcacccggctcggctcggcttggccggcggctggaggaggaagatgggtccgacatgtgggtcccacatgtcggtgacccgaggaggagggggcgggcggcttggactgggccgacgggagagagagagtgttgggccgaattcggcccaacggcttagggaggggttctttttgaactttttcaaataaaacaatttgtgaaatgttgttgcaattattaaaaatacttcccttgctcaaataattcccagaaaattctagaaaatagaggagcaagcatagtatttaataaaattttatctagctcatttttatgttgagatttaacaaattaaaaaaaaaatagatcttctcttttaagcttttaaaaatcatttctaataattccttttaaacaacaatttataattttaggattgtaaacaagaaaatcacttaacaattataattagatcattatatgattaatttaatatttaaataattgctgaacttctctttgtatgattaaaattaataattgagctccgaaaaatccgaaaaaaattccagagagtataattaaccatggagaatttaataaaaattaaatccatccatgctttatatttaggaaattttatttcccacctttaacttcacttgttaattattgaacatttcatataaattctattagtaatttattaaataatttataaatcctaagacgaaaatcagggtgtgacacgcgccatctcctccagcagcagcggcgctggaggcagcttcggctccaggcgcagacatggtgggcgagcagtcatgcgggaagcactcccctaaaacctgatcacccgcctacccggtgcagatctcaggcgaaggtgtggttccggaggccctgctccttccgatctctcgtgtgcgcaagcgatcagaagcgaggaggcgagagtagcataggcgtggacgaggaggaactagcacccgggaaagaagcaagcgattcattctgatcggactcgcggcctccttatctatcaggagagaggcagtcggcagtcgtgggaacgtgggatcatggacgcgccgttgcggaggcagtcgtgggaatatgggttcgtggttgcaaaagagtagcgacgtgacgcccgcccgcccgccagccagccagccacgcccacgccctcgccctcggcctcggcccggccctgcgcgcgcgcgtgtggctttccgaccctcacctcaaccaatcaacagggagcctccaataactccctatttaggtgcctccaataactccctatttaggttgagatattcctcgcttaaatcctgaggtggtattattatccttaacacttattatgggcctttgagatttaataggataaattgggcctagcccaattctaacaatccccaccaaatttcaaggctcataagaaatgttctcaaggttgtgcctgtttgatataccagggttttggtggagactgttaagttgaacttccacctaggaaatgagctacatcagaccacaactgaataatggactatgccttgaattgtcagttttgtgtgatcaggtttcactcagacccttgactggcactgggctgccgttcgcatcccctctgtttggagcatataagtcaaactccaggcctttcatgagtatctagagatcgcccaaacctcatagactgtgactagcagtcgaactcatataggtgtgttcgttctgagatgttctgcaggtcaacatctctgcttggaaaagccactcgaatcacattaaggcatgagccatcctaccatgcaggaaagaagagaagtacatcatgaaaataagcccttttcaagggtctcttctctcagtcacacaatagtttgtttcgccatccaaattcacgggatctctgatcacaatggacaggtttccactattgtgcaaccttaggtgggtatcaagcccatttccctcaatgcattgtctatcacattacgtggtagccccttggtaaactgatctgccagatttctagccgtttggacatagtccaaagctatcactccggagtttttctgcttcctaacagatttcagtcttctcttgatatgcctagatgacttcatgttgtcctttgaactgttcactttaataatcactgtttgattatcacagttcattaggatagatggcacaggttattcaaccaccggcaaatccatcaggagttcacgaagccactcggcctcaactgtcgcagtatctagtgctgtaagttctgcttccattgttgacctcgttaagatggtctgcttgcaagacttccaggaaacagcgccacctccaagggtaaacacatatccacttgtggcttttatctcatcagcatcagatatccagtttgagtcactatacccttctagtacttttggataaccggtatagtgaattccatagctcatagtgccctttagatagcgcattactctttccagagcctgccaatgatcatctcccggatttgagacaaaccggctcagcttgcttacagcaaatgagatgtcaggccttgttgcactagccaagtatatcaatgaaccaatgatttgagagtatctcagttgatcccttgctattcttcggtttttccttaatagcacactgggatcataaggagtaggagctggcttgcagtcactatatccaaagcgactcaaaaccttgtccacatagtgggattgcacaagtgtaatcccaccctcatctcctctttgtagtttgatgttaagaataacatcagcctctcccaaatcctttatttcaaaactcttggacagatagtccttgacctcctcaatcacattgaggctggtctcaaagatcaatatgtcatcgacatataagcacaagatcactccttctcccccaccatagcgatagtacacacatttgtcagcttcattcacgacaaagcctgtagatgtaagcgtggtgtcaaacttctcatgccattgcttaggtgcttacttgaggccatataaggatttcaacagtttacacaccattccctcctgaccttctagtatctacccgtctggttgatccatatagatctcctcctctagctctccgtttaggaaagctgtcttaacgtccatctgatggacgagaagaccatgagaggctgccagagcaagtagtactcgaatcgtggtcaagcgagcaactggtgagtatgtgtcaaaaaaagtcctcgccttccttttgggtataacccttggccacaagccttgccttgtacttttcaattgtaccatcaggcctaagctttttcttgaaaacccatttgcatcctacgggcttgcacccatatggatgctcaacgacttcccaagtaccattagacataatcgagtccatctcactatgtactgcttccttccagtagtctcgaacacataactgatcaatgctccacggaacaggcaatccgaagcctcgaacttagcctcttcctcaggagaaagaggtggttcacttcgtttgccccatgaaatatagaagcattgcaacgctgtcaaccataatagtgcacgtgctttccatctcttatagttagaaccatcaaaagcatatggtttcagtgcagcagcaaagccaactaccgaaaatgacctatcaggttttttggattgttggaaatatggtcataaatcggcatattttaatccaaaatgttgagacaataatcatggcataaacagtgtagggtgatctagtaacaatatgtaacataaccagtagcatactaaaagcatcattcgcatcatgaacatagcagcaacacagtagcatgctaaaggcatcatgaatatcagtaacaggaacatagcagtaaagcgctaacaacaggaacaggagaaggatatacccgagaatggccctccgctagattgtgaggcagaattgcctccgttggtgttgttgttcacggcaccggctcctggcgcaccacctccggctccagctccaggcgcgccatctcctccagcagcagcggcgccggcggcagctccggctccaggcgcagacatggtgggcgagcagtcgtgcgggaagcactccctaaaaacctgatcacccgcctacccggtgcagatctcaggccaaggtgtggttccggaggccctgctccttccgatctctcgtgcgcgcaagcgatcagaagcgaggaggcgagagcagcacaggcgcagaggaggaggaactaacacccgggaaagaagcaagtgattcattctgatcggactcgcggcctccttatctatcaggagagaggcagtcggcagtcgtgggaacgtgggatcatggacgcgccgttacggaggcagtcgtgggaacgtgggttcgtggttgcaaaagagtagcgacgtgacgccagtcagccatgccctcgccctcgcccacgccctcggcccggcgcgcgcgcgcgtgtggctttccgacccccacctcaaccagtcaatagggagcctccaataactccctatttaggttgagatattcctcgcttaaatcctgaggtggtattattatccttaacacttattatgggcctttgagatttaatagaataaattgggcctagcccaattctaacaataggcttatcacgagcttggctggagctcgagcctgagcagatgagcttgctcgagctcggctcattgacaaccctacattagtgactaatccatcataatgaacgagagaggggagaggtcagtcacggtgacttaactactctgttgttccattgtttggcctcatcattgatgggattgtaacctgggctttttgtcaatgttctttatcagtcttatggatcacgtaccacataaggcatacatttggtaatttctacatatagggccggctgtgttcgttagtatggcttcccaacccacacagcacaagtggaaagtccattagcacataattaattaagtatttgctaattttttcttcaaaaatggatcgatatgattttttttaagcaactttcgtatggaaacttcttgcaaaaaacgcaccgtttagcagtttgaaaagcttgcgcgtggaaaatgagagcagggagttggtaaccaagagttgcgaacagagccgggctgagttttatctctactttcccaactcatctacctcgtttttcacgcacatgtttttcaaactgctaaatggtgtgtttttttttaaaaattttctatatgaaagttacttgaaaaaaaatcatattaatctatttattttaatttcttttagctaatacttaattaatcatgcactaaacgctgcattgttttgtgtgctagagagtaaggcaagtttccggagtccaatccaacaattatgataacttatatgcccgtagtctacttgaaatccttgagttgtacatggaaaagggtttgcctatctgtataaatacaaagcctccgaggagggaagggcatcgaatcataagccatagccacaagtcacattgaatactagctaggagaacatccaaagctagccacagactccaagtcactacataggttagttcttgacaaaagctagttggtaggctagattaactagcttgctcccctcttggtaattggtgtgacagatctcgttgctatacatataaagggttatggctattacccacctcgggagtccgaaccaatgtaaaaactactctagtcacgtgtataccctggtatcaatgtcccctttagctataaaatactattgtcgggtccaacccttcgacacttttcatttcttgaggaaatatgatctaattgatcagatggctgaaaaaataatgttgatattaactatataaaaagagggattgcttctagacgttcagtgtttttcttttattagaggaaagatcattatatttgtcggtgatatgggcctaggggttccaagctcaggagagaaaggctctccccgtgggacacgtgtcataaattccctgaagggatcatgtccttgcgtggggagcggccgttttcccccctcggcctcgggcctcccccggtcccgaggggacgagccaccccgaggccctcgctcgggcgccgcatggccaccagacgagggcaattgggtgggcgtgaacgccgcccacctaatcacatctatggttagtagggcagccgccccccattgtatttaatgcgatagagcggggcgtgggacgtgcgcctgtgaccggtctgtgaccggttgatggatggatggaacagcggcaggcgcacccacgcccgagctcgtgtcaggcggcgtgagggcaggtatgccctgttccatcatgaatgatgggacaccctgtatccctcatctagttagcagctggcttgaccgaatggaatgtg

SEQ ID NO: 10286 - DNA, 28343 bp, Oryza sativa
  unsure (1)..(28343): unsure at all n locations
gttccatcatgaatgatgggacaccctgtatccctcatctagttagcagctggcttgaccgaatggaatgtgtctaggtcgccggcccggtgcatgcatgcccacgaagttgcctttcattcaatgccgaatgacgggagatgtccccggtgtcagctagagagacttgatgggaaccacacggcagctggcgtgcgggtcgcttccggaccagggcacaagacgcgtattaaatgtagacaatatttgctctctcccctagggaggtctaacggcatgtgtggtatccccttggaccataaaaggaggaccatacctagcaggagaggggttggatggctagatccatgagccaaagcttgtctaaccctagcttgtacaccagggattcaggggctttctaagctcaggaaaatcatcatgcacacaggagtagggtattacgcttcatagcggtccgaacctgtataatcatctttgtctcactttcgcaagtagccaagctcctctagagttaaccgcttccccggccgaactcacaaaggggggcctcacaatcccccgctggagggaatcactcttcgacaatattgataatgaccaagccttgtcgagaaagccgaaacaaagtttgaaagaaagggaaaacaaacacacacacttgacaatatcataatgtttgcacctctagattactagcacgccaatttttggcattcactaacaacaatgtggcacaaatttcactaacctgatagttttcttacctatatatagttgactaaacaaccagcaagatcatttctataacatcgatgccatcatattaatcttagtgatccagccacaatatgtttgagtgtaggggcaaaaagggatcacatatgaccattgttggaaaggaagaaaatataatgcttgtgtcatatgactatgttgtagaagacttctctgagagtgtttaccccttcctctggaggtaaatcgagctggtataccttgttttttttagcacaccctctactttgacttttgagtagccctatggtatcggattgcaatgtatgcatccccttctattacgggatgtgccatgccacatgccaccttcaagtgatggtttgtaggggcacatgccacatgtacagagttcgtatagtgatgtcatccacgacataatacaccatgtctgattcttgagtgatgtgtctaagtgtccggtcttcctataggtttgatttggcaacgtgatactttcacagtttgaggtttctgatcagagatcatcaccttgcaactgctacacccacacatctagttgttataaaccatgctcgtggtcgacctcaccatgaaggttttatccatgcaagtaatcgaagaaattcacaagaacaagaaagaacatgatccgaattgtaggtgaatgattagcactcaaagttggggtttcacaaatcggacttgttaacggagaaaccgtggcatatggcgatagactaatataagcaaaacccaactctaaacaatgatggctactgaatatatataagttgggatgttctagggttaacctaagggcgaacaccccttaggcctagcccacgatacaattacaaggcctaaggcccacaacagactcggatttgatgagatacatagctggtttggattattccaaacaactcataaggaattttgacatgagatcaaaaacatatgaaggtatactccaaaagctaacaaacacgcactcatgggatccgagagtccttctaggttagttctaggcctatttgaagttgatgcttttacgaggcccgaacatgaatctaaatcatttagaattttatctcttcgtttttttgacccaaaagtgacgtggtcgcatggaagtagactgaaggactttatatggttcccaatcaacttgatcatctgttgtctccttatgcttgcttgtctttgccttatccacgcaaagcaaacctttgttaaaatataaaacaagtaaatcttatatagaaatgttgcacctttgctttattgatgtgtaatatatgcatggttgtatccaagccaataatgtcctcatcattaagggacatcaattgacacaaagctgcttcgcctcctgcatgatgcatttatatgtggtgatttattagttgaattggtacagatgacttggcgggattattggtgccagcaatttcttaattcaggtgggtagaaacacctcatatgtgctggtcttaagtgaaccggcacatatgaggatttacctatggggtgttctgtagtattggatctgacaagtctatcaaattctttggtagaatgtttagtggatgatccgaatttatatactccatacaacatccgctgatgaatccaatagcccaacccatcagctaacctagactcgttgttaatatgttctcacatcacgtatcagtcgcatgtctgcctccacattccgattcaagcacatagtgggtgatgcatcgatgcttgttgcttcacatggtgtcggctcaccatatgccattgccccttcttttgttcaacatatatgccaccatatgttcaacatctataggccgtcacgacttgatgtgaggatgttgtattgttagctttgctaacttttgcattgttgagttgatgttatattgagtgcatatacaaataacatccaacaattttaataatgtttcgagcagagtcgactctgcaccatttttacatatgtaaacaattcactcaacatctgcacactatcaacactcgctcccacttgcatacttcatagaaaaagcgatggaaaaagtgtaagtgaggtgttgtgtaaacttgggctatttccagagaagtgtacatacattttctacaacattgatgacatcgtataaatataagtgttcctaccacaacatgtacaagtgaaccattttatacaaagcgagggaaaaaatgtaagtaggtgcatacgttggcttgttctatagaagagttgtgctaatgcggattttggaattgtgggtgttgcactatttatgttaaccttctctgaccatattcactagatcctgtatctcctgcagtcttatttcctctgtatttaagtaggataacatagttattcttttccaaaattatttataaccttgcaaatccttgtgcctactgaatatgtaccttgtgtattaaatgtatttaagtaggataacatagttattcttggactagtagcgatacttttgtttatacaaaaaaggaagtttctcacttagttagttgaatatttcctatggttttattggagatgctacaaattttttatcataatttgttaaatttcttaatattcatttgtttgggatgatgtgttgatttaactgtttatatgcttttctttgatgagaaagaatcaataaaaaatgcatctatatactatataaaatatgtatggaccttgttctttttaagtcctttataaaaacaatgttgatttattttactaaaggctctggacaaaatttcttcatgacaggtgtatgatggttgtcaaagctgggaaacatcttttattgttcaagcttattgttcaacagaccttgttaatgagtttagtcaaacactcataaaagcacatgagttcataaaaatgtcacaggttatgtgttcttctctacttttgattcttgtacaatgcaaaatgaaacaatattttcaaagttgattttgatgtccttttttttcaattttaggtccttgaaaacactccagacaatgaagcttattaccgccatagatcaaaaggttcgtggacactatcaacagcagataatggatggtgtgtatctgattgtactgctgaagcacttaaggtaaatgtatattagttgttacattatttttctttagaaatttgagaaactttatttcctaatgaaaaatagaatatataatggaagtaaaactctttgattttttggtaaaaaaatatagttgtgccattctaattgcttcggggaaatattgattttgttatcttatgcctctagaagtgttgtacagatcaaaacaccaccctacgttcaaatagttaggtggctttgttttgtgttaattggatgactgagcggtctaaacgagccagttactaagaccaggccttcatagatgggcgagataggttagcaaaacatatagatcactggtttacaaacaagcccttctagattaacccttttacacaaagaaaattttgtgcatttatgggcttgccgcattgatgggttgccttgcgcattaagcataagttagaagttgcggaattacatcctacttgatgtaaaggtccaattctgcataataattggaggcgatagaattgttgctactgcaatgtcaagtgaatatgttttaactatcatagatgagtttaaagaaaagggaacatctactacctccatccaaaaatatagcaacttctagctatgaatctaggaacacagttgtccagactcatagctagaaatgcttttattttggaacagagggagtaggtgttacagtaatatctctgaaactatcaaaataccaataaatgtgaattaaagaaagagatacatataggcaaaactcatatgcatagtaaaatgttcatggtgttgaatatcgatgccttcaaatttatatattgaatatgttatcacattgtagcaaaaaagtctattggtgtacttgcacaactgcaatgatgatacattatatttgttgaattgctaaactgtacaaacttttacagttcatcatttgttgattccaatatatgtacatgttacattttttttcctgctaatgcttgcttttttattctttaggccttacttatgctatcaaagatctctccagatctcgcaggagatgccataaatggagaaaggttgtatgatgcagtggatggcatgctctctttcatggtataacttgtacttgaattgttcgccatgttcatatatctagttttctgaatttatcctcccatctttgtcattgtttcccaaattcggacgaataagggaataatttgagcaaagaatactttagggacaatcttgtgtgggccattttatatcatatatggacatttagatattttagtactagcatataagctcacctattccgacaacaactctaagactaaacatttcacaacacattaagtgtaagcgacgggctatgtgtatgtgggcctacagctacggaaagggttgagttgatgcagattttgaagcaatgtttttctcatgtgttattagtgtaaattttattacatggatgattgtggttatggaccttttgaccatgggtttgtggtgcggtctgggacaagaacatccacccttaattaatagagtaggtgaatgcaatacacttgctcattagtggaggtatttgtgcttcaccggcatataaacccatgtgttgtcaccacaccacatgcaagtatacacatatgtgagctagaacctaccaatttttttgggttattgcaaattttggaagctgggaagttaggaaagtcattcaaaatatgttcaaaatattgatgtgtaactttgaccctatggttgttagggcccagtctatacaatacatgagtcatattttcttgtacttgctttgctgaaacattcctttatgcggggccaatattactgggacaagtgtaaaaaaaattgctcatatcttccttcatgcatttcgtaaaacatgagaaaatatatcctatgccattgactatgtcatgttctattttataccatcaaattttccatatattatatgctatccccataagtgacaacgaaaaaagttgttattaatgcatcagaaaagaccatatcgcccttcgtttgcagtgttaatcctcgcaaatcaaatttcatcttaagaaatagttccaggagcgatggtggtacactagtttcattaatccataagaaaagacttggtatcattgagttcaactgtcctcatagtatcattctttccccatgtaaaatgatacttttatatttttgccacgatttttccaacactcactcaggtttaattaatcaggtctttcctctgggctaaatcaacccctttagtggacgctaaacggggatggtataaaatagaagttaagggaaaacttgatgctatgatgtagaaccgtaacaaagtcgatggtgtatgatagatttctctatcaacattattagggaaaaattggtgttgtttgcagcagcaacatgaatatgatgttgcttacttctgcatatcggtcatatattgttgtaacttgtcaagtaattttagcccgggtaactaaggttaataataatcttagctacaaaagtgtttctcaactttctcatctcgaatttatgatctttgagcaaagtttaagtggcaaacaggagtaccacaatcactcatgcaaatatttgttaggtttaaattattatgcattttggtttctttgctaatgattttctaaattttgtacatttctgtcctctactaaaacagtgcaattcaagtggataacatttcatgccattgttttgatccctattttgtttcattgaagaataaagatggcaccttttcaacatatgagtgcgagagaactacacattggttagaggtaagtactatatagtcctacttcggttttaggtaattaaagtgataaaccaagtgcatccatcatatttaaatcacgtaaaaatgctcatataagactaagaagaatgaaaacccataagcaaacataaaacttcagctccatattacaaatgaaattataaaaaaatgatagggtttagaggtacttcttttcatccattcaaatttatttttgaggtaaaatggtctaattacaacataatagtacttcctagaccatttatgaaaacaataacttagtttcactcactacaataatagcttagaagcaataaatgggtctagttgttgcaaatggtatactccataaaaaagcattaactctgtggatgcaaactcttcttttgtaagggcaaaatatattttcattataaggatttacattctattgctttgccacacatccacctcatctaaattactacctccatttcatattataagtcgctttgacctttttcctaggcaaactttgttaggtttgaccaaggttattatcaaaatatatccaatattaaatttaatgatacgtatttggtgtcacaaatgttgctaaaattttctataaacctggtcaaacccaaagcagttagactaggaaaaaggttacaacgacttaagtgttatatctattgagaattgtccaaatgttatatacttgttttactgatgttatacttaagtgtacactagtctattttttaagagagaaatgtaagaatgctcttgattttcttttcataggttctcaacccgtctaaaacttttctgaacattattgttgattatccgtaagtgtgctctcttgtttgaagaaaataccattggtttcacctcacaacatgtgtagagagctaactcaactgccttgaatgaattaatagatctgttgaatgcacatcatcggtacttcaagctctaatcatgtttagtgagtgctatccagtgtaccgcaaagaagagattggaaaatgtattaaaaatgcttccaagtttattgagaacaaacaaaggaaggatggatcatggtttgttgttcttatttgttgctacatattattatttttttatgtttacaatcaaccgtttgattactttttaactatgtcacaggtttggtacttggggtatatgtttcacttatggaacattctttgccataaaaggattagttgctgctggaagaacatatgaaaatagctcttccattaaaaaagcatgcaactttattttgtcaaaacaacttagtacaggtggatggggagagacatacctttcaagtgaaaccgaggtaattcttaccattcattttcacataattgacatagttacctcaaaagttgtgaccaaatatatttttgcaacacatatataatgtttagttccgcatttttccttacatttaacaaatatatccatcgaatctaaaacaactaagaaaatgaagcagacctatataaatttcatttagttaagtgctaggtctggcaacataaaaatatctaacaccccactcatcagcctgcatgcatatgtaattgtagcaaacaaatgtaacaagggtgtcacgcccggaatttctatccaaaattccaaacgcttacatgtgtgtgaaccctcgtccaggaatcagccgaggcacacaataacaaattgataatagagtacaaatattactctaatcaataggcgaataaaatgtcattacagaggtagatagttcctctcaatcaataaagatctaagcagcggaaaataagataaacggcgcagacggctccacttcacaggcagcttgaccaaggctacacctaatcctccacaccttcggcaacattgtagaactcttcctctgatgaatgattgcaaggtgagtatatgacatactcagcaagccacgcagcaaatatgcaagtgcacaggataacaaaggatggcatagtagggtttcatttgcaaaagcagcatttagcaaacatttgagaatttagtaaaacagttaagtaattaaacaatattaatccaacgctatacaacataccctgttgtataggcccaaccattttgaacaaccatcccggctgtacagttctatctccaaaccaggaatataccattccaaaccaggagctaatcaaattattaccaattatagcatcatttactatggtgagaagtgtgaaactaatcacgaaagacattgttagacccgcccataaccgcgggcacggctattcgaatagttttactctgatcagaggtgtaccactgtacccacaagacacaaccccacatcatgtcaccatgtgcctcaataccaccacggtacctcggaaaggagttgtgacaataccccttgcataacacaatccaccgcagcgcaccttcctggatcataatcacccccttatagacaaggcatggactccccagcgacccccgtgggcttatctccgccacttctcagtctggtgccccgcaatgaaccatgctatacaaaagataaagccgttgcccacgctggcttgtggttggcacggttaatgtttcacaaccgaaactcgtgaaccggtccttaattgtcatgagcacgaccatcaaaaccatgtgctcacaacccaccattaccaggttttagttggcacattaattaattaaccaatcacgattgaccatcatgaactatcatttagcagggctaagcaattatacctaatatctagctgaaccaatatatataaagctcaactagtcaagttttaataacccaaggtatcaaggaataaagtaatcaagaacaaaagggctataacaaagaataggttaattccacccaatgacattcgaaaaaataaatgcaatagttgaaaagaaacaatagctttaaataggatcaacatgctcaaagggttgtttgggatctgtgtgacttgccttgctggccttggaactcttcaaactcttctccggcgaaaacggactctccggaaacgacggaatctaagcagaaaagagcaaaaacaccaaaacagcacataaacaagcatgaacagtacatgtggatatttttaacatgtagatctcaattttagaaaaatttagagacttgaaccaactaaaacggagctaagatgaattagttatgaatttttgaagattaaatcggattaaaacacttatattgattttaattgaattatgacgcaataatgaattatttttgaaaaggaaaaagggaattattgcgtcagcggctagggtttcgcggtggaccgggcgcacggcggcggttcacgcgaacggacggccgaaatcgatccatccaaaacggacggccgagatcgatcgggtccacggcggctcacgacgaacgaccacgatgacgtcggcgatgacgtcacctaccggcggcggtggctcggcggttcgtacgcgcaagcccgccggtgaacggcggcgcttcggcacgaacggaggacaccaacgggtagcggacggcacggcgaactcaccggcgaccaaagcgacggcggaagatcaacggacggcgacggcgacgaagaaagaacggcggcggtcttcgggtcgatggcggcgacggtgctccggcggtctccggcggcggcgaaggggtggacgaggacggcgacaacttggcgatcacgacggtggccttcccgagggacgacgacgaccgagacggcggcggcgcacggctggagcgacggcggcgacggcggagctagggcacacggcgctagggcgtttccgacgacgagaggcgaaggcgagggtggcggcgggtagaggagacaccggggatccttttaaaggggctaggaggcaacggcgaaggcccacggcggccggcgacgagaaggaaagttcgggaaaaacgaatccgaaacaaactcgaatccacgaatttccaaacgattttagccggtgtttccaaaggagaaaaggtagaggagatcccgaagatcatttcccctctattgattcggccggagaaggaaaggatcggccgaattggaaagcggcggcggcggcacggcgctagggtttcggccggaggaagacgatgatcccgacaggtgggacccacctgtcagcgacagcgcgctcgcgcgggcggctgcggctgcggactgggccggctgggccgaggagagagagaggggttttgggccgactttcggcccaaagccaaaagagactttttaaaacctttttcaatttaaattatttcttaaatgcaattccatttattaaaaatacttcctcaactcaaataaatcccagaaaaatctaggaattatagaattaagcaaagtatttaatgaaattttatctggccccattttatattggaatttattaattaaaattagatcttctcttctaggcttttacaataaattctaaaaattcgatttaaacaacaatttatatattttgaattttcagggtgtgacaaagggccaaatggtcacattgattgagcaatataattgtctttgttctgtgccctggccatagctgttaactagttaaagtacaaaacctatgtatgtttgcaggtcttgagaaatgcacttgatttttttcgtcaatccctgtcacgcccgaaaattacctttcccgaatgctagtgtattaatccttgtcccagaaaaagccggggtataccgcaagaaacatgatagaaaagacacatctttaataattatcatgatagtatttacactattttaaacgcacattaagcctaacaacgaaagataaacaacagcggacaagcgggcctacgactccatattcacagacgctcaactagggtttgatcctatactccacctaacacttcttctgcaaagcttctttaactggagtgggaaagattaaacaagaaagagtacaactactatactcagcaagccacaccggaatatgcacataatacaagggggtactaggagtaatctattaggggttaagttttttgtaaaaccatctttcaaatagttaaagtataatgcacatttcaaagcacgatactaatctagtcaaaatattaatcaagccgcacacctgtaggaacttgccttaacccagcccatcaggtcatagttccaagcaatccagtttaacagagtaaaatatctaacctggatatattgctaagcttgctagtaatgggcacacggagagagggcagagaggataaggatgacggaagagaggagatcggcttggcgtataggtggctcggtgtttttttccacatatgtgttggtttaattaaaaaccgagacgaatggtaattttataggattcaacatgcttagattatgatatgactttccatgctcaacgatacggattgccaagacttctatgacggatttgaactgcacaacagaaacatttgaaactactgcacctacatgaacaagaaaacaagctacaactgaatataaagacaacatttaagttataacataaattgagcaacttaaacgggccaatttggagctcgtatggctgagaaactacaatccaaaattatatgcaattcaagtgaatatttctgaactacttaattatgattataccattaaattatgtccaatgcatcagcgctcgaggaaaggaaggatcaagcgaccagtagccaagtcccatgggtcaaatggctagttcatcatacacataaatattcactgagacggtccactaaaaaagcagagtgagacccatgtgtaagcctcagagaagagaccaacaagtggatcccatgggacaccaaacaagaggccacatgcacaaacacgcggctatgcgcaggagggatgcactgaccggtgccggtggcccatgacagaggtcaacgatgcacagaagcatggcaaaaggcgagggcaatgggagggagatattggaaaatagatcctcgccacgaaaatgaagatgaccgaatagtgaggaggggactggcggtgtggtcttgaaggcgatgaactcggggcagcgacgatgcttcagcttgacagcgatgatgtagcttcggtgatcttctcgcttgctaaagaggcagacagtggagggcttggcattgcagacttcatgacgacaatgacagacgaggacgtcaacagttggcgcttcgacaaagcgggagagatggtcatggaagcttcgagttgacgactcacgtcgctcctatgggcttcgggtcatgaggaggtcaggctgggaactagctcgacaaggagaaccgaacgcaacgacggtgtagcgagatgatgcatatagttgtagagttcattgacgagtacaacccagcataatcgaaatcgtttgtgtgcttcagaagagagtcggggaggtccaaagtgcaacaagggtgagattaccctgtcaaaagtgaaaacatcggttaaagggtggtacaaaatgaaacatcagtaataaaatgtggcccaaagtaaaatttactctaaatttccatatgtgctagttggtcctaaataatcggtgaatcaataatcaaccaaacctgatctaaacaaaaagtaacataatgcacacaatgccttgaaattgatgtattggtcattctctctcagtcatgcattcacagccatggatgtcctagtcaacacgactttgtatttgcatgcagacacacacaagtcacacaacataggtactagcatatgaacataagtcttgataatgttagattacattcttttattgaacaagtttatgttggggctagtagatctcatgttgtgaacactgcttgggcaatgttagctttaatatatgctggttaggtgtgttttgttcattattcattttagtaggtactaattgtctattatattatttattgtactacaatgttatttcataatgcctcaatgaaaatcaggttgaaagagatccatcgccactatatcatgcagcaaaagaattgattaatatgcaactagaaacgggcgagtttccacaacaagtgagtattcaattgattaaatgattttctattttctttagcacaaacatgttcagtatatggattttctatttcttgtaacacaaacatacatagtcaataatgaattaatatactaactgcacataaatattatttttggattgctcatcacttcattttatttggattgttgttttggtatccacaagaatgaaatgggaaaaaatagaatcatcaagttatgtagtttgtggcctggcatttatggcatgcatgaatactctaccatccactcttgatagataatagtagtctaatattccaactttaattacaggaacacgttggatgcttcaacagctccatttatttcaattacagcaattatcgcaatttattccccatttgggctcttggggagtttcgtcgtcgattggttctacgaaagaactgagcctcataaaatgacataattatttgatgccgaacaaaagtttgaactatttaaatatgcaaatgttttaagtgtaaaaatatcatatacaaaaaataaattgctatctgatgtagcaaaactactgtggagattatggataccccatacccacacggcatgtatatccgactaggtataagggtaccatatttacatagaatatctttaaaggacttgggataaattcgtaacttgtgtatcaaggaaatatccgagatcctagtcggttacaattgtattttatctttacttgcctattccgttaggaatatgggttgtatcttgtaatacggacacctccccatatataaggaggggtccgagtgcctcttggggtataacttttcctctagatcatacgatcaataacacactcggcggatcaatccccggacaggagtaggatattacttatcattgagagggcctgaacctctctgatcccaagattaccaccagccaagcctctctgcacggcacaagccaagccttagcgttgctgcctcgggatccaatcgcaggagcagggatcatgcaaaatgctctgttcactcgccagctaatgaacatagagatcgccgcgctgagcagcctcactctccgcgtcgccggcaacccatcgatcttcgtgatacactcaatcaacgccatgcagaaagaggccaccaaccacactgttcaccaaatcgacatcacgacgacgaagttggcgttgtagcttttacaagcgacctgcgtcgagtggattggctggctagcttcaagccgactggtatcgagaagtatgacggcaaaaccaatcccgagtcatggcttgtcatgcccagaaattcactcgtaatttctgaacttatcacgcccagaaatttactagtaattactaaacttttttgtgcgtaaaatcctcgtccaggaatcagccgaggtacacaaactgacaatttaatatacatattcatcaaaataactaaagcatctaatacttactgaagaggtacttagtcctcacaacgaagaaaactgtagcggaaaaataaaatctagcaaagctccggctccactcccacaggcaactcaactggggtataagccaaacgtcttctccttctggatcatttttcttcaactgaggttgcttgattattgcaaggtgagcatatgacatactcaacaagccacactgcaaatatgcaagtgtacaggataacaaaggatggcataatatagnnnnnnnnnnnnnnnnnnnnnnnnnnnnnnatttaagaacaataaaaaagtagaataatcatcaattctaatcaacactgaacagcacacccatactgctcaggcccaaccatcctgaacaaccatacccggctgtacagatctaactccaaaccaggagctaattattgtgagaggtgtgagactaatcacgaaaaacattgctcaacctgcctatgaccgtgggcacggctattcaaatagttttactctggccagaggtgtaccactgtacccacaagacacagccccaaaacatgtcaccatgctctcagtaccaccacggtacctcgaaacgggattgtgacagtacccctcgtacaacacaactcaccacagtgcgccattcctggatcataatcaccccctcaataaccagaggcatggactccccaacgacccccatggacttctcgccgcttctcagtctggcaccctgtaatgaaccatactatacgaaaggtaaagccattgcccacgctagcttgtggttggcacggttaatgtttctcaacagtaacattgcagtcatgagcacgtccatcaaaaccatgtgctcacaacccaccattaatcaaattttaattatcaattgattatcataacacgattaaccatcgtgagctaccattaaatataatcataagtaataatatagtatgattcatcttattaatgagctaatgtttctaagcatggctaagcaattatatatatatatatatatatatatatatatatatatatatatatatatatatatatatatatatatatatatatatatgatttagctgaaccaaaccaatatataaggttcaagctaatcaatttattacccgaggtatcaaggaatagggcattcaatgcaaattgaccataacaaaggaataggttcacaccacccggtgacattcgaaaataaatacacagttgaaataaatagagaatttgaatataggatcaacatgctcaaaggattgtgtttgggatctccttgcaataatcggtcttcaattagtcttctgaacaacttccgacgcactcacgatccttcgcaatgacagaaacgacaagctaacacgccaaaccgagaaaaagactaataaaaacaaaatatacagcacataaaaataaacaaacatggagatcatgattttagatgaattagagacttgaatggcctcatgtgaattagttatgaattttacaagattaaactgattttagccttatacagaaaaggattcacgatttattttagaaaagaaaagggctttatgacatcattgatgacgtcatcaccggcgggaggctcgggttccaacgtttgccggcaacctagggcacgacgtcgcgaaccgaaggcaccggaagaaagagcacgacgaggagaactcactgaggggcggcacgacgacgaccgacgacgggagacagccggcgacgaactccgaagggcggtgaggtactggtcgacgatgacagcggcgttccggcaatctttagcggaggaaaaccagtggacgggcttcaccttggctctgcgatgccgaagaaagcgacgacgacgtccagaaaccacggagtcgacggcgaggctcggccggaggtggagtagatcggattcacgccgtcgaggggcttccagcgggttacggcgaaaaggaactagtggccgggcttcttctcctccttgcgaacccggtggtgatgacggcgaccggaggcgacggctacaccggatgctagggacggctggagcggctgccggcggcggagagagaaggcggctgcggggagagacggctagggaacgggagctcgagctaggggttggaaacgaaagaggaggtcttgggggttctatttatagccaaagctggaggagatcggctcggacccgagaggatttggcggcggattggttaaggttcgccggttcggggataaggtttatccgaccgatttgaactcgaatcaaagggataaaatccgattccttagaagaaacggaagagaagaaaaagggaaacaaatcccctcaactaattctggaaaagatcgaaaggggaggccggatttggagggaaaagcggcggctgcacaggcacaggacggctgggtcgggctctgtctggagctggaagatgatactgtagcgcgggggaagcaaaacagattttttgctgggctaaaaacaaaagaagggagggataagaaatagacttccccggaagacaaagagacaggaagcaggcaaagaggaagaataggccgaggataaataaatagacttttccagtttcagcccaaaaaggaaaagggaatttaatttactttttcaaataaattaaccaccgaaatgatctttgaattgttaaaaatacttccatttcccgaataatttcaagaaaaatcatgaaaccaattggacactcaaaatacttaacaagattataatcagaccatttaatgactaatttaatatgtgaataattactgaaatgttctttgtatgattaaaattaagaattgagctccgaaaaatccgagaaaatttcagagagtataattaatcatggagaatttaataaaacataaatcctatatttagaaaattttatttcccacatttagcttcacttgtaaattaatgaacattcaatataaattctaataataatttattaaataatttataaatccttagacgaaaatcaggatgtgacacggcttaccgtctacggcctcgcaatccgcgcagcaggaggagacagtaaagctatggcaaattatttgccggcggcccttgctaactctgcccgatcctggctccatgggttaaccagtggtacaattggatcttgggcagagctccgtgagcacttcatcgccaattttcaaggcactttcgaacgtccgggcacctacttcaacctctacaatgcgatccagaagctcggtgaatcccttcgggactacatccggtttttttctgagcaacacaacaagatttcaaacatcaccgatgacgtcatcatagctacattcaccaagggtgtttgtcataagctcttggttggcaaatttggacgcaaacctcccaggacagttaagcaaatgtttgaaaaagccaacgagtatgccaagtctgatgatgccgtcaacgcctctaagcagtcgagcatcaattggaagtccaagaaagatacgccagccgtcagggggaatggaagtaacaacaataaggatctcaagcgtaagcttgaagaccttgtggcacttgcatcaccatcttcccgacagcgttcgcgtatcaacacttttgacaaggtcatgaacgcccaatgttcacatcatccaaattccaaccatgcagccaaagattgtttcatctacaagtagtttgtggagcaatacaccaagcaagcaaagaagccgacagatcgggagcaaagaacctcaaagaagaaggatgacgaagacgatggtccgactggttttcaagattctcgcaaagagctcaatcctatcttcggtgggccgcaagcttacgagtccaagcggaaacaaaagctgactgatagggagatcaacgtcgtccagcccgacacgccacaataccttcgctgatcagaaacaacaatcaagtttgaccgctcggatcatcctgaccgagtggtccacctggggcggtatcccctggtactagacctggtggttcgcaatgtcaagctccgacgatcactaatcgacggtggcagtgcactcaatatcctttttgacaaaactctggacgatatgtagatcccgcgcactaagctgaagccgagtagcgctcccttccatggaatcatcccagggctgtcttctactccactcggccagatcaccttgcctatcaccttcggcactcgggagaactttcgcacagagaatatttgctttgaggttgctgactttgaaacggcataccatgccatactcggacgcccggcgttagccaaattcatggcagtcccacattacacctacatgatgatgaagatgccacgacctcgaggagtcatatctttgcggagcgacatcaagcaagccgtcacctacgataaggaaagctgtgagatggcccagacccgtgagattgcacttgctcggaatgagatccgactggctgcatcaaccgcaaccgaaggagaagtgcttgtgaccaagtcaccgaagactggagaaggcgataccaagaccaagaaaattcccctagatccatctgatccatccaaaactgttgtaataggtgctgagttagattgtaaataggaaagcacgctcatcacctttcttcaagctaataaagatatttttgcatggaaaccatcggatatgcctggtattcctagagagatgattgagcactccttaaatgttaaagaagatgctagacctatcaaacaacgactccgccgtttcgcacaagacaggaaagacgcaatcaaggaagaattaaccaagctgttagcagcaggcttcattatggaagttttacatcccgactggctggcaaacccagttttggtttggaagaagacaggacaatggcgcatgtgtgttgactacatcgacctcaacaaatcgtgtcgtaaggatccctttgggttaccttgcattgaccaggtggttgattcaacagccggctgtaagctactcagctttttggattgctactcgggttatcaccagatcagtttgaaggaattcgactgcttgaagacctcgttcatcacaccatttggagcttactgctattcaccatgcctttcggattaaagaacgctggggcaacctatcaacgcatgattcagagatgtttttcaactcagattggtcgcaatgttgaagcctacgttgatgatgtagctgtcaaaaccatacaaaaagatgacctaatcgctgatctggaagaaacctttgctagcatctgcgcttttaggatgaagttgaatcccgaaaagtgcaccttcggagtatcgtcagggaagccgcttggctttatggtgtctcgtaggggcatacaagccaacccggaaaaaatcaatgacatcctcaacatgaaaccgcctagttcccagaaagatgtccagaagctgtctgggtgtatggcggcgctcgaccggtttatttcaagactcggcgagcgggggatgccatttttcaagctactcaagaagactgacaatttccagtggggacccgaagcccagcaagcttttggtgatttcaaaaaacttctcacaactccactagtcatggcatcaccacatccgcaagagctgctattattatatgtgtcggcaacatcgcaagttgtgagcacggtcttagttgtggaccgagaggaagacagccatgttcaaaaagttcaacagccaatctactttgttagcgaggtcttggccgactccaaaacaggatatcccttggtatagaagttgttatatggtgttttaattaccgtcaggaaattatcccattattttcagagtcacttggtcacggtggtcacatcgtttccactcagagacatacttcataatcgcgaggcaaacgggcgaatcacgaagtgggccctagagttgatgtctttggatttatccttcaagccacgcacttcaatcaagtcccaagccttagcagatttcgttgccgaatggactgagtgtcaagaagatacacttgtggagaagctggagtattggactatgcattttgacgggtcaaagaggctatcaggcactggagctggggttgtgttgatttccccgactggagagagattgagctatgtattatggatacacttttctgcgtcgcacaatgtggcagaatatgaagcacttctccatggactaaggattgttgtttctctagggattcggtgtctggtggttcctggcgattcccagttggtcctcaatcaagttatgaaagagtggtcctgcctagatgataatatggctgcatattgacaagaagtccataaattggaagacaaatttgatggtttagagttaactcatgtgcttcggcacgacaacgaagcggccgacagactagccaattttggttcaaagcgagaagcggctccttcagatgtttttgttgagcacctttatgagccaacagtaccaagaaaggatgtaatcgagaaggtagggacccaagaagtcagcgtgattgataccgattggagagaacccttcatcaaatttttgactaagcaagagcttcctcaagacaaagacaaagccgagcggatttgtcgacgtagcaggctttatgttatgattgagaccgagttatacaagaaaagtccgtcaggaattctgcaacgctgtttctctttagatgaaggaaggcaattgttacaggacatacattctggcatttgtggaaatcacgctgccgcacgaacaatcgttggcaaagcttacagatagggttttttctgccccaccgcagtatccgatgctgagaaggttgtgcgaacatgtgaaggttgtcaattctttgctagacaaattcatctaccagctcaaaagttgaaaactatccctctttcctgtccttttgcggtttgggggctcgatatggttggtcctttcaaaagggctaccggtggtttcactcatctttctgtatcagtggataaattttccaagtggatcgaagctaagccggttgttacaatcactgccgacaatgctcgagattttttcatcaacatagtgcatcggtttggggttcctaatcgtatcattacagataatggcacccaatttactggtggagtgtttaaagacttctgcgaagattttggtatcaagatttgttacacatctatagcacatcctatgagcaatggacaggttgaacacgccaatggtatggtacttcaaggcatcaaagcatgagtttttgactgactgcgtccctatgccagcaaatgggctgatcagctgccataagttctttggtctcttcgcactacacccagtcggcctatgggccaatcaccgtttttcttagtctatggtgcagaagcaatgttgccaagtgaggtggaatttgaatctctgtgatttcgtaatttcaaagaggagcgctacgaagacgaccgagtaaatgatctcaaccgactggaagaagcccgagaagcagcattaattcagtcggctcggtatttacaaggattgcggcgctatcacaatcgcaatgtcagatcacgcacatttttagtcggagatatggttttgaggaagattcaatctacgcgagataggcataagttatctccctcatgggaaggaccatttatcatctcccatctaaatccgaccttttctcttgtgttttcctaaaattagttgaggggaaatatttcctttatcttcctctctcgttttccctaagaatcggaacctaaatccttgtattttatccgaatcaaactcgttttcgagtttatctctccaaactaaccctcggattttccggttaaaatcctctcattttgagttcaatctctctcacccgtgcctatataaagcatcccttagtcgtcctcttccgtttgcctcaagttccaagctctaccgttgcccgtagcgccgtcgctgtcattgtcgtcgttccagccgcgccgggccgtggttgtggtcgccgtcgccgcttagcgtcgtcgccgttgggttcgcgcggaggaggagcacctcggccgcccctttgcagccgctgaagaccatcggagagccgtcgtcgctgtcaagtcaagtcgagccgccgttggagttcgtcgccggccttcgttcgtcgtcgtccgtcgttgtttttcgcaccggtgagttcacgtcgccgtcctcttcgcatgggtgtcctcggaagacccagccgagtcctctagctccggcgacctcatggttcagagccatggccggcgatgtgatgacgtcataaatccttttattagtttttctgtattagataaaatcttattaaacttcggaaattcataactaaatcatcgtaactcggattcaagtggttcaagttgctaaattcatctaaaatcgagatctacatgttaaaaatatccacatgtactgtttatgcttttttttgtactgttttgttgattttgttcatttcctttagtttccgacgttccggaggagagcgtttatgttgaggaaggttcagaagcgtttgaggaagctcaaggcaagtcacacagatcccaaacaaccctttgagcatgttgaacccgtttaaagctaatgttttatttcaacttatgcatttttttcgaatgtcatcgggtggtgagcctttcccaattaattatggccgaagatgactttattttcctatgggttataatttgatttgctagaaccttatatattggtttggttcagctaaatgctacatatgataagctcattaatgggatgaatcatatatactgcgttattatttatggttatatttaatggtagctcacgatggttaatcgtgttatgataattaattgataattaaaacttgattaatggtgggttgtgagcacatggttttgatggtcgtgctcatgacaattaaggaccggttcgcgagctactgttgtgaaacatttaccgtgccaaccacaagccagcgtgggcaacggctttaccttttgtatagcatgattcattatggggtgccagactgaaaagcggcgagaagtccgtgggggtcgctagggagtccatgcctctggttttgagggggagattatgatccaggaacggtgcactgtggtgagttgtgttgtgcgaggagtattgtcacagttcctttccgaggtaccgtggtggtattgaggcgcatggtgacatatcgtggagctgtgtcttgtgggtacagtggtacatctctggccagagtaaaactattcgaatagccgtgcccgcggttatgggtgggttaacaatgtttttcgtgattagtcccacactactcattattggtgataatttgtgataattaaattgactcctggtttggaatggtatattcctggtgtggaggtttgatttgtacaaccggggttggttgttcagatgaggttaggcctatgcaacacgggtgtgttgtatggtgtttatttaatattgcgtaattacttaactgttttactattctcttaaatgtttattaaatgttgtttaagcacataagctatattataccatcctttgttatcctgtgcacttgcatatttgctgtgtggcttgttgagtatgtcatatgctcattcttgcaatattcattcatcagaggaggagtatttcagtgaaggtgatgatctggaggattaggctttgtacgggtcaagttgcttgtggagtggagtcgccatagctgtttagtctttttttgtaaggaagctgtttagtcttttgtttttccgctgcgtagaattttattcttttgagaggaactatccacctctgtaataatttattattttgcgaatattaattagtagtttgatagtactctattatcaatttgttattgtgtgcctcagctgattcctggacgaggatttaacacacatgtaagcgtttggaattttggatagaaattccgggcgtgacattccatgaggtaataaattgttgtacataaatggtataattccaacataaacaactttataatattatttaatggcatgtcaatcaagacatttttctgtattgttaacaaatgttactcacctaagtgcacagtgagcccaaaactcctatcacaaaggtgctggtgaaggatagatgatcacaaaatggtgtcaaacgattccggtcacccaacttcaccaagacaagccaaatcgaggaggtgccctttcctagcccagccaacctagcccaatcctcaatcgactttggccacacgtggggagtattcgagaagcgataccgacttcaaggtgcgattggaaccgtctatgacaccaatcgacctaatgaagggatccaaccagtgccacatgctcagatgacctaacccaggtaggccagaccactaacctaggtcgaccgagaaatcgacttacccccaggctataaattacccctcccctccacattatttgcaaaacaccggtagctaaagatcaagctctagttagcaccatgttgtccaaatagagtagaaatgtaatactccaacccattttaagcctatagttataggtgtggtggtggttcaataccacctaggaagtttaggtgggtaaaggtttgcttataagcatttgtgctccaaccatggtacccctagtcaacctttttacacgaaacgaggacgaaattataagcagggtaccatatgagcgtggcccgctcaatgtgtagagcaaacaactgtagatgttggagatacggtgttacaggaaataggggagtggggagtttggatgagaacgctacggttgtcggacttcgccgactctctaatgcgaagaagttgggaaattttggcctcgtcaacattcggtggttgatctctggtttgtcagtagtcgaattttgatcggtcgatggtcgtcatccaatcaaaatgaccgtcttcatcttcctggttcgacaatgtgaatcttactgttttgcattacttatcaagtcatcttaatgattccatacttatcgattcttgcttcaatttatataaaggtcttactttatttatctttattgctttgctagtatgtgcacttgagcaaagtagtagcatgatacgttagcgtggggcttagctacaagtttatttgggaaggtagtctagatcaacgggggaccataggcgacaagttgtgacaaccctatccatcccttatagttagccaagttagactagatcccttcccaatcaatattccctcatgtctaggcataagtatcccaatggcatttacatccttatgtaacatatacaacactcaattacctctttggttgtgcatccttctaggtgtgcccgattgtgcacatactctttgattgtgcacgattgagcttgtttcggacgtcgaggattgcatgtggtttatggaggaagcttcactttggtcgtgaagattaagtctagtttattttgtttttccgctgcgtatgtgagtttctttttgttatttttgtaagacgtggatctgtctatcaaattgtcgtttatgtactctgactgatcctggacagagatttaatatagattctgcttgaaattcgggttagcgaatttctgggcgtgacaaacagcgtcatacatttttcgatggagggagtatcaatcaatattagtagccatcaggtttccaatcaactcaattgttgtttggtgacgcaaagtccgaaattagaccatactcaaatgcaaagtcaacttcctttaaggtaatttgtctaaattactagtactaaccgtgacatccaataatatatatgaaggaaaaactatggtggctattaattttaactacttataactcaagtaacatccatatcaccgtcggccagaattcttcatttcaaatagagtttgtgctgccaacagcacctcaaggtcaatatccctgatttccaactgtacaccctccataactacctccactccatgatgtggctccggcgcacctccctggacaccagtctccccggccatgacggccgctatctccagctcgacagcgctaaccacgtggctcctcctgtggcaaagcctccgtaaccgcatcatgcgatgaggactcaccctcatgttttttcttcctcttcttgggcgcaagcagtagtagctcctcgttggccttgaaggcggcgtcagcatgtggagcatcacctttgaagtagtgcaccataaccagcccgaggcggccgtcattgtggtcgtctttgccatggctcaacttctgagaacgaaacacccatagatcgatcatggcctcgttagcaatggcaacctttttcacctttttgatggccttcttaccctttttcttggcgtcttcttggagggtaagactgcaattcttcagaaatgtcttccatggacgacccatgagacgatacgagttattagctttaatgtacttcagcgtgaggatgtactcctcgccggtgcggtcgtaggcctgcacgaacagcccatcatcaccattgttaggctcattgttaggcttgttcgtgccattgtcattgtactctttatgctcatccttcttctctttagactcaccgttcttcttatttttaggcttgctggatttctttttgcgcttacttgtggcggctgacttctccgccagcgttaggatgctatcaaacggggataactcgccatccttcttgcgtgatatttgtaaacggttttggcttttcaaacggtcggaacgccacatcatcttgccgtagacgcgcaccggcggcgagacggcgccgaggccgttgaggaggctgcgcagccggtcgtggacgacggcaatgtcgtcaagcggcacgaccatgtcggaccctgccgaagacgtcgacgcgccgtctctgcctaggctggcccagaacttgccgtggccgcgccgcttggtgttcttgcaggttccgatcgctgtcgtcacgtgctgtcgtcggccacctcggatggcgtcacccatgagcttgtcggcggcgggcaggccgattggcatgccgccgccactggcggttgatgggctctctt

SEQ ID NO: 10287 - DNA, 28654 bp, Oryza sativa
tggatgatgatgtggtacaattgcatcttgagctttaaaagttagtggatatcaattttatagtaagataggatgtggctgcacagaaaagagagagtcggtattgtatcagttagtgagaagttgtatagatatatagaattcctcattacataaccgcctgggaaaaccgtgtggccttattaaaaatcatgaccccgttcgtttcaggataaatttttggattaaaatgatacgctttttaaactgctaaacggtgtattttgtgtgaaaattttctatatgaaagttgttctaaaatatcagattaatcctttttcaagtttgtaataattaaagctcaattaatcacacgttattatcacatcgttttacgctaaacacttaatttttatcttcaccttcagaagattcaagaaccactccaagtgtccacgttcactatacagctctcttgcttgtctgttctctctctccacacttcctctctccctcaactcctcttcgcctctcgctttcctgatcttttcctgcattgaccttgattctggtgacgagatagcggcaccaaaggggaggttcatataggcggcgtaggggaggggcacccgtgtccaaggagagggccgacagtggtggaggaacaggactgtggcagcatgagagttccagcacccgaccactcctgctcgttggtttcgtcggtgacgatatggcttgggcccgacggtggggacgatgagagttcttgttttttttttttgtggattttttatttgtggattgtggcttccctcgttgtgattgtggctctttttgttggatttgtggatttgctagaaattgatgtactgatctagaaatcgatttgcatatggatttttttgatttggcgggaattctcaggtttggtatgaattttattatttgttcggcaaaaagaactttgcacatcggttctcttaaccaagccgtttgaaaaaaaatcaatctattaggtgttcctttcaaagaatcacatttaaaaatttaaatcgatttttaaatacggtttgttattaagagggctgtgtgaaaaaaaaatcaatttccaaatgcaggtgtcgaaccgccggtgaaaatattgatttctaaagtcgttggctcattgcagagggggacggtaaaacccgcctcaacaaatcggttttgcccacccaaagaaatcacatttgtagtgtaggattgataaaaaccaaataaacctaccagaggaggagggggtgaatggtagggaaacaaaaacccaaaatcttttgcgaaataaaatatttatctcaaacggagtagatgacgaagtcctgtcaccgccagtcatactgcccactacccaccgatcagatcatcgttgtatgactggtcagaccgtgcgcacacctgcggtcagaccgccgcactctcgccggtcaaatcgctaccttgcctgctgttaaaccgtcggaaactagaaaaaactggtagatgataaactcaaagatgtagattgaatcttgactttattgcattaactagtgtttacaaagtgcaccaacagtagtcctcactaaaatctcgaactaaactcgaaatcctaactttctctcaactcaagtctctccaaaaccgatactggaaggctacaccctcactatctatttatacacgaggtaggttgtgcaaagcccacgaatctaacacaacttaggactcccaaccacgtgggaaaccctctcttgcaagtatacaacttatccctttacttatctccatcaatcttcccaaatttagactcccttccaaattcgactcctctttctatacacacacaatccctcttatataccatatggattcttcatcaccacgtgcattgttctccagccttttagcatcccgcatgatctcttgatctctagacgtctacttctcccaagtcaactctaatctatcaccgacaacactctcccaaggcctcaagcaacacctgcacatacaacaaccaagaacccaacttaactgacattagtataacaatattatccatatgcataggaaccatctataagtcaaatccctgaaggaaacatccaaaaccgataagacaacctgaaaccgacaatgaacaggaatctgccggttaggccgtcaggctggccagtctgaccggcggcaccacccggggtcaacaacaacatcacttcacaaaagcaatcatctatataactctgaaatatcatcgcaagaaaccaatctttcacacatgaaacattaaaaccaccaatgctttcatcacacaaaatctaaatcaactccttgattttacatatagtagggcatgtcgatagcacctgctgttacggtagatgtcatgcgtccatccgctgtcaacgtgtttagggtgtgtttggaaaatgggttaggagaggtgggattgggaaatggaaatgaatagagacatagtatgaaatagggtgagaagaataaatggcttaccctttaagggatgggaaatcatatcccaaagtcccaaacccatgtcccaaagacaaccttacagcttagtgaccaacagtaaaagaagacaccaaggacaagcccatgttggatggctataaagaaggaaacttgattatcttccgatacgaggagcaaagcgaaagtttagaatctaacaaaaaaaaatctaagcaagcaagtttagaatcgaacagatcaccaccaaagcatgcattggatccatgcatggcataaggtacttgcttgcagcatgcaactcatgtcggcctactgagcacaatatattatactatatattttttcaaaaggaaaagcagcctccaactctttttcttccttcttcctctacgttgtcgtagtgtcatcgatatgatgtttgggccaccgccgtccgccggtgatagcattaatatccccgacatgccaaccattcgtaccattttccctttcaagtaaccccacttacggccttacgggcatctggagccgaacaagctattgtgcgcattattcgtgaagcatttgaagtcgtacatatcatatccttggtttgaatctgtctttcctcttggttccattccattcggcatgcacattggtctcagtgattctctggctgcttaatttgttgcaggcggcggaatgaataatcgcaggagcgagctgggaggatcggcgatgcagagcgtaccgcggacatggagtcatcagcggtctgattcgaccatcaacgatgtcgcgataacccaggcagtgatcgggaagctcgtcaccggtgtgggctacctgtcgctgacgtggtcgacggtggtcctcctcggcggcttcgtctccacggtgcccattaacgagttttggttcctcacagctatcagcctagtgcttgcatccacgtaagtggcctctcattcatttgaaagcccagccattcgtatatgcctgtgattcgtgctttgacaaatgttcagctgatttatttaaacatatatatacgcctatgatacatcttttttaggcaaaacaagtacttcctccgtttcacaatgtaagactttccagtatttcctccattcatttagatgtatgttaagattcattaacatctaaatatacgtgagttcttacattgtgaaacggaggaagtaacaaatataatcggcaataatgctttctgttagcaacttttttttttgtcacgccgagcaatcacattaatgttgacacctaatgctttgcattgttacggagttatcaacagcctcgaactaaaccaaatcaaatcaagatgggttttgtaaaattaaaccagctagcggagcttcttagttgggatagggataaccactcgtctcatgggcaaacggaatattttttgaacaaacctacgaacgggtaatcacactctcgtgacaaggacggacggctttcaacataaaccgatgaagatggatgaaaactagactagaactaagtaaaaagtagatgtgataatgaaaaatgattcaattggctaattgtgttaaaattagattggtgtctcaattgaatgggccttggcccttataaagaggttggtcttgtctcctacaagacctcctccatgttaaaatcaaggtagagaccaattagaacttagaaagtactttcccaagcaagaaaaaccaagacccgatgatattctagtcggagtaagactcagccggtcttattggccagatgccgctggtcagaccgaccacatacctgcggtctgactagcctcaaggcaatgggcagatcggcctcccgtggtggaaaccgggtacttccaaatctggccatgttttcctatttcgtgtttaggtgtcaaatttgggcgttaacacttccatcgagtgttagatgagaggcacacgagcggatgtcacgcccagaaattcattatccgaatttcaagcagaatatgtattaaaatctctgtccaggaccagccagagtacataaacgacaaattaataaacagatccacatcttacaaaaatagtaaataatgcttacaaactcagcagaaataaagaaataatctagacttaatcttcacgaccaaaagcgttgcatcctccataaaaccacaggcatcctcaatgtccggaacaagctcaatcctcatagaactcaccatgtgaaccattctctgtctctgtattaggaaaaataaagcaagactgagtaccaaccaccgtactcaacaagtcataccaacgggaaggtatgatgcaagatattcacaaaggaatggccataagatatttgtaataaaagcagcatttataaatcataatttgaatacagtaaaacaatatataattaagcaatattaaaatatcactgcccaacgctaaaccacattgcaataggcccaaccaaaccacctaaactacaccagttcattaagtcatattattaagaatgagactaatcacggtgagctggttgaccgcccaataaccggcacgactattcgaatagttttaactctgatcagaggtgtacaattttatccacaagacacgattccacacatgttaccatgcgctgaagactaccgcgatactgcaaagggagaaaccgtgacaaaacccttcatataactctccctaaccgaacatacccacctcagctttcaccccctcctttttagccaagtcgggcagtcccctctcgtgcctaggtaaattcggaaacaacagagaccagagctaggtctgaacttcaccatcgcctctacccttgccatggtatgtcagctaggttaagttatactctagatttagcttggagcccacgctagcctgtgataagtacggttatatcttccagggattcccgagaaccaatccttaattgtcatggcacgacttccaaaaccatacacccacaacccaccattaaagcatatttttgtttaattaaaccttaaccatggtggtacatcatcatatagttaaggactaattatagtgaatctcattatgaactaattgatctaagcatggctaagcattcctaaaccaatcatctagtcaattatatcccaagctatcaatggcataagatatcaacaggctgagtacgataggcatccatcccacatgacattctaaaataatgcaatttaatagaaagcatgggattttataaaataggttcaacatgatcaatgttgtatgtatgacttgcattgctcttgagctgacggaaccgcagcaaccacttcaaaataaactggagcgtcggaactgtcggaatctaaacgacaaacaaagcatacaataatacatcaaataagtctgtggtggatattttaatgaattcactgcaactttaatggattaaaacggagctcagattatttagatatgaattttagaatatgagatgtgtatttactattaaccgaaaaaccttagtccattattacacattaagagaaataagtcaatgagtcaacaccagtaagcaagcctcacgggatatcaactcaatgagtcaacccaccgtgacatgggaccactcaaacggtcaactgaaccgacgaacggaactgatggcttagaacgactctaaaactaaagaacgactcgggacgaccgaacgaacgaggctttggactatacttcatgcgaacgaacgattaacgactagcgaatggctgcggcaagaccggtagacttaactcggtttgcggcaacgacccggtacggcaaacggtaggccggtagcgactcgggttgacgactgcggctaggcaactcggctaccgagcgacaagtggcggtgtcacgatctagcagcgatacgactatggcaaacggtgataaccggcggcagcggtggcagcgcgggacagcggcgacgctcagcggctggcacgacagtgggcggcagcggcgcacggtggtggcactcggcagcgggtggctgcggctagtggttgcggcagcacagcacagcggcggcgcgactgcggctagcggctgcggtggcacggcacagcggcggcggcttgacagtggtgcagcagcggcggcggcacaattaggattagacccactacgcaaataggaaattaaaaacctaaactaggagatcacggttaggaacctcaccaaacctagatgatcggggaggaggagatggcaacgatgatccggcggcacacacggagatgacagcgacgctagacaatgagggattaggttagattaaaccctaggaacctcacacaatgacaaaccataccggcgggagaggaggacggctcaccagcgacgcaatgacgacgacggcgggaggcagctagcggtggcgacacagcgacggtggtggctagggcgtaggggaggcgatggctagggttttgcggtgaaggaaaatagaaaaaaacggaggggtatgggaacttaaataagaggatgcggaattagagtaggtttagattaggtgggcccggcggcgcgcaaggggagggggaaggcggcagccggccgagactgggaggggagacgcgcacgtttagtaagagggggagagggactcagctagggaaaggggatgggatttggatacgaataagaggggaccaaaaaaggaaaggaaaggaaaaccaatgcggtgccattttgggaaaggaaaaggaaacaggaccggaaaaagaatatgactcggttcaacatacaaaacgaaaccgtggcggcaacggggttggtggatactgtcgacgagtgatactcgcagaccggaggaatagggtattggggtacgttggaacagggatctacgtagtatgatatcaaaacagacaaaagacaaggattatactggttcaggccccttatcaggtaatagccctagtccagtttatatgggattgatgatgatgagaacagattacaattcaaagagagtaaccgaacaggtgataccgatgagatcgtagtcgagggattcgacgagatctcctggtgagttggctctgtggactccggcttcgtaaactttggtgggtgtgttggcgatgagatgcgatgcccatagcctatccctaggggtcccttttataccgtgggataccttgaccctcaagtaagacttggagattatgtaaaccgacacgatatactagagattttaccccttccgagtaagatttcagcaattccttaactcgtagagatatttccgataatttgaggtaaatttctaacggcatatccggaaaccaaccgtatacgtgagggtataccttattggtatattccgtaagtcgtaggacagagggtatgccttatccttaacactgacagatacagcataccacaaacggggagagtgaactggggacggttcacaaccaaagaagagtggggaaagaattattaattcaactcctaacattttaaattaacttcattaattcctttgctctgaatattctgttgaacatcctgttagtgatttaaagcaaagaaaattcgaaaaaaaatctccgtgacaattctgattattaaacacattgttatttagagtttcctcctggttaagaaagtaatttctatagatgatttagcaatgatttagcaaatacggaaaaggggaaaactccgggtgtgacagcggtcgccctgaccaacgcaacaatgcttgtccgcttggggccgacttacaatagactcattagcgtcaactaacaagatgttatatatctatcaagatttcttgttaaactttttatgtacccaaggttaccctatcatgggtgatattagttagtgatattggtgaactacttttctagctagttccgcccagggttcccctaaccgttttcggggtggttaccaacccccccctatgagggatgttcggttccgatcttccgataggtattaataaacagtcgatttgggcggagtcgtgacacaactcgatccggcttctgaacgaacacgctactgagccccgcaatcgcagcaccacgtctcttctggttatcaaccatgtcgaaacctggttgacctcgccgagaaggctaatccctgcaagcgaatcgaagaacacaaccaagaacaggatagattgcaaccaaattgcatatgaatgattaagcactcgaatttggggttccacaaaccgatctagcggcgaaattgttcttgacagaataatctaagcaaaactcaactctaaacgatgacggctaccgaattaatatgattaggaacgtcctagggttgccctagggcgcacacccccttgggctaagcccacgacacaattacaaggcccaaaacccgagtcagattccgtctggatgagatacgtggcttgttttgcagattcctggcagctcggtaggtattttgacgtgggacaaaaaccatctgaaagtagactccataagctttccaacaagtactcgtgaacaccgaaattccttctagatcagcggctatgtttgtttgaagttgatgctgttaggaggcccaaatccgaatacaaaacgtgtacaacttgatctcttgtcttctatggaccaaaagtgacgtggtgaggtagaagtagacttggagaacgtcttggttttggtccccaatcaacttctttaatcatccatgcatcagttacgctcggtctcttttccttcgcccaagcaagtacctctgcaaacgaaaacacacaaaactcattgtgtagcaacgtttgttcaaatatataacaagtaaatctaatgtagaacatatgcacctttatttgattaatacataaggtagtcatggttatatccgagctagttatatcctcatcacccccctcccgcggtaaccgtgaaaaaaccgcgtaaatttcggtttcaaaaatttgaattcaaaatctgtggtagcacggttttggcacggttaccgcatggtttggagcgattaccgtggtattttcgtggtaaccgtgagatgtttggacgaaagaagaacaaaatgaaaaaaaaatgtaaaaagaattggagaaacacttaaatgtgtgtagaatttggggataataacaaaaaaaatagagagatgagagtacttggtgatattttctccacgtatgggtcttaatgggccacatgaccagtgcaagcttaggcccacttcattatttctttttcctatgtcctaattgactctttttcatgaaatttcttcaccataatacactacaaatcaagcactacattgctttttttttgatttttttcgaatttttgaatttgctcaaaatttggcaaaccctactgccggtaagggttaccgaacccccatggtaagcctggtaaccgcggttaccggcggttttgcaaaccctggttccaccaagcatttcttatctttcccaccacctgctcttattcaaatactatggactcctttggcaaataggatacggaaatgatattccactctccaaagggtaaacattttaggggcaattgcaaatttaccactactttgaattgttattgcaaaactgccactagaaaattgcaaaaatgacactagaactgtcattcgagtggcatccttacaatattgaaaaaaccggtggcaaatttgcaaatgccccatatcctagtgttgacacgaaattttccgtccgacgtgccggatgtgcatcgatcacaccaacaatgaggcatgagagatctacttagttccaatacaggtcctagatcttgatgagtgtcacgcccggaaattcactagtaatttctgaacttatttgtgcataaaatcctcgtccaggaatcagccgagatacacaaactgacaatttaatatacaaatccatcataataataacgttacatacttagaaaagaaaagaaaaacagcagcggaattaacggtctagcgatggctttagctccactcccacaagcagctcaactggggtataagccaaacgtcttctccttccggatcctttttcttcaactaaggtttgatgattattgcaaggtgagcatatgacatactccgcaagccatacagcaaatatgcaagtgcacaagtataccaaaggatggcataatataggctcatttgcgaaagcagcatttagcaaagagttaagagtagtaaaacagtagagtaattaatcagaaattttaatcaacactgaacagcacacccatgctgctcaggcccaaccaaacctgaacaaccaaccccggtcgtacagatcaaacctccaaaccaggaattatccattccaaaccaggagtcaaatttattatcacattattattattaatgagtagtgtgagactaatcacgaaaaacattgctcaacccgcccataaccgcgggcacggctattcgaatagttttactctggccagagatgtaccactgtacccacaagacatgattccacacatgttaccatgccccgaagtaccaccaaaggggggaatcgtgacagtaccttttgcacaatacaactcaccacagtgcactatttctggatcataatcactccctcaaaaaccagaggcatggactccccagcgacccccacggacttctcgccgcttctcagtctggcaccctgtaatgaactatgctataaaaaagataaagccgttgcccacgctggcttatggttagcacggtaaatgtttcacaacagtagctcgcgaaccggtccttaattgtcatgagcacaaccatcaaaaccatatgctcacaacccacctttaattaggttttaattatcaattaattaacataacacgattaaccatcgtgagctaccattaaatataaccataattaataatgtagtatgattcatcccattaatgagctaatgtttctaagcatggctaagcaattatatatatagcatttagctgaaccaaaccaatatataaggttctagctaattaaattataacccataggaaaataaagtcatcttcggccattaattaattgggaaaggctcaccacccgatgacatttgaaaataatgcataagttgaaataaaacaatagctttaaataagttcaatatgctccaagggttgtttgggatctgtgtgacttgccttgagcttcttcaaacgcttccgaaccttcctcaacgaaaacgctctcttccggaacgtcggaaactaaagcaaatgaacaaaattaacaaaacagtacaaaaacaagcataaacagtacacatagatatttttaacatgtagatcttgattttagaaaaatttagcaacttgaaccactcaaatccgagttacgatgatttagttatgaatttccaaagtttaatcgattttcatctaataaagaaaactaagaaaagggattaatgacgtcatcgctgacgtcatcgccgtccatggcacggcttccacacgaccaccggcaaaagaaggctcggttgggctaacggaggacatctacgcgtagaggacgatgacgcgaactcaccggtgcaaagaacaacgacggacgacgacgaacgacggccggcgacgaggttcgacggcggctcggctcgggtcaacaatggcgacggcgctccggctgtcttcggcggctgcgaaggggcggccggggttcctctcctccgtgcgcacccaacggcttcgacggatggcaacggcgacggctaccgcggcggcgcgacgcggctggaaggtcgccggcgacggcggcggctagggcaacgtggcggcagcgctacgggcgacgagggagctcgggacttggggcaaacggaagaggacgactaggggatgctatttataggcatgggtggaggagatcggctcaggaacggatggatttggtgaaggaagttaggatttatccgagttcacccgaataaaaacggccaaaattcgtgagatagataacgaatttgatgggggtttcttcgggattaggtagaggagatagagaggaatccgtttttgcaatcaattttggaaggggatcaacagttcggccggatcgaacggagaaggtggcgttgcaacgcacggcatcgggcagaacaggggctctggaggaagaagatgacactgttgtgagagggaggtaatgcagactttaggatgggctgaggaagggagagagaagaggaaggaatgggctgaaaagggcccaagctgaggaggaggatttttattacttttccaaattaagagttgagctccgaaaaatccgagaaaattccagagagtataattaaccatggagaatttaataaaacttaaatccagccatgctttatatttaggaaattttatttctcacatttaacttcacttgtaaattaatgaacatttaatataaattctaataataatttattaaataatttataaatcctaaaacgaaaatcaggatgtgacaatgaggtacgggcatgccagtcagtttaattctgcaactgacaagagatgtcaagtagcagcaattagctgatagattgaacgatcggttgttggagactaggagacccgggcgcggatcatgataatctcaagtgggccaaaagtgtgtgtcagccgatagcggataaatgatggtttggtgtagaatcagttgaaggatccaatgctagtacttagcactgaatgcatttggtcattgaggccagccgatgttgatgggactgaacggtcggttgtaagcttgttgcagaattggatcggttggaaatccgacacaaatagactcaaatagttagataaacaatgaagcctttgttacaatcagttagcgaacttttcattatcaaagacaatcgtaatagattagacttaaccgagacggtataagattgaagttgatatagatagatttatccaacaactaactaatccatataagccgatgtaacacttagaactagtaaccagataactcatcggttagcactccaatgaaacataagcaagaaacgtatcggcttaacaagacttagattatcaatacaatctaaaagatcagacctaaccgagacagtacaaaattgcgtgtgataatctaaactcgatgaatcgatagatctatgcaaacctgatggatataacaaatctatcttaaaatagcattatctttaaagagacgccaacttgatcagaatatcggaccgaacgaaggaagtcctaactaagtcaatgtgactctaaacaataatgcaatcaaaagtagagacgatataccagataggcaacacttgcttcggtccgaatagaatatcggacctaaccgaggaagtcctagccacgccgatgcaagcgaagatgacggaacttacttctcgccagaggtctcggactaaaccgatgcagcccatgctcgaaattaagaactcgacaggagtaaattagggtggcgatatgttgaaagttgtattgatctagagatagattagaagaaccctagatgtacatatttataacatatttataacctcgagccaatatgaatccccatcataaatgactcatgtttcctaaagataaaacacaagtcctaatcagacactaaccaaactttttaaagataaaaagaaaaaaaatactaaaccctgcataattaatagataaattaagctgccatgccatggtcttcacgactccttcttgaacttggtctcttctggacagactttccatcggttgattgtgttctttccctaaccaaatccactaaagaatcttaccatattttggcattaacacctagccatccttttttttacacctcaatcttagccatttacccatttccctttctcaatcccatgtctcataatccttttgccaaaatatgccctatatgcatctctctatgatctcttatcacgttgttgtgcctctttccccatctttacaaactcgcttcccaatctcgccatgttctctctctcctaaggtgtgtcactctctctatgtgctttttatctgctcttcagtgccttacaacctataaagtgaatattggactctatgctggtccttgggcaagcaagtaaacccctttctcattgaaaaccaaccatgtgcctttgctacaactcatgttttgcaaattacatagagtccatgtcgtttgcatctctgtcacgaatcatggcaattgctttggcatctcgccaattggtagagatttcatggggatttcatggagaaaggagaaagcaagacaaggaagctagaggcagaggtaagcggagatcggtaggggtattcaattttctcttcttcgataccatagcccgtcgagtcaataggtcttttaccatttacaactgggtttcgcccaagacaacccacgaggcccatggcccatacatcatttgaccccaacaacacaactcatgcttccaaggacacaaaaattcccccctcataagaaccggcttgtccctaagctggtgcatcttggaatcgttgtcatagctggcacaggttttcccaggttgccaactccattggcagtctggtccattgtatcaagacatgaggaatcattgccctaccactcttgatcagttggtgttgaagcacttcttcaggcacgacttcagctgtagtatcaacataatttagggagatcagtaattacttgcgttccaaccttcaatgccttttttagcaaccacaaatgaacaaccagatgtatctgactacacactaggagctccaatttgtatgccacagctctcacccaatctaacactctgtaggggccatagtatttgaaactgagtttatgataggaacgtcatgctacagttatctgcatatagggttggtgtatcaagagttggtgtttcaggtatactagatcccccaattctaaccacctctcagttctgtgtttgttggcttgatgaaccaccattgttgtgccttgatcagttgatgacgtagaaccacattcaactgtgagtattcctgtagccaaacctgcacatcaggcattatgctctgccccagattcacttcaccaaaataagtgtgctttctggcaaataaaatttcatatggttattttccaagggctctatggaaatcagtgttgtatcaatgttgagcttgagagagctattgtgatcatttagtcaggcaagcatgaacatcacaccacaaaaatgcttcaacgcattgatttagcatttctgattgcccatctgtctagggatgataggatgagctcatgttcaatttcacatatgccaatttaaatagttctttttttacgggaagtttaaatagtccttgccacacctatctctattagatataataattttaggcatgtcaaagtctcataaatattggacatgaaagcttgggctacagtaagtgttgtgaaaggatgagataggggaatcaactaggcaaactttgtgaatttatcaatgaccactagaataatataaaatctgcctgacttaggtatttcccaaacttgtaggggaacatggagtggtcgtaacaaatctggagccatgccatgttcagcttttgcttgttggaaaacttcacattgttctaaacatccttcttaaaccctggccatgtaaactttgatcctttggtaagctgctgccatgatagagtggccaccaattccacttttcatgtggagacatcataacatcatgtttagcctctgtatgtgcacctagccagattttaccatggaacctaatcacccttttgaccaactgaaaccaatcctttcccacaggactcaaactcaattcaatcagcaattgttttgtcactagatccttaatgtatccttctatcacactctctagtcatttaggattcatgctttccgcgtgtcctcccctctctctctctccatcttatctcctcacacaatcacacgcacccttccctatctctctccacacaagcccgacgatgacacccctcctccggtgatggccttccagcgagtctcctcctcctccttattgcgagctccatcgttggagaaaaggaatcacagtcgagttgccttcctccttcgatgacggcggctgcaaagacctctatctagcgatccccctccttcctccctccgaaaagcttcctcaatcaaccaagtcagttccttttctcgctgtcgatcctcactatgccatcgcctggtatcaccggcgccaaaaggcatcaaaatgatggtgctgtcccgctcagctggcctcctccccccccccctccacctcgctttgcccttgccaccaacactagcctactgcccgttgccgaccccacggctccggcgatgccgctgccgccgccttgcaggccaatactctaagcccgatcccccacttacccctccctaacaaaacccttcgctcaccccaccctgaaaccctaaccctacccctacccctacccctaccctgagcttgttgtcacacagcagaaaactgtgcgcaacttgcgccccttgcgtgcacacgaattaggattcctggaacgcgactacaaactatgcatcttcctcctagaagaggggtcggaggtgatggaactatgtttttcaatcctaccgcctcgagagttcgagctacctcacgtgggtttcttcccaccatctctcgttcatgttgtggtgtgcctgttcatcaaaatacaagaattaatgaagtgcatatgttgtgcttgtcgtatcgttaaaattcaccactacaaaaacattttttctgcacaagaacccttataagttgcaggtggactgtaaataaacctgcctccagctcgggaggggcggatctagagcctggtggaggaggcaaggggcgacggcaacagcgacgggccctcccccgcgcggatctgacggtggcggtcgtcccctaagcggatccggtggtgtgcacgggagaggccaaccacgagcaggagcagcgacagtaggctcgggagcagccgaccgcaggtgggagcggctgcctccgggttcgggagggacggatcgagagcttgatggaggaggcgtggggcagcagcggtggggccctccctcatgcggccctacgtggatcctgcgatggtggcaggaggagcctgacagaggaggtgagggcgacaaagaggagcggtggtggactgttgcgacgatgtcgccggcggatagcacctagctagggtttggagttttgatttttggggatttttattttttttattttatttttacgtgcagacgacataaacacttgtacgcaaaaatagtgattttcatagacactttcgggtagacgagcggcccacccacacgcaaaaataggttttggccgtatgaaaaaaaaaacttttttagtagtgactctcactaagttaacttacgagtgttagcaaatatatatggtctgacctgtttaggaggcttatttaacatgcccccacaacttatgaagcattttggcctcactggcaaaaaaaaaaaaaaacttgcgaagcatttttcccagtcttgttatttatcagttacctggttttctttccctacatgtccggcatttcaacatacgcaaagtatagcctaaacttgcacggtttgaaaaactcttttgtttcctttgtatttttatttcctgcattgaactaaatgcgtttttatgcttattaagatcaaattgtttattcatgccggtaaggatccaccaaaatacaatctttgaattttgagctatagcatgttttgttttgtaaaaaaaagaatggcatatgattcattagtttgttggatgtcgatcaaatataacagttgaagaaaaacgattgatagctaatgatgttcctcgctaaacccaatgcaacagggtcttgaccgtccacgattacagcatcgagagtgttgaggcagtgttgaactccacaactagtatgattgaaacctttacggctttccaaaagtctgcgaaaaagcattccactgctgccttcgtgttcagttcgatgtgtggtattgtgctgatggtgctcgcgcaaatagtagtggtattcctcgcacttttaattgaagctgtgctgatcatcaatatgcttgggccgatggcatccatggtgatctcaatgacccgcctaatacggcacgattatggtgatgacaatggaaatctcagagcagccttgttcatattttactccctagctctggctcatagtgtgtgcttctactgctggttcctgcttcagtatttccttgagaagttgtccaagtcggcaagcaaagaattcggccttaacaaggactttgggggccaaaaattgctccttcaatacctccgagaaaccaaagccaagtgtgcagatgatctgagcttgcccggtggctggaacatggtcacatatgctgtcggattgctgaaatccgtgtcccgggatgatcatctggatggtttacggatgcttgatgcattcgtcgtcaacaagaggccatccataagactggagctactgtcctccagcgaatccatccagaatctgatcaaaatgcttcagtggactgacccggcactggaggaccaagagatgagagaacgcgccgcaaggatcgtggcagatgttgccacgggtgcattacacattgttcagataccaggtgccctgcagtgcatatcttctctgcttcaagtatctccactaagacaatactgccaagaggttgaaaaaggtccacagaaacaggatcaagacaaggaaggaggagaagaagaaaaagacaagaacatgaatactgcaatagatgagcagataactgacaggcttctaaggatggacagaagagcgaagaaattcttatttgggacgatggatgacaagagctccttcaagccccaaggcactagagagttgattcatcagggcctacagatacttgagaggctcgcatgtgacgaccaaaactgcagagagatctgctgcaaccaacggctgcttaccaagatcattgcgccaatcacttctcctgctttacttcacacagattatgacaatgcatgggttgatatactgagcattttgctgaagctggtgaggctgctcatcagtgctcctggagaagctggcacaagggtatgccatgatatctcggcttgtgaggacgcggtccgcaacttgttggggattcttggccaaaatgcaacttatcccatgcaacttcaggaaaatgccatggagattcttacagaaatagcaattggtagccctgcaatcatggcggaggatttcatcaggaagctgtggtgcatcttcctttccaacagaggaacaagcagattgaggagaaaagcaggagaacaacttgcaaaactgctttctgctcaaggtgcaaatgggcaggtatttgtcaaggatgtattttgtgaaaatgatacagttgttgctcaactcattgatatacttgttcaagacaaggagtgccagataagtgcggcagcaatattggagcacttatgttgccattttgttaggtacaatgaactatcagagctatgtgtggttaaactgttgagaatggtaaacttctactattttcttttactaaaaccattaacacgaattaaccaaatgcagttatatgacacttgattataagtatactgttaatatattattattcctgcagatacttgatctaattagtaaaatggaaataaaggaggaaactgtaccaggggcaggggaaagcaatagttttgacgtacataacgatgaagaaagcaagcctccaaaacaatctggtccgaagaagccctgggttccgaaaaatgatgagctatctgaagaaacgaaatttctagcagctctgatgtcccttcttgtggtgatatgcaacaaaatggttgatgcacatgtattttgttatgtcacatcagtggatgcagcactggtgaagaagctcaagaagataatcgaagcaaataacaaaaacacagctgactgtctaagaatagtgaaacttgcctgtcaggtggttatagcgataattcatctcaaacctagctgcatcaaagacttcaatggaaatcatttcgatgctgtactgtccacggctttgaagaacatgtcagacatcgataactgcatgctctttgcagtccaagattgtcagataacaaagcctgccagaactctctcttctcttgtaaaagaagcccagggactcctccagaatgcacaagatgtaacagtcctatctgattaaaatcatgtattgcatctccaagaataacagatcatcgagtgtactacttgtcatctgaagactgaagttatctattttctgaactacacgagcaaatggagtgtgctgccgtgtctattttctgtacctagtgtgcaaatggagtgtaccttctatattctgtactatgcatgtcaattgtcgaacattgtatgaatactttaaaagtgtagtatctctgaaacatttattgacataagtactgttatatgtttggaatggcaatgttattattgattgtttcaaaactatggtctgaagttcatgttgagctcaaatctaaattggtggatccagcccataattgtaagtatgccatagcagtgagtgagtcaatatgcattctgtaagatatataacagaaattcttacagacagagcggaagatcatttcatatattcaacacatgtattctctcttacggaaattcttacagttagagcactagatccatttcagtccagaaattctgtcttattcgaaacaaaagcaatagatcatttcatatattcaacacatgtacttagaatttgaaacaatttaggattaaaaatacaccgtgctaggacgtacttacagttaacgcctgctgctgcggcttcttcacctgttgcccgatgcttttgtcgacgggcacggcaagccgtccgcaaaccaccaccgcatgctacaagcctacaaaggatgataattaagggaagtacgaacataaggcaccaactgatacacattacgcagccagcgcacacactacatgcaatgtcaggtacaactctgatggcatactacagacaaagcgtacataacaacatgaaagagttaacagagttcaatacaacaaattacaccctaggaggataagctcagatcacaatcagttcataatccctgcctaaaatacacataagatgctgttgcttcacaaaaagggggaatcacggcgagcctatgctgcatccaccttgaccagcgctgtactcggtgcctccggggtagctggtaaatactgaagccagtctttggcacaaacgagcgcctccacaatttctggacgcgatgagcttctgtagtcatcaagcatgcgagttccagttccagcagagaaaatagagttgccgctgctcaccatcgacatcggaatggccaagatatcccgggccatctttgagagagtagggtacttgagagtgttgagcttccaccagttcagaatgtcaaattcctggatgcgcggagtgagggactcatccaggtactgttccagttcagattttgttggctggcttgtagctatctcagaaaggtacatatcgaagtccacaagtccatcgccggttgaaggagcagttgcttgagtactattctcgctagcaggtgcattattacctcccccttgctcaacgtaagccggcgttaaggggaggggctgtgcaacatactcgttgtagagctcatgaacagcatcatccaccaccttaacatatttcgcagcttcaacaccataaattttcgagtagctgaactcaacgagcttcatcttgaagcgcggatccatcacaacagcaatagctaacacaaggttgcaatctttccagtacttgtcaaatctctcgtgcatatccttggcaatgctgctgaaaacagggtcttcacgccctgtggcatttgacagctcgagctgaagtttccatgcctcatggaaaaagagatttgaagttggatttgctgcagccatgatgctatgtgctgagtcatacaatagcttcaagtaattgcaggcagcctcaacttttttccagtcctcagcggacggtgcctcgttgtagttatcatcacttgtctctagagtagaaaaggcctgcttataatccaaggcagccagcagcatgagataggtagtgttccactgtgtcgtaacatccagacaaagggtcttggtacttgggatctctagttgcagagcaatctctgcaaacttctcctcacagctaggagaagcttttatgaacttaatgctttcgcggatattatagatgacaccatgaattgaagcaatgacatcctgagcaactgcattcaggatatgggcataacaccttacaacaaatagttggcccttgagcatgaggttgttcttgttggagagataatccctcagattcgcactgtatatatcatgtgatgagcaatcattgtccaatgtgatggtgaatagtttgtccttcatattccagtctgaaaggcttgtactaatagcttcactaagtgcattctctgaatgaggagaagacaccatcatgaagtttagcattcttcgatgcatcttccactcagagtcaataaactgcccagcaagtgaaacatagccaagagtttggctagttgtccacaatccaatagcgaggctgatccttccaggcatagtgttgaatgcttgcatgaggttttccttttctttctggtaaacagcatacacctcccactccattgtctcaacatctacaaccctgaaacgtggctgcagactgtcaataaaggtagtgaaggctggctgttgaacaatgtgaagtggatagtcatgcaaaatgatcatcttcgccagatatgagcaactgcgttcttgatcaaaagcagcatttgcataaccagtatatctgtaacgcctcttagacgggcgctccacagtaccctcaccatcattgtcagtccctccagctggagtcagtaatagcttgtgctcttggttcttaattttaggacatgaacccaaggtaatgtgcctcttgagatggctagtgcccgcaatttttgaaccagagctgtaagcaaaagtttgcttgcacagtttgcagcacgcccgtgtagcccctccagagacagcttcaatagtgaagtgctcccacactagagacttcttcctacggcgccttgatgttggagggatactcatctcagcactgaccaattcatttccttggacctcgtcaccttgaattaagtcctccgcaaggaccaattcatcaccctgaacttcctcagctagagcttccccattgcttggaacaatctcgttgccttgaaccaccaggttgtcgttgctggtttcctcagccatgcttcttggctagtagctagaactcacaaaatctattaaatagtaacatggtaacagcagaagtcagtataacaatcatttggccaaaaaaaaattatcgaaattgacttatacacggttgtttcaataacaaaccagtgtcactacagtggcctatttaacaaaacaggaagacaaaagaaagacaacacgatttcttgataacaaattagcaaaccaggttatagcaactggagcacagatgaaacaacaaaaatatagatgtcataggaatatatggaaacttagactgggaaacatctcttctcactcctcagtaaaaatgcttaaagtacacaatttaaattaaattttatttgccaccgaaagtgcaaacttcatgagcagatacatgtgctacgttgtttccacagttgagatatattgacccaaccattaacttcacctatcaagttcataacctgagcaccacatgtgtttagcagaacacagtggctgctgataatgaattgcagtagttgaatagcactgataatgatatctcactaatgaactgcattccccaaccaacctgatgaataaactgaaacaaatcaagaccaaatatgataggaataggttcatgagtgctataaccacacagcactataaatcttttttgagtttctagtttcatgaaaacaaaaacatctagtctaagatgatgaaaaacaaaaagtaaggacaataaatttaaacctatttccaacttatttttcatacttgaaatgcatcgcttgggtaataaaacttcggatggtttctttatttataaacttgtaaaaattccaggcatgattaaaattaactcttcatttataaaaacatctcattgcaagttaaacactgaactaacaacttagagttctatgatatataccatttctgagtttttcttttctttgatcagacttttaagatcttaacttagcaacagatgaactaacatacgctctgaatagtgaaagaatcaagaaaatcactttgcagcgaacttaaccatacaagttctaacagcaggagaaaagatatccatgtacatatatggaactagacaagacattgattgaaaagtatatacagttaaaatgcagtagaaatcaagcatctcaaacagaatgtatcaagccattccaccaaagaaccccaaagaaggcatgtatggcatatcaactgctatgcttctgtccacacacgagaagcgggtgaggagaggatcaaggtgtacctggtgccgtggatctgggcttgaagaagactgtttcgactctgtgcagcactgtacagcggggatgaagggaggaggcgcctgcaccgaggatggaagggaggcggcgccggcactgggaaggaaggggatgcggtgccttaggggaagcaggcggatgcggtgggaggcgctggcgccgccgccggtgcgcgacgagaggaggcgccggcgcgcgacgagacaacaaggagaggcggcgcgggagccgctcgagaagagaagacgggaggcggcccggagtggtggatttccaccggttaagttagtggatggatttctctagggtttggggtgtaatgggccggcatatccaccttccggggccgaaattttaccaggattaagttcaccggtagtacctcaacttttatattgagttgtttgacgtcccttatctccaataccagaaatcttcagccctaacatatacaataccgtgtattttgggtcgtgtagcagtatggatagctggtttcgctgacgtgatatcctagtcagcaaaataaaaatagagtaaaagttgcagtcttgtgataatttccccacgctattgttgcagcaaaccgaaatatattacatgttacagcaaactgatagttttatcactatagttgcagttttctgaaatacactcataaaaataatatgtgagtcccacatgtaagtgaagtgagaagaaaaaatacggggtctgcttgtcaatcccatcatcttagagagggggaggtcggcaagcctgggagagagaggaggatagaggcggctggcgatcctggcagccatgttcactgccacacccgatgacaacaaagatgacgatgcacatgtaccattgcagcgcccacccttccagcaccagcccatgcacatgaaggcggtgtcactcagcttcatcctcgcgcgtgttgacgagaaacacggtagtctgggagatatgcttaacttcagtgcaggtccaagacttgtcttgagtgtgctaagggcgtgtcagctggtttgatcctgcaacaagcaaggaaaaaataagcaaagtgagttagccaatagccgatcagccgataggtcgatgacgtattgttgatggactcagccaatatagttagaccaaatcggctataggctaagtaggtcaaagaatataaaaccctaaatatgtcgcatcggctgtaatatcatctacttagcttgataaatagatttcaaatgatatcatgaaaatagttgatggaacaatatttagagcaagatatagttaaaaataatgtaccagctagtactctattacatacttatataaacaaatcaatctatagaattatatcaaatagagatcaattaccaggtattatgaatgaaagtgttgataacgtattatgagtcattcatttattgatcaatgtggtacaatttatagatgggaaaggggtggcaaccgtagacgcgatggttgttgccaaggagtgccaagtggggagaaggcgcggttgcgatcctatctttatatggacgagatcaccctatagctagtttcttaacacatttgaaagattatttacattaaaaacaataaaacaaaaatattttgtatagcatataatagataaattatatttttaaaaaggtaaaatgaaaaatctaaaacttatatacgaactttcatattgtgtaaggaggccatatgaaaaaatttaaacttggatatatcaattgttaagcttatatattcataaggcaattttgggttttttgaaaaaaggcccaacccaatgatgcactgtaaaacaatcttcagaaaaagctaataattgttgaactaagataaactcagttgtataagataatccactcctataatttttataagagttattctttatatgcggtaagacctatactacaattgcaacattagatatataacaaaaaaaaaactcagcctaaagttgaaccacagccaccgaaagggcgggatccatggcatagtctttgcttcattatccaacaagagaaagaactcagtgctgggtccactggaagaataaagaaaaaggaaaaaagagcattgctcttctttgtcggttcgttgcttgagcagtgagccagtgagtacatgttcctctttctcctcttcacgatctaacgccatggcacgatggcttggccttggggatggtagacggcagacctgtatccatattgaatgagggtctgtttgagggagctgagattctgagaagctagctggagattctgagaagctgacctgagcctgattggggagcttctatgggtttgctgattggtgtgctaagatgctgaattccctgaaatacccctgaagtagatgatcctgattgtttgataactatttgttgtgtagggtaaacccatgtacatacaaatttttaaaagtactgttgtgaatactgaactctcataattgtagctaataaaaaagtcattgctccaattttttaaggcaataaggagggtcaaattaatcacttaatgcaaacacatacattgtacttttccacctaaatgtgttcatcaagcacatacaaaagcctaatttgccatcgctatatatgcaaataacaaagtactaattaattaaccactaccatatatacatcaaccacatagcaaaatacaacctgaaccatatgcatagttttatgtaccgcgtcgtctatttgccatcagagagtttgcaattaaatcccgaaaggtgcacatgtcaccatcatctggtgctgtgctaacatacggttcttcttcttcttcagatgaatcgattggtggcatatagtcttcatcattgtcactcactgtgcagcagtggggaatagggtgctgtagctcggcagggaggagggggatccctcacggcgacgttggaccggcgagctgatgggggcgtcgcgcgaggagggacagaggagctgacggacgcgaggagggacagaggagctgacgacgagccgaaacggaggggaggaagggccgtccgccgggctccggcaaggaaggaccgcaggagggcgttggtgcggacctctcacatctggcgcggcgtcggcgtcggcgccgccccccacgtgcgcgcggcgacctggggctcggcctgggcgcgacgaaggacagctcggcggcgactccggcgagcgcgcgggggctggttccggcggggaggcgctgcgccgcgccgctcgcccctgcctcgtctctctctctcgcgcggctcggtgtgttcgacagggaagcgttggatgagggggagaggggtgtacctcagtggcaaaggtgggtaatttcctacaactttaatgggctcatcccttagaatctcgggaagctgagaaaag

SEQ ID NO: 10288 - DNA, 13907 bp, Oryza sativa
ccccccccccccccccaaaacagggcctgggaatcctccgccacgtatggctggttcattttttttatgaagtaaattttagaaaaactgtaactttggcgataaaactatcagtttgatgtaacattagcgacatatttcagtttgttacaataatggcgtaagaatttatcacaaaactataatttttacattatatgctgctacagtacatataggtgacaactgtagcagcatataacgtaaaagttacagcaaactgaaacatgtcactaatattacagcaaaagttacaattttctaaaatttactttattttccgtaattgattataaatcataatacttattaataacttaaaatatattgttcttaacgagtttaaagataataataaaaaatagactgcggtagaaaagatatcaaatcagcaataacattaaattttaatatttaatttttggctacgattgataagctgaagagtgtccattaatcccttacacaagggttgaaagagatttggaggagaataattctacaccgattaattcccttaatctcctcccatctcttcaatctttgagcgatgctctggttctctctaatactaccggtattattaggggtaaattagtaatttactataatatcatgtcacttattattaggggtaaattaggagtacctgtcacttatttatgtttctccccacctaaatcaatctacgatcatccattgcaccgccatcgctcatgttccataaaaaaatctaaaaaagaaggaaacaatatttattcactactaaatgacgattatacccctccgcacatttttttgacaataatgtccctccatatttctactactactaactgaaatggtagtataaatagatctaaaccctttgatcaaattagatcgaaagtctactagtgaaaagcattgtactggggctcaatctttaggccatttccaacccaagacattagacatagtttctataagctccacatcatcaaactactattccaatacaaacaccactatttcatacttaaatttaatactacttatctcacatgatgtcttggatattgcgtagaaaccatgtctcatgcaagacatggtttccttctcttttctcattttttcgcttgccacatcattttctattctaggtagcagcttatttaatactatagacaccattctagtcattgagttaggaatgacattagggctcatcgaacaagcccttgctacataataaattgagcacaaaaaccacagctgtgttcggatatagggagttgggaactaaactccccgcacggaaaacggagcggtccattaactcgtgattaattaaatatttgctaatttttttaaaaaaaatagatcaatatgttttttaagtaacttttgtatagaaacttttgcaaaaaacacatcgtttagtagtttaataaacgtgcgcgtgaaaaaggagaggggtgagttgggaactctaagttccgaatacacctggctaaccgaatcttgtgcaacgaggaccgaggaacaagctttgggcgtttccatcctcattgcgccacatcctcatgcaatggctgcaatgccgaccttagctcgaactatcaagtactccctccgtttcaaaatgtttgacactgttaactttttagcacatgtttgaccgttcgtcttattgaaaaacttttgtgaaatatgtaaaattatatgcctacataaaaatatatttaataatgaatcaaatgataggaaaataattaataattacttaaatttttttaataagacgaacggtcaaatatatttaaaaaagtcaacggcgtcaaacattttgaaacggagggagtagagttttcgccgttggttcgatatatatatataggtgcagtatttggttggaacttaacccatgccaacttcttctctctctctctcttctcgcttggttatatcgggcatcatatcccactagagatagccgctacatattacagctacctattcgattgcaggagaagatatatatagaagcaattagcagggggaagatcgatcaaatgagagagagcaacaacaacaacaacagtgtcatacaagggcagcatgagggaggatcatcggcggcggcgctgcaggcagggaggccggagccggacgccctcatcaacagcatcgcgataatccgggcgttcacggcgaaggtcgtcgccggcgtgggcttcctggcgctgacgtggtcgacggtcgtcctcctcggcggcttcgtctccgcgctgcccatcaaggagttttggtttctcacgtttatcagcatgattcttgcctccacgtaagtcatcgacgaaattaaccctccccttttaacatatcgacgaaattccctagcacaaaactgcttatttagcatgagtgctagccagggttcactctatcggttgagtccttttgatcgagggtcatcgaaatcccgaaatttctgaatttagttaaattaatttgaacaaatattacctaaatttataaaaaaaattgaaaaatttcagccgaagttatatcgtatcggaggtgcggaaatttcggtccgaaatttccaaccctgctgctagcacggatgccggttaattagtgagtggtctaattccatcacagttcagtcttcgctattgacatgattagatattagtacacgttagtttatcactaatcgttaaataaattgtgactacgtcataagttatcacacatgagtcgtcacagtcgatatgtttaataaaacatttttttatcactagtaatacgataaaaatgattgaagaatatctagtcactagatatatctaaaatataatggtgacaacaagataattagtcactataaagacgcttactagctagtgaggatcaatggcttcatcgcacataaagaaatcactggtaatgcaggagtggtccaagggggaggacaaaggaaaaaggagagatgctacggatacgagggagagagagagagagagagtgcatggtcacaagaagaaataaggattaggcttcagctagctcatgatgaattgtatcatttgtgatttcgcccggttcttccgtccaggaatggggccaggtgaacccgcaagggagcggcgcggtgccattcccgtcgaattgatctcctgttccatcccattaccaaccctagtccacaatatatagatcttgaattcaagaagacactatttcatccttttttgacaaattgatcttttcaaaaatttattccgaaactagactgtgaaaaaactttaaccaaaaatagatcgtcggcttaatgccaaccgccttagcgctgaggttagacaactcagcgccatgcccgttggcactgagcaacctatccacgtggcagccaagccgatccccaagtgtacatggcagcggatcagcgtcaatcggaatggcgttgagtcaataatctcagcgccactgtgattggcgtggaactctgggacttagccgcttgcgccctgtccgcccaacacagctcctgtgttgggcggcctgcatccgctgagccgtcaaacctcagagccagggtaaatggcactgacactttggaccttagcgctagctaatttggcgctgagctatgggacttagggacttagacgtcacttgcgcttgggctacccaacacagctcctatgttggagctctgttgggctctgctctagcgctgagggtcaacgccaatatctttggtgctgagtttgtttgtttgaggaggtagggccctaggcagagagatgacattctaggtctttgtccagccttcatctaaaacctcacaaacagaaatgcatgccggccaaaatcatccccaagaatcaaaagtcatttgcctatcatcaggttcatctaccatcttattctccatttgagtcacatccaagccatcatctgacaaatccttccctacgttcacatccttctcatccggtacttccgaccatacctctgcattctcctcaacctgtacttcctctcctacctccacttcttccttaattgattctaacaaagccttcctacctccacatccttctcatctggtacttctacccatacatccacatcctcctaaaccctacctccatatcttaattaattaattcttccttccgatcaaccacaaacacatcattcttcggttcatgactgtatgcgtggattttcattgaggtctgaaatttcttttttcgattcactgtggtctatctttcaagcaaacacctcaagcgatttaaactgtgagcccaatattatatctacatatgttttccattccacctgtccattcaaatctaacacatacttatgtgatatgggatcggcgcccacatcgtgtctcccttgcataccaaccgactcatgctccaatccaattcatccttcatgcggaaaattaactcctcaaatgtaggtttggcacgaaacactaacggcctaattaagagtcatcctctcaaattggcttccaccgatactttcgtcaaccacacaaccaccaaaatggagtcgtaccaatcacatcaattaactgataaataagagtgcatgattctaaaatagtatgtcgtttcaaagatagaaaaatgacatgggtaccccaaaactacctacaatttttttgaaattttaacgactaaccaccggccagaatattcctaggatctatacctatcaacatgaacatgaatcaatatgaatccccaaaatatttcacaatacaaaggcactatacatccctcccaaattcacccgtagcaaaagagtacaaaacttgcaaatcaatacgaatcctctataccaacatcaatatacaactacaacatgacatacttacccacattccctaattcaaccacatcccgagccacattcaataacccacggtttcaaccaaaatactcaacaaaaatgagggaaacattgaggaaattagggtttttggagaggatttaccttacaaatcaacctccaaaagcaatgcccacaaaataacgttcgatttgagggagatttgagaagattttgggagggaggagagagggctatgtggggtacgaacgaaccctagccgggcctggaaaaataagagaggagtgcctaggccggggcgactcagccacgaggtataggccgctaggttagcgccaacgcggttggcgcggagattagtgggcttagcgccaaggcagttggcgctaaccacctcccacgccagcaggggatcggcttggccgcaacattggcaagggggtcagcgccaaccgttttggtgttaagccggctaatctcaacgccaacatccctggcgctgacctagggacctatttttagttgaagttttttaaacgggttagtttcaaaataagtttttagaaaggaccaatttgtcaaaaagaaaaaaaaatggcaagcctcgcctcactatggaacacagccttatgaatcatttattttcatattcatgtgttttattagtagctaattaatgatcttcctcgctgcatttactccatttctcaatacctgactttttttttaccttccccttaattgcccttagaccaaagtgaataaaagttttatgcttatatttagggcatacctcactttagtgtttacaaattttaaaaaaataagttgttaaagtttgaaaatatataatgtttgatgtcagttattaatgatcttaatcgcggtaacccaatgcaacagggtcttgagcgtctacgattacgttaacgagacttacgcggcacgagtgaatcctacgtttggtatgataaccgggggatacttcacgttcctctcgaagttcgaagccaacctctccgctggctgcgccgtgcgctgctggaggctgtgtgtcatgctcttggtcctgctcatcgcgatggcactgcttataggactgcttctgatcgacgccgtgttcatcgtaagcttggttgggccgatggcaacaatggcgatctcgctgacgcgcctgatacagcacgactacgatggctcagacgcgtcgagcaaaggaaagctcagggcagccctgttcatcttctactctctggctctgctccatagcctgtgcttctacttctggctcctgctgcatttgtccctcgaaatgttgccgattccggcgagcatagaggagtatgggcacggcgacggcggctactaccagatgctgcttcgtcagtacctccaggaaaccaaaaccaagtgtgcgaatgatcccaagctgccaggtgactggaacctggtgacatacgccgttgggttgctggattctgcatccccggatgatcatctggatgggctaaggatgctcgacgtcttggccatcaacaagcagcgctctgtacggcttgagctgctgtcctcgagacactctgtccagaatctcatcgagatgcttgagtgggatggtccggaccaggagatgagagagcgtgccgcgaggattgtcgccgatgtcgctgctgcgctgcgcgtagcccagatgccagcgggagctctgcactgcatatcttctctgctagaagcctcaccaagatctgacaccttgaagaagccgaaaggcggtaaggagttgattcatcggggcctgcagattcttgagaggctcgcacgcgacgagcacaactgcagggagatgtgcaaaaccaatggctgctccccaagatcacagcaccaatcacttctcccgcgttcctcgagacagaatatgacagtgaatgggttgatatcctaagcattttgttgaggctggtgatgcggcttatcagtgctcctggagaagccggcacagtgctgtgccatgaaatctcagctagcaatgatgcagtccacaacttgctggggatccttgacggccaaatcaagttttccttgcaacttcaggaaaacgccatggatgttctttcagaaatatcaataggtttatctgcagccatgaccgagaatttagttaagaagttgtaccacatcttccttgccaacagtggtatgagatgattgaggccaaaagcaggggaagcgctcgtgaaattgatttctactcaaggtgcaagtggacaggtacctgttatggagatattctgcaaaagcatgtccatggagcaaatctgtgaaagcgagtccacagatgcactggatgtgaagagatatggaacagttgttgatcaactcactgatatacttgttaaagacaaggaatgccagataagtgcagcagcaatattacagcacttatgttctcgttttacaaggagctacgaactattagagcaagatgtggttaagctgctgatgtcggtaaacctcaattgctttctctttctaacatcattagcatgaatcaaccatatgcagttatctgaataattcagttaatgtgatgcccgatcaaacaatattaaccctaaattagtagttcgctctagattgtttgtttttagaaatttgaatagtgggaggttatctatatcagatttgctatttatcaatcatctagcattcccctaaacttgcataatgcataggctaaacttatatactttagaaaagtacaactttagtctagatgcatatttatgcttacatagaccataaacgttttctccatttcagtgggggataaacagcaaattacttttttttcaatgtttaggttagaatattctttgtttgacagaataaaggaaaaatatgagttattggacattgacctagtgttggaaaaaaagtgattgatagcgatatagatacactcacatggttataacttatactaagtacattgctaatatttagttccttcgatataaattttattatttacaatacatggttataacttatactaaatatatttgctagaagtcagttcctgtgagatgaattatattattgtaactgttgcggattcttgatcttatcctatacggtaaaacggaaggagatgaggaaactgtatcagaggcaagggaaagcaataattctgaaatgcataatgatgaagaaagcaaacctccaaaaccagctggtctgaagaagtccttggtggagaaaaatgatgagctatctgaagagaggaaacatctagcagctctgctatcccttcttgtggtgatatgcgacaatttggttgatgcagatcttttttctaatgtcacatctgtgaatgatgaactggcgaagaagctcaagaagataatagaagcaaataatgaaaacacagctgactgtctgagaatagtgaaacttacctgtcaggtggttatagcgataattcatctcaaacctagctccctcaaagacttcaatgaaagtaatttcaatgatgtagtgtccacggctttcaagaacatgtcagatatcgaaaactgcatgctctttgcagtcaaagatcgtcagataacaaagcctgccaaaactctctcttctcttgtaaaagaaacccagggactcctccacaatgcacaagaaacaggtaacaattctatctgactaaaatcatgtactgtatctccaagagtaacattgtacttcttgtcatctgaaaatattttctgaaatacgcgtgcaaatggattgtgcagtcatgtctattttatgtactaagtgtgcgaatggagtgcgccttctatgttctgtactatgtgtgccgattgtcgaacattgtatgaatactttaaaagtatagtatctctgaaacatttattggcacaagtactgttatatgttaggaatggcaatgttaatatgttattattgattacttcaaaactatggtttgaagttcatgttgagctcaaatctaatttggtggatacagcccataattgtaagtatgtcatagtgagtgagtcgatatgcattctgtaagatataacagaaaatcttaaagatagagcggtagatcattacatatattcaacacatgtattctctcttaacggaaattcttacagttagagcactagatcccacaatttttgataatttgaccctttgcaaaaactaattttacaaatgaaccgccgccaaaacttttttaaaaaatgacccttttgttcagtgccaaatcgtgtggcgctgaacttagacacctcagcgccaaatagcatggcgctgaatgtacgttggcacactaactcagccttccatccgcgttggcacagcattcagcgccagttgacgtggcgctgaagtgtctaagttcagctccatagaattatttggcgttgaaaaaatggtcattttttaaataagttttggcgaaggttcatttgtaaaattagttttttcaaaaggtcaaattgtcaaaatttgtgactaggtccagtccagcccagaaattctgtcttattcgaaacaaaagcaataaatcatttcatatattcaacacatcagaaaacataatgttgggcgggtgctgctgccgctcaggcatgccacgtaggataaaaatagtgcgcgggggtggaaattttgccaaaaaaaaccctctgttttgtgtgtaatttgatgtaggttcctcctacgtggaaacccttctaaaagctgtatattccatgaaaaggagagaaagatcacgaattaggaccgcgctgtgataaatggaagcataggggcttttacgcaaaacgacacccactaaccttaacctcaccccaaaaccctagccgccgccgccacccacgtccccttctcccactcgtcctactctctctgtctccgtctcgtgccgccactgggcgccgcctccaccgttgccaagcgccttcccctcgtggcacgttgtcgtcgtcaccaccgagcgcgccacctctacctctgcctcgcgttgcctcaggccgtctccgacggccgatgtccggatccgatctccatgtggtcggggcaggcggatttgaccgtccacgtcccctcctcgcctcactctctcgctcaccttctccttctccctctgaccacccccgtccagatcccattcgttgccgctccaggtgctgcggatcaaggggcagctcaagacagcaagcttcgtggtggcacacatcggcattgacttgggcagacaacatccatgatagcatgggctattggcggcggcaaccgagctctaaatcttgtagtggcgaagtcttccttgtggcggcagcgaccgcatcttcctggcagcgacgggatcacgggatgttcctggcaacaacagcggcggcaacttctcggaagcagcggtgtgttcccggtgacagcagcggctgcatcttccctgcagcgacggtgtcttccctgcgacggcaacgtcggcgatgacatctctcctggtgcaagttcttccttcatccacaagagaaatttgcatatttaccatcgcataaaagtggcttcgctagtataacatcacttaaatagtctttgctggaataccattctcaactgggtgcggtctgacactttgcctttttcatcgtttttggctaatgaaaaagattttgctcgctttcaagttttttttttttttgccgaaactgcccttggattttgttttcctctctatccaaaccataccgttcttttttttccaagttctttcgctcgctcgcatctcctcctgtcgaccgagcggaggcggaggcgcggtcttgccggcgtcgagccacctcaccgccgccgtcctcgccttctcttgccccgtcccccatccgccccacatcccgctctctccttcctgtcgaccgagcggaagcgcggtctcgccggcgtcgccttcctgtcgccccgttctgctcccgccgccgcttcccgtcccccatctaccccaaaagcgccgccggggaacggggagaggcggcgcggcggtagctgactcggcagctagcggcggcggtgatgcctgcgaggggagcagcgggattcgggggtggtggggagagaggcggtgcagctggcggcatggtggggtaacggggagaggcggcgcgacggcggcagtggtgggcggcaccagcgtcgccgcttcactttctcctcacgcctccgtcctcaagcaaccgaagtctcgaagcagcaagaggtagagagattcagcatgttgaccccgggcccggggcataaacgtccgagaaaaagtgtaattgagaaaaaataataatttcgaaatgcaaaaaaccacaaaaatggcatcgcagcgaatacccacgacttaggagtagcattccagcaaagcccttttaagttatggtattctagcaaagccatttttatactatggtagatatgcaattttctccctccctgcatggaccaccttagcaccgtgtgacccccaactctgaggacgactagcggcggcggaggatggggtcgtcacggcagaaggccttccacatggtccggaagcgtggcaggcggcagcatgtcgatttccggtacccggcggccatgtcaatcgaggaagtctgtgatcccgacgaggaacgcgtcgtcgccgtgttccacgattgcctcgccgcgcacggcctgctcctggacaaccacgatgactaccatattatgctaaaggttcaccaaaagttgctttgctaatggtgactttgccttctcttctgatgcaggtttctgaaggttaatcgaagacgatgcaaatgtgggcagagatgctgagatggaggaaagagataggagtcgacatgatgttgaaggtgaccagataacaaagcgcatttgatttaataagttacagtgtctgaataatatttggtttgatatattgatgaactccagtgctatgttcttgtggttaggagttctgctatgttcttatggtcaggagttccgaacagggataccatgctgttgatcaggaaggccagccgatgtacatcaagaagcttggcaagatcaatcgaaacaagctgatgcagatcaccacagtggacagttacaacttacatcaattagcatgttgtagagatttaattgcaggttatttgccgattgccattaataggtttttttttggcagattttttgctacctacagttcagttgacatgctttcttacagctaatgttcagactacaaccactaccagttcaactagcctgtttcttgcttcttttcataaagttacacatatctacatggattaagtgtattgtcagaatcaaaacctggtaatttttttagcctttaaaccatttatctactcctagctattttgctcatgctcgatgtattctaaaagcaagattgcaacctttgtctttgttgctattctagggtcatggtagtgaattcatggtaacacacttgatcgttaattttcaatttcgggacttactttcttaattgagtcgtcctgtcaattggtttccagggaattgatggggatttcataagtagtcaagctcgcctgcctttaattctaattattgtatccatgacgaatggtgcggctttgtgcacacattgatggccatctccagcatcattcgtgttctttgtgcatcacacatacatacccctcatcttattctgtctgcatccaaacaaattgaggtttggattgtaggtcatttctatcatcttaacaaatacaactatatttatctaaaaaagtgaattcaactatattggataggtaattctatgtgtgtattgacctcattttcaatggtttacatgcaaaggtgaacaccaattcttagtttaatacaattatgcctgtttgatgaagctactgaataataaaacagtccattttaagcgcaataaaacaagccattttcaattttctagcacatcatgcaggtataggacaagcatttcttgtgttaatcactagattatgtttacttctggtggctcggctgttttggtctttcatatcttacagcaagcagctcgctaagttttttttttcctttgcagccctatttacagaagaaagatcagagtggtgtttctaatatgactgcaaagatgagctattttatcatatggtaagagcaaagtataaggtctaatctatctagccttgcagagcacattgccgatttctactaatgtatttttcttttcgttggtggtcacagagtgtccataggagcatagttgcagtgttccttcagttatgaacaggaacatgcttatctaagctgttctattttagctctctttgtatgacttgatttcttttatctagcatgatttatttgttctaccattctttaaaacttgttttttgcctattttttggtgattgacaaataccacagacataagaccaattcaatatacaccatgctgcatacaggtaaatgttaaaggctttcttctctaatttagtttcctcttcttaagtttgagattttctaagagatactaatacattatctcctcctggccattaatacatttaggccccttaaggaatgctaagttaactctttaggggcattgatgtgttctgtttttcaagttcgctttaaaaaaaacttatgcttttgttggcattttttttcattatacagatgataaaatatgttttataacataaatatgcttgcaattctacatcacaaaccataaagcctctcaggatgtgcccttttttagctatgacacgtcaggttactgtagtagaagcacactaggattatacggtgccattaactgttgttgtgtgcttgcatgtgcagctcttgttggatcgtgtctgccccgctgcacggcgccgcccctccgctcctgcttgctgcgcctgcactcaccagcaacccaccgcaaccacccc

SEQ ID NO: 10289 - DNA, 19000 bp, Oryza sativa
  unsure (1)..(19000): unsure at all n locations
ataactaattaaccgtagctccgattcaagtggttcaagttgctaaattcatctaaaatctagatctacatgttaaaaatatccacatgtattgttcatgcttgtttttgtactgttttgttgattttgtttatttgctttagtttccgacgtttcgttggagggcgtttcagttgaggaaggtttagaggtttttgtggaagctcaagacaagtcacacagatcccaaacaaacctttgagcatgttgaacccgtttaaaactaatgttttatttcaacttatgcattattttcgaatgccatcgggtggtgagccttttcccatttaattatggccgaagatgactgtattttcctatgggttataatttgattagctagaaccttatatattggtttggttcagctaaatgctatatatgtataattgcttagccatgcttagaaacataagctcattaatgggatgaatcatactacattattacttatggttatacttaatggtagctcacgatggttaatcgtgttatgttaattaattaataattaaaacctgattaaaggtgggttgtgagcgcatggttttgatggtcgtgctcatgacaattaaggaccggttcacgagctactgttgtgaaacatttaccgtgccaaccacaagccagcgtgggcaacggctttaccttttgtatagcatggttcattatggggtgccagactgagaagcggcgagaagtccgtggggggtcgctggggagtccatgcctctggttgtagagggggtgattatgatccaggtatggtgcactgtggtgagttgtgttgtgcgaggggtattgtcacagttcctttccgaggtaccgtggtggtattgaggcgcatggtgacatatcgtggagctgtgtcttgtgggtacagtggtacatctctggccagagtaaaactattcgaatagccgtgcccgcggttatgggtgggttaacaatgtttttcgtgattagtcccacactactcattattggtgataatttgtgataattaaattgactcctggtttggaatggtatattcctggtgtggaggtttgatttgtacaaccggggttggttgttcagatgaggttaggcctatgcaacacgggtgtgttgtatggtgtttatttaatattgcgtaattacttaactgttttactattctcttaaatgtttattaaatgttgtttaagcacataagctatattataccatcctttgttatcctgtgcacttgcatatttgctgtgtggcttgttgagtatgtcatatgctcattcttgcaatattcattcatcagaggaggagtatttcagtgaaggtgatgatctggaggattaggctttgtacgggtcaagttgcttgtggagtggagtcgccatagctgtttagtctttttttgtaaggaagctgtttagtcttttgtttttccgctgcgtagaattttattcttttgagaggaactatccacctctgtaataatttattattttgcgaatattaattagtagtttgatagtactctattatcaatttgttattgtgtgcctcagctgattcctggacgaggatttaacacacatgtaagcgtttggaattttggatagaaattccgggcgtgacattccatgaggtaataaattgttgtacataaatggtataattccaacataaacaactttataatattatttaatggcatgtcaatcaagacatttttctgtattgttaacaaatgttactcacctaagtgcacagtgagcccaaaactcctatcacaaaggtgctggtgaaggatagatgatcacaaaatggtgtcaaacgattccggtcacccaacttcaccaagacaagccaaatcgaggaggtgccctttcctagcccagccaacctagcccaatcctcaatcgactttggccacacgtggggagtattcgagaagcgataccgacttcaaggtgcgattggaaccgtctatgacaccaatcgacctaatgaagggatccaaccagtgccacatgctcagatgacctaacccaggtaggccagaccactaacctaggtcgaccgagaaatcgacttacccccaggctataaattacccctcccctccacattatttgcaaaacaccggtagctaaagatcaagctctagttagcaccatgttgtccaaatagagtagaaatgtaatactccaacccattttaagcctatagttataggtgtggtggtggttcaataccacctaggaagtttaggtgggtaaaggtttgcttataagcatttgtgctccaaccatggtacccctagtcaacctttttacacgaaacgaggacgaaattataagcagggtaccatatgagcgtggcccgctcaatgtgtagagcaaacaactgtagatgttggagatacggtgttacaggaaataggggagtggggagtttggatgagaacgctacggttgtcggacttcgccgactctctaatgcgaagaagttgggaaattttggcctcgtcaacattcggtggttgatctctggtttgtcagtagtcgaattttgatcggtcgatggtcgtcatccaatcaaaatgaccgtcttcatcttcctggttcgacaatgtgaatcttactgttttgcattacttatcaagtcatcttaatgattccatacttatcgattcttgcttcaatttagataaaggtcttactttatttatctttattgctttgctagtatgtgcacttgagcaaagtagtagcatgatacgttagcgtggggcttagctacaagtttatttgggaaggtagtctagatcaacgggggaccataggcgacaagttgtgacaaccctatccatcccttatagttagccaagttagactagatcccttcccaatcaatattccctcatgtctaggcataagtatcccaatggcatttacatccttatgtaacatatacaacactcaattacctctttggttgtgcatccttctaggtgtgcccgattgtgcacatactctttgattgtgcacgattgagcttgtttcggacgtcgaggattgcatgtggtttatggaggaagcttcactttggtcgtgaagattaagtctagtttattttgtttttccgctgcgtatgtgagtttctttttgttatttttgtaagacgtggatctgtctatcaaattgtcgtttatgtactctgactgatcctggacagagatttaatatagattctgcttgaaattcgggttagcgaatttctgggcgtgacaaacagcgtcatacatttttcgatggagggagtatcaatcaatattagtagccatcaggtttccaatcaactcaattgttgtttggtgacgcaaagtccgaaattagaccatactcaaatgcaaagtcaacttcctttaaggtaatttgtctaaattactagtactaaccgtgacatccaataatatatatgaaggaaaaactatggtggctattaattttaactacttataactcaagtaacatccatatcaccgtcggccagaattcttcatttcaaatagagtttgtgctgccaacagcacctcaaggtcaatatccctgatttccaactgtacaccctccataactacctccactccatgatgtggctccggcgcacctccctggacaccagtctccccggccatgacggccgctatctccagctcgacagcgctaaccacgtggctcctcctgtggcaaagcctccgtaaccgcatcatgcgatgaggactcaccctcatgttttttcttcctcttcttgggcgcaagcagtagtagctcctcgttggccttgaaggcggcgtcagcatgtggagcatcacctttgaagtagtgcaccataaccagcccgaggcggccgtcattgtggtcgtctttgccatggctcaacttctgagaacgaaacacccatagatcgatcatggcctcgttagcaatggcaacctttttcacctttttgatggccttcttaccctttttcttggcgtcttcttggagggtaagactgcaattcttcagaaatgtcttccatggacgacccatgagacgatacgagttattagctttaatgtacttcagcgtgaggatgtactcctcgccggtgcggtcgtaggcctgcacgaacagcccatcatcaccattgttaggctcattgttaggcttgttcgtgccattgtcattgtactctttatgctcatccttcttctctttagactcaccgttcttcttatttttaggcttgctggatttctttttgcgcttacttgtggcggctgacttctccgccagcgttaggatgctatcaaacggggataactcgccatccttcttgcgtgatatttgtaaacggttttggcttttcaaacggtcggaacgccacatcatcttgccgtagacgcgcaccggcggcgagacggcgccgaggccgttgaggaggctgcgcagccggtcgtggacgacggcaatgtcgtcaagcggcacgaccatgtcggaccctgccgaagacgtcgacgcgccgtctctgcctaggctggcccagaacttgccgtggccgcgccgcttggtgttcttgcaggttccgatcgctgtcgtcacgtgctgtcgtcggccacctcggatggcgtcacccatgagcttgtcggcggcgggcaggccgattggcatgccgccgccactggcggttgatgggctctcttcctcggcgaccatcttccccttgcgccgccgctctctatcgaattcctccttgcgccgctgctccttttcggcattgttggagtcgccgtcggccacgtcaacactgccgccaccgttgccgccgagcacgctacggtcagcggccgccgctaccgtcgtcgtctccctcgggcgaactcgcggcgttctatttctgtccgacgacgtggtcgacaccaccagagctccatctccatctccattgccagtactcccggatggcgtcaagaccaccacttggccctccgtgcgttccatcgactcctcacgccgcgacctctgccgcctcggaacctgcgcagcggcgaacatgcctgatgtatccatccgccggggtggcacgcacgatcgacacgaggatcgatcgatcgatcaatttcgaagagggcggtatgcatgggaggctcttcgtgtttgatatggattctactttggtaattcatacgaactctggcgcgtataccaaaccaaaccatcgcggtttcctcttccctacgagccggagactcctcctcgcacgcgaatacgcgatcaccttccctctcagcggtcggcggcggcggcgcggcgctcctcctccctaccctccctctcgcgtcgtgcgtcctgcagtcttcccaggcagtgtgatgcagatccgatcgcccattgatcggagaagccgatgtggcaccaagttgatcgaacacgctagctaggagatggatttgaacggaaggtattttcatcttcttcttcgatctgctgttgctttggagtggagatgtttcttttctgttcttgcacatttgttttgtcagaaagatgcattgaaggtgtttgtgtttatgcctgactactgtacttctgtcgtcccaaattaaattatttcatggattaataatgttcactttcatatttctagaggaattggaagcagatcttttttttttcttgtttgatcaacgttcccttcgaatcaattaattttctgatggtatacgtgctgatattcatgcattgtcgatgggtttaaccggtgtcattgtttgaattcagaattatctctctaattcattgcgtccaaatagacctattctaaagtttttcattgtgtctactgtattagaattttcagatatacaggagtacgtaaattacactgttcattgctgaaaatatcagaaatattgttgatatctaactgacttgccactaatgaggacacaatctttaagatgtaaagtacaccatctgtgtcaaaaccagtgccatgtaatttgaaggttgtggcagtccatgattaatgaaatcttgaagtacattgaaaagtttggagagtgcaattgtttctagaatcttgacaaatgatatgctccagaaatacagagatctggtgctagcagaataggtgaatttgcttggtttattagatttttctgttgctaatcacatacctgcttcatactgtgaggaataagaacgtttctgttactctatggaaaaatagtatgaattgtcttggggagtcaagtatagtggtgcatctaaaaaggatctctggaggaaggagcagccatatctaaagtatggtttgagagaatatataattgcacagattttgctaaaaggtgtgtttaattgaactgtatcgtgaaagggcatgtagcctagtggttgcagtgacctgagtagcaccctgagttcaaatctccataggagcgaatttcagattggattatttgagagctaagttccctattcgataggctaagttcctaatttaaaaaaactatatatatccggttggatatagaggccgggtaaaaatacccttctctaaaaaagataaaaaaaaattgaactgtatcagtgcatatatttcctaattgcggatattagttgtataaatatgcatataattcttgttataaatctacatgaaacactgtaataaaagattgaacaaaagtgcaaaacttaactttcttaattttgtcctgtcactcaacctggtattattcattgtatatttagagctgtattataagctccctgacaagccatatgttttttttcatccattgcatatttgcataacaaaattcgcatagctgttgatttgcaattgcactcagtgatggcaacttggtaggactcgactccatggatttactactctctatggatcaataatacagaacgaggttttcgtggacagagggatcacttgcactccaccacaccaataagtttttaactaacattttgctttttttatattttatttttttagagaatggtattttttacccggcctctacatccaactggatatatacggcttgctgcaagttagtcccttcaaaagaagtgcatgcttggttcatagacattaatcggcttatggaagtttaaaggtacattaagaatatgaagatgcattatttagtaggtagctatgagccatatatatattgctttgagttggctagaattagatgtcatttctatatatactgttaaggtcatcttatcggttttaacctgtggtttatatcttctaaaatcctgatcatgcccatattatatcctgtaattgaagcgttttcttcagatatatcacctgtctcaagaaacttcagttcaattatttgccttcgactttatctctctctataatatgtcatcgactttatcaaatttttatataatatgctattgggggtggatacttttcaaaaaacacctaaaatgcccttcgaacatataagggtcgacaattgattgacatactagaagtatcgaaaaatatgaaaatgttcacatagcattcgcacataatatagaagtctatgtatatttcaagattttcaatttgcaaaatgaaatttatgtttcatatgctaatagaatattcttgtattgatgctctttacgtaaatcatccttcatatgctacataaaattatttttctaatccagctatcttttgtgtatgtggttcctctttcacatgccacataaaaatagtttttcaaaagaaatcatgacagaaaatcttaaaatatatacacaaacttttatattgtgtaagaaagctaacaaaaacttttatacttttttgaaacttctaattagtcaatcaattgtgaaagagaatggcttgaaggaaattttaggcattttttgagaagtacccaccccagtggtatattctagaaaaaaattacaaagtcggtggcttattatagagggagacaaagtcgatggcaaattgttgaactagtataaaaaattaggggtatataatagattctctcatttttataatgatttataatttgaataattaaacaaaatattggtcattgtaggaaaattaagccaaaaattagcaccaagtatactatcattttgtatcaatacagtaatgaaggcactattcttcagtgtgaaatatttagaattacaggggtatcgtccattgtacttaaggcttacgaatttagttgtgctcagtaattgtgaaagtcccttgctatttttttccccttatttatgaataatgtcagttatactcattcaagaatgtatatatgacatgttaggcatgattttcttcccaaagatattattctttagagtatacaaaatcagttggatagtgaaaattttgatgctcttgccttagctgccctttttctctaggtgttgattactgaatttagaaatggcttagagttgacgctgtttgataacggctattttttttaatggtagaacactcatgttatgtgttgcgaaaacgattctagtcatgtagctgtatatgaagcttctaatgtacaattgttagcgacacggtggcaagtcccaacccagccgccaccctcccctcatccgcctcgccagcagccaccggcaaagctgggcagcagtgtggccttctagctcgctccaagacccggtggctggggcatcaacgggacacgggcggaggggccgcgatgtgtcgacgacgggttctgacgccgtttgggctggacacggccgatccggtgctgacggaggtagaattggccccctcgcgaccggatcgagagggagcacaccggccgcgccgcattcaggaccggcggaggaggtcatggtgtcggtggaggagatcatggcaccggcagaggagaccatggcgtgctcgcgcggaggaggcgcgggatggccaggttcggctcctccgagaaggacgaggtggtgaggaggccgtggaggtgcgggcagcctgggagaagcaggcggcacagctggtggcgacggtaggccggcatggcgcgagatgcgtggcggcagcaacgtgaggctggcgtggcgtgagatgcgcggccggaggcagcgggaagtcagcgcggtgcgagttgcgcagccggcggcggaaggtccgtgcggcgcgaggatgcgcgtaggaggccggtctggcgtggaggcacagccgacgccggtgggaggccggcgcaagacagggaggctgacctagccaacgccacggaaggacgcaacgatggcagggaggccagagtggcgagtgtgccatagaggcatgcggtggctgtccggcgggagggcatcgggtcagcggtgtcctcacgctgatggcggatggtcggtagtggagcaatggagcaattagttgtggatagacagtgacaggcgacagccgcaaaacctagctcggtgttagttgttccaaaaaacaaaaataatacctatgaacttgaggagcaattgattatttcttagaggacgtaggataaatattgacaaaaaaaaatctcttgcccagagaaatatcaagatagaacccgtgcttacatcaaatccaatttaacttgaaaacctacctttgctcaaaatagcatatgaaatctaacaattaaactgaagtatatacacgtactaaaatcacgtgttagtttgaacatatactacaataacaagtaacagatgttcacatataacaaaccaatcaaatgaaatcgctacattttcatatgaattttaggtttacaatgaatctaccatagtccaagaatgagttagtacaacttaattatcacgaatcgagttctcatacttcacaaccatcgatcaaaacaatctggtgtgcacaacaatattgtcaggaataaatatatagtactaattaaaaatactcaaagtcagtgtaggactcgccggtgctcgagttggccgcgccgccaccatccgccgcggcgggggcggcggcggcggcggcgttctccggcggcttcttgtccttgggagtggtggcggacgcggcggcggcgtactgccggaagtcgaccggctccggcaccgacggcggcgtgaggctcctgacgagcgcccagttgacgccgtcgaagaaggggtgctgcttgatctcggtggcgcccctggtgaaggcgatccgcttgtggggctccttgacgagcaggccgcggatgaggtcacgcgcgacggcgctggcgccgccgtcggaggggaagcggagcggctgctcgatgacgttgcagagcgtggcgcggttgccggcgcccttgaacggggtggcgccgtggatgagctcgtagaggaagattcccagcgtccaccagtcgacggcgctgccgtggccctcgccgcggatgatctccggggccaggtactcgtgcgtgcccacgaacgacatggaccgcgcctccgtcggctccgcgttgaactccaccgccgccgcgccgttgagcagcaggcccatgtcgctcttggacgccttgcggctgcgccgcggcaggatgcgcgggaagaaggaggagggctggatgcagccctggttcgccggcatgctctcgccgccgtcgatggcgtctcctctgctgcctatgccgccgccgctgccggtggcgtggacggaggaggacttgacgagggtggggcagacggtgcagcggagggagaggtcgaagtcggagagcatgatgtggccgtcgtccctcaccaggacgttctccggcttgaggtccctgtacacgatccccagcatgtgcaggtactccagcgccagtagcacctctgccacgtaaaacctgacgacgcatcaaagttcaaattttcccacgtaagtttcatattttttttagatcaaattatcggacgcaagtttcaattttcagatcaaatctacaatagaatgatgatacatgaggtacaggcaatagatatattttgttgtcaatcgtgatacatgactatagataaatgtaccaaaatttatactagaaaatagtgtgcttcatggtacatcctcgagcgtaggaaaatcactcgttgatttttcaagcaactaataaggttagtattgtgcaaattccttctaaaattattctgcaaattttagcacctcctgccagggctggaaatttcccctacaatacaatattacttcggctgaaatttttaaacttttcaattttttcattaattttagtaatatttatttaaattcaactaaattttggaaatttcggtgacctccgatcaaaaggggttaaccgatggagtgaaccctgcctcctggtaccaaagttactgctgtctaaatttgttcaaacttgacggaggttaatttcctcaaactgctccaagctccgtggaaacaatttgttaaaattccgaagtggaacctgacctggcggcgggctcggagaagtgcttggagggctgcttctgccggagggaatggaggttgccgccggagcagtactccatgacgaggcagtagaacttgtcggtctcgaagtgggtgtagagcgtggggaggaaggggtggtcgaggaggcccaggatctcgcgctccgtctccgcgcgcgccatcttgttccggctcgcgatcgacgccttgtccatcaccttcatggcgaagaaggccgacgtgccgcggagctccaccaggtacacgctcccgatgtcgccgtaccccagccgcttcagcagccggaagtgcgccaggctcagcggcgccggcgcgtcgcgcgccgtcgccgcctggaccgcctcccaccggctgtccccgccggtgtgccgcttcacgttctgccccgacgccgacaccgacgccgtcgacgcnnnnnnnnnnnnnnnnnnnnnnnncgccgcggcgccggtgctgctgctctccaggctgttgctccgtgtgctgccgctgctgatgctgtccaggctgccgttgctgacggcctcgccacggtttgttcctgctgttgctgctgctgcggtcgtcgtcaccagcgccgccgtcgtctcgggcctctgcggcggcgggttcgccgtcttgtcggagtgatgattcggcttgttcttgggcttcgatttcttgtctggagatggtttggagggtgctgatcgaatgctgaattgatcatcttcttcaaagctggttcgattctgttctgtgctatttttatgagggctgaaatccatgccgtcctccatcgttgttagtttattgaaagcttgagtttctaggtaatctgaaacttcacagggcagaatgtcaaaatttgataggtaatttgagtgaaagtgtaaaaactggaaaatgaaaaaaaaattacaatgcaggtaaaactgaagaagaaaacgagtcttggagttttactctacttttggttggaattttagaagaagaatcgaagcttaatcttttgttcttctttccggatctgttaaacttagttttttttcccatgtaatggcaaaatcttacgtactcgtgactttgtttggctgtatataccccacaaaggtgcagaggccggatttaatctaatctattttttttaaaaaaaaggaaaaacttaaattaggagtagtcttagtataattttatcaccgggatgaaattgtctgagattaagaaagcttcatttatcaaaaagaaatgaaaaaaaatgttctgctactctcaggcctccttgacaagttgctagccacttgatgaacagtttaggttgattgtgcttattctttgtttattgaaatctaaaatgaatttgaaactgaacatttagcaagcttttacaactttaaatgtattaaactcataatttcgaaacttttaggtcatttgcactatggtgaatcctgtaagggatgttgaaattgcattgcgctaagactactcattatggaggaaattctgaaaggctatggctatcaacatcaaataaaaccggtaccacagcatggggaacctcattatcagaagaaaacaacttgaagatcagatagggaaatacaaacctggaatcaaatcttgataagggcttcagacaacaaataatctgaacaatgcttcatgtcataccaggaaaatcaaagctgaaagggaatgatcaaacaaaattaaggaaaagggtctcttattcgtcttgccatgcttgaaagctgcaattggcagcaaaacaggggaatgattgctttgttgggaggaaaagagtaaaaatgcgtgcagacttcgcgttgaatggttcgtggggttgagagaataatccgttaggatggagggcatgaatggaccaagaatgcacttctaagtttagtgcaaaacaagggagttattctgggtcatccatggtctctccctattcttgttctggttgggtcttccgttacagagttgattcgaaacgtgaggaattgtcaattgtgcatgaattttgggtgacccatggaaacataggttagctacagtaaaaaatttgatcatataccttctccttatatctcaattgaggaaggagtctcagcgacctcacatgacctcacatgtcaacttttttaaaatctaaacggaggttatatgatccaaatctcccaagaaggttaactagaaacaattcccctccatgcgttggtccaacgacttagacatgatatattttggttgtaataatccagttttacttaaacttgagttttgtcctggttttacgagaaattactactccctttgtttcatattataattcgttttgactttttttttatagtcaacttttttaagtttgatcagtctgtagaaaaatatagaaatattttcaacacaaaacaaatgtattatcaatatatattgcatattagttttaatgaaactaattaggtattataaatgttgctaaatttttctataaactaattaggaaataggtcaaaacgacttataataagaaacagaggtagtacataccaatattggtcgttctgttgttcacttaccggtcaagagtatcaaaggccatcacaagagttatcgatgcagttatgttcaaaaaatcctttcctggttgaacaactgtctccagagtacagacatcagtgctgatatctttttggttgatccttcttgttcaagttcttgacctctttcatttccttgttgtgacttgtgagccttctctctttcatgcctggaacctggctaattcagagaggcagcattatccagcccttcttgtttttctccatcttccttctaatatacccaatatgcagagagattccaagaataatgcatcaatgatcatgtcgttttcatccctataatcatgcgatgatagaatacctaagggtaaactgtcacattgctacagcttgctttcttgctggttactgccgccattgattgtgcaagcgaaatccaactacaatattgcagaaaaaccacttttgatcacttccattccacacctggtggctggtgttaccatgagccattttccatctcagctgaagaagtacgatgcaaggtaggcttttagcattcttttagaaaagtagccatgatggctccaaccaccataaccaccattgcaaactacccagcttttctcttcctcccactcaaagcatcagtccagaaatatagaatcaatcatcatgcaacaactccacatgagcccattacttcatcccaacagtagggttcattgctcctatgatcttattgtaacatcctctacctctagctggtagttgctcctttctctacatcaacatagatggctgtgccaaggcgagttcatgtcgtcttgtttgtgtacatcacagtgatcctcactgcagtggccgtccatgcacagagggatacctgtggtgccgagctgaacactttccttcccgcgcctttcaattcatccgcgctcctctgcaaatcagtctggaacagcttcatactccgggtaacattccttatctagccaaagttatcatctgtaaaagaaaaatgaattcaaaaaagattgttgtagcttcctaacatagatattcctgacttattgtcaaatgttaatcacaatttttaccatcaaatgtagagaaaaaggcaagaatcagcaaagttctagtatgcttagttataataaaagtatcagtgcctcttaatggtacaaaggttgtctctctgcattgtgcatacatttgtatctgaatccataatcctaatcgatcatcatcacttttgctggaatgaccgaaggaggtcattcaatgtaattaagataggaagaaaaatgttacaagaaaagttttacatcgacagctggctgtcgaggaaggatgtgcaccagagcacacgccccgaaccatatgccaaccgcccaaacacacgctacagagagggaagccaagcaccgaaccggccatcgctatgcgagaccgatcgccaccgggccaacaacaccaccacgacacgaatactctaaaacgacgccttcacgagggttgcgacgccgaaagacgccgtcgtcatccgtccaaggaattggacaaggttttcacccagagctccttgccgagggaggatgggtacctcaacagtgccctcaggagggttaccacgcctgaaggcgaagtcactgttggcccaaagaaattgggctaagctttcgctcagaaccccctaccgccgtggtccgtcgcccaatccgaaaccaccatctaaacatcggcggcacatggcttccgccacacttgaccgacgcccctccgctggccagcttccagtcctgccaacaacaggactgccaccacacagcaccgacgccccaccatcgactgacttcaacgaacctccatccctgagaactggcccaggacccttccgatccaccacccgccagtctcctcgccaattctgcccaaaggagaaccctggactgggtggcattgcttcagcaacctgggcttcccccgttgacaagctgccgcctcaatctaacctagaaactccccacaaagaaggggaggagctccaagaagggcgagggtgccgaccggcaacgaggaagacgacccactgccgccagctccctttgcactaccatctaggcctgcgccgacgccggaaacgctgccgctccgtctccggcgccacctttgtccagcctccttgcctcacctagccacgcataggccaccacgggcgaagagggagctcacccgcattggtcagcgctggtgatagccaccccgcacacgcctgaccgtacgcgtgctgccggccgccgcagcgcctccaccacggtgctggcctccgcagccgccagcctccgccgtcgccggccagccacctccgcacgagctccgccgctgcacagcggaagccacctccgcgcgcctccgtcggccgccgtcgccgcgagctgccaccacctcccctcgccggccgcagccgacgcgctgcccgcctccactggcagccggacgcagagcaccgtcatcggccacatccgcgcccgggggggtcggatccgtctccggcgtgcccggatccgtcgcagccacctccatcgaccgccgcctccgtcgaccaccgccccgtcgacgctgctccgcctccaacgccgaggaagggctccccgaggatgttctccccgccgccgccttcccggccggccgcgcggtttccggcggctggctccggcggcggcgaggcggctagaggccggcgaggtggcggcgcgggcggctagggttttctcccccgagccgcccgcgtgagggcgacgtgagggtcaccatcgatcatcatcacacaactttagtaccatatatgtgctgaatgaaagcaggatagaaataaattggcatttttgttatcaacatagctattgttaggttccttgaatactgaaagttcatactttgatcttcagataatggtgagtaatttcttctgaatgctcttcaattacaaaataaaaaattaagttactctgatactcaaatttttacatggttacttttttctttgttgtgcattgtgaacccctgttagtaacttataaccattgaaatatcttatacaaatggtagtcagtgagcaagtcagtcaaaaaataatctccatatatgttccagcaaatacttgggctgcccaagtccgttagttcttgtcccttgcacatgttcacactagtccaagatgtgaatccgatcttgtactttggttttctcttccctcgtttcacagactagtaccacggccaccaagaaaatagtggaaagcagaactattgatctttaaattgtgcaaacttactctgcagaagatatctgcgggagaattaaaattgaacactttgaaagtataatatatagccacaggtaatgaattgaaaattctgaaagcattttctaagaaacaaatttagagagaaagatattgtactagacaggaatatccaaaaatgttcagatattgaacatttcattctcaaagagaagtatctgactgtcattactgaaaaacatattacgaaacatgcacatgtttctaggaaaaaaattactggccatgtaaaatttgatattattcttctttcaacatcaatatttgtttattttaaacaaatactgtaaagtgctatgttccgctttcttcataataaaaagtcgccaaatctattcttagttcatgtggtctctgcacatcttgcagtattcaaaattgaagagtgaagataacatcaccagcattgtactttcagcaccctattcatctggatgggttgggattggtttctcaaatgacggaaagatggttgggtcaagtgctatggttggctggattgataatcaagggagagcatacatcaagcaatactacttaagtaatcagactagctcaggagttaaagtagatgaaggcaagttgctcacaacagacgttccttctgcagctgtgctctatggagacaatatttacttagtatttcaagtcaaattccctcttcacattgctcgacagtccgtaattttggctttttcgaagatatcaccaaataagttccacctcgcagaacatgatgacaaaacgactctgtcttttgacttctcatcaggtacagttatgttctagcacaactgaattggttttccattggagttttgtttttatgcttcattggtaacagactaatggtacatgctatgttggagtattgaacgcagcccaagaatcaactaccctgtacctaattccactccactggagattgataatatctagtatgccaatataaatatgtttcagctcaaaaggatgctaaactgcttgagcatgctctgttacgattaagaaatacaattatgaagattaattttcctacattgtgtatctggcgcccccacaaaacagaaaatattagaaaagttaaccaaaaaccgggcatttgcatttctgaatattacctacatatgtaaatacgatttaaattctgatctcagaaggatgcattagactttttttttgggaatacacagggagcgcatctttgtattaaggggaatatgcattagacttttgagaccgctgaacagaatctgatcagtgatacctgaagataacgccagaaaaatagaagtagaaaaattagcagagacaattttagccccacttggaatgtcacaagaaatttgcaggaacttgaactccatctggaatgcaggaatttgaactccatcacaggaaaccgttgttctacaggagtggagtaatttttacatgcaataaatggggccttcacataaatggctaaattcctggggtgtttgatagcagacagcaaaggaatagggtatgtattgagcagttgagaagagggtgatta

SEQ ID NO: 10290 - DNA, 21315 bp, Oryza sativa
ttctgtgaacacgacttgcccaaaagcgtatctgtttatatcattatatgtcacttcaaaagagagagagagagatagagaataatcaaagtgaattagatcctccaagttagcacccttgtgttgggtcttatgtttttgccagtagttttttaagggtgattgcattgatgcagtctgccattgtttccctggatttcatggtcacgactgtagcagaagtgagttctatgtctctatgctatccatccgtttatctaactatttttcttcgtcatctattaagcttttcagcacaggttcttatgtgaaaagatttttgtatgagccggaatcctttaatgaatacctagatgctagagatacatctttcttaactgattgggagttttgcagcattttattgggagtttatttatatcttgttttatgttctgctttttaggattcaagcacagccaattccaaggggtataaatggtataaatagaagaccttgagggaacagaaagaatcaccttgcttgtgcctaattgctccaaattaaaaggtaagcacatattgaatgaataattcttgttttcaaggaagtttcaccatcttaatcgggaatgtatagctctcatagcattaggtatatttctatggacctgaaacaatacactgttgtattgatgtaatatgcccgcttgtcaacttgtttgaagctgtatttgagacgttttactttagaaaatcttgataagcaatattgcgtgcataacttatgccatatagcaccctaattttatcggtcagaggataaaataataagaggagatgggtgaagtgattccacactaattaacagagtggtgttgtatagaaaccaaataataatcagttacacctactgagtttcacaaataaaaatgacagacctagctacaatgtacatctactgtaaactaaaatgcaatcttaaaaataaaatcatgtttaccttcaaaccagggcagatggattgaaattcaatctttatgcttcataaaaatattgtccctcaaataatacctagggtgacaaatacactaattatacagaaataactggagtcattgcctcatcttttttggagaaggttgaaaaaccttaggagcaatttaagtaacaaatattcattcaaactcatttccttttctaaatctatgaccaaaataaaaatggtttctttttttcacagtccacaataattgtattgtcacatgctatagctaacaaattcagtggagtgtacattttatgggacaaacggtctatgggagcactattcattttaatgtgcattttaatgaaaaagggatttaaacagctgtattatagtcactggtgtaacctgtatgctcataaaatgtgtgcatcttaaattatgttatatggaatcatgtttctctctcagaaaaaaaggtgaaacacaaatttctgagtttggtttctatactaagggctcattcggaatgcaggactgaaaaaacataggaatagaaaaaatataggaataggataggaatgcaagtgtaaaacagaggatttgaaaacataggaatttaatgtgaataggtgtggatggagtaaaggaaaaatataggaatctttagaagaaaataggtgcactattacaaaattatcacatactactagtgaattaaacaacattaatcaacctaataatgtgctttagttgcttgatggcatgatttgcctcgttcccacgcgaaaggagagaaaaaagaggtcagcatggatgtttttcttcctgtgatcttccagtgatatggctagcgcaggaaatttccctatgtatttcctacgaatgttttcctgtgatccgaatgacgccacagtaaagcaatccataggaactcaatccttcatttttcctgtgtttctcctccattccaaataaacccttagggtatgtatgcatattctgcaaacctattctgtgtggtactcatgcgtatgtatgcattgatggctaaacattttcacatgcgcatttgacagctcaggtacgacttgcagcaaacaggaagctttctccattagaaggaatcaaatcgatcaagaaggtagcgggcactcttataactgtcaaagatgcaagtctagataaatagtcatccatgtgaattgcccgttctcaactctggatttatatagatgagaatgagatagctcatttcgagagtagatgccgtgatcggttcactctattttgcttatccatttatagatagccgtcccttgtaaatgcacatttcattgaatccaaccattgaactttgactgtgaatgattgaatcatgatttcttctttttttttttggccagtcacttgaatcaggacctagcatacatattcaggtaggaggtctacgatgggcagcggtgtggtcacgagttccacaacggtgagtgtctatattctgtacaaacgacatagaaccatacttatttcctcaaatgctgttagtcttaagtatatttcctcaaatgcttatctttctaattcttaagtatacttctgaagtgctgatcctgacagatggctacctggtagctgtagcagtacttaagtacaaaatgttaaagagtataatctatttatatatctattaatttttacgatgtgagctcttcaatctggatatttctgagtttcatctatttctgatattcaaataactggagcggggcatcagtagcaaagtatgaaaactaagtctgcccgacacaacaacgtgattctgaaattgacaaggctaaccccatattcttctacactactttttttattcctgcaaactaatgctacattgttatgccgactaatgctgggagcacaggccgcgtcttaactgaacatgagtatgcaaaaactgaaggtgattcttattttctaaatctttatctcaatatttcctctaggggttacattggagcgggccaaatattgtataggtaagcattttgcctcttggctattacaagttttccgtcttatatatgtatctagaagttcatgttgccgtgcgctgcttttacgcatgctgccatgtacacatgtttagttttagtaaaaataagtaaggtttcattgcacggtaagtattgtttacaggtgtgcaaattgataggagctaattcatgcaatggcttctaaacataatgttacttgataactaggatataaattaataattacatggaagaactaatttatatctataagttgctttcaattttaccatgagttagtatgtgctaccataatccttggaattggagggtttgtagcagatctcatcagttgtaaggaaagtggaaaaagtttatttggtcagtgttaagctatcttaccgtgcaatgtacattaggtaatgtatgctgttaacagttatttttgttgttaaatccaatccattttcttaaattcaataaagtattgatgaaacaacttagatgcatccaaacaatgctagcaatgctcttaatggggagcagcaacctgaagggtagagtcacccatatattctggtatattttttataatggaaatgtgttaaggggtaaatcaacatgtaccagacctttagataattctgtatcatttgcctgcacaatgcaaatcatgaaaattttgctgtaatttttatcattaatgcctttcaggaatttaggatgagttcaggaagtcataagattgatcagaattactaccacttatgccattaggctttaagtttatatggaaggggtgtggattggcagcatgcgttgaataattcctcctaaggccacaaaacaattggccttcccagtttgattgattggtggtccaaggatgaaaggcaattacaattttgtatatggagttttttctttgaattttcagtatttaccatttttgtcattgatgagtaaatgatagtacgtatcatatattagtgatagtgagattcagaagccgtacgtgctagcaatctcaacatgtgttcctcgattcgaggagcgacctcgatcgttgtctgtgttttcactgtcttattgacttggcaatggatcaacaatgtaacaaaagtactttgtgtgatagatattttattaatcattttaggttatgaactaccagaccttacagataccatattctagacaaaggtgatatttacacaatgcatgtagataaacagattctgtgcttataatatgctcaattcaatttatattgatcacaacgtgcattgtacgtgcacgattactagtcggatcttgtagttgtagtttttagagtttattgtcttgttggtgttgatgcaaaatacacactgacctgggagattgtcacgtccggaatttctatccaaaattccaaacgtttacatgtgtattaaatcctcgtccaagaattaactgaggcatacaataacaaattgataatagagtactatcaaacaattattaatactcgcaaaataataaattattacagaggtggatagttactctcaaaagaataaaattatacgcagcggaaataaaaacaaaagacagaacagctatggcgactccactccacgagcaacttgacccggacaaagcctaatcctccaaaccatcacctgcactaaagtactcctcctctgacgaatgaatattgtaaaaatgagcatatgacatactcaacaagccacacagcaaatatgcaagtgcacaggataacaaaggatagcataatacagctcaattgcataaacagcatttaattaacatttgagagaatagtaaaacagttaagtaattaagcaatattaaataaacactatacaacacacccgtgttgcataggcccaacctcatctgaacaaccaaccccggttgtacaaatcaaacctccataccaggaatataccattccaaaccaggagtcaatttaattatcacagtattatcattaatagtgagtagtgtgggactaatcacgaaaaacattgttaaacccacccataaccgcaagcacggctattcgaatagttttactctagccagagatgtaccactgtacccacaagacacaactccacaacatgtcaccatgcgcctcagtaccaccacagtaccttggaaaggaactgtgacaatatttctcacacaacacaactcaccacagtgcactgttcctggatcataatctccccctcaaaaccagaggcaatggactccccagcgacccccacggacttctcgccgcttctcagtctggcaccccataatgaatcatgctatacaaaaggtaaagccattgcccacgctggcttgtggttggcatggtaaatgtttcacaacagtagctcgcgaaccggtccttaattgtcatgagcatgaccatcaaaaccatatgctcacaacccacctttaatcaggttttaattatcaattaattatcataacacagttaaccatcgtgagctaccattaaatataaccataattaataatgtagtatgattcatcccattaatgagctaatattcctaagcatggctaagcaattatatatagagcatttagctgaaccaatccaatatataaggtccaagctaatcaatttattacccataggaaaataaagtcatcttcggccattaattaattggaaaaggctcaccacccgatgacattcgaaaataatgcataagttgaaataaaacattagctttaaacgggttcaacatactcaaagggttgtttgggatctatgtgactttccttgagcttcttcaaacgcttctgaaccttcctcaacgtaaacgctctcctccggaatgtcggaaactaaagcaaatgaacaaaatcaacaaaacagtacaaaaacaagcataaacagtacatttggatatttttgacatgtagatctcgattttagatgaatttagcaacttgaaccactcgaatccgagttacgatgatttagttatgaatttccgaagtttaatcgattttcaactaatacagaaaattattacgaattaaataaaggattgatgacgtcacgatgacatcatcgccgaccatggcactggacgacgcgaccaccagcgatagagggctcggccgggctatccgaggacacctacgcgaagaggacgacgacgcgaactcaccggtgcaagaaataacgaagtacggcgtccggtgacgaggaccaatggcagctcggctcggctcgatgtcgacggtggcgctccggcggtctttggcggttgcgaaggggcggacggggtgctcctccaccgtgcgaacccggtggtggcgacggacggcgatggcgacgacgctggcggcggcgcggcgcggctggagcggcgtcggcggcggcggcgctagggctacgcggcggtggcactacgggcgacggcgaggctcgggacttgaggcaaatggaagaggatgactaggggatgctatttataggctcggattaaagagatcgaactccaaacgagaggaatcgaagccgaaaaatcctagggttagtttggagagataaactcaaaacgaattcgattcggtttatccgggcaaaattgatctccgaaactttagggaaaagggagaggataaggaggagatgatttcccctcaagcaatcgaactcggagatggccggttggggcggaatcgaagaggaggcggtggcgctcgggctcggctcagccggccggaggtggaagaaggccccgacatgtgggccccacatgtcggcggctgagaggagagggtggggcggcggctcggcttgggccggcgtgggccgcacagctgcgcgcgaagagaagagttgggccggaaacggcccaacggcctaggggagggttttaaagactttttcaattaaaataattcgtgaaatgatgtttcatttattaaaaataccttccttgttcaaataattcccagaaaaatctagaaaacagataaacaagcaaagtatttaatgaaattttatctagctcaattttatgttgaaattttccctagattattagagttcaacttgtaggcttttaaaaaaataatttctaaaaatgcattaataattgaattattaaattaggcgattttcaaggcatgacagagatctggttagctccagtgcaggtccaagatgttgatgagatgcgggcgtgccagtcagtttgatactgcaactgacaagatatgtaaacagcaaataaaacagccgatcggctgacaagccgatggagtaattccagctgatagctgatattagctgatgtcgataaggttttgagcaatcggctatatgtccaatgcagataattatataaagacaattgaccgatgataataaaatataataataatataatccaatagaaaccaatcgataaataataatatgataggataatgtcacgtccaggaatttagcccaaattttcagactattttgtgtattaaatctctgtccaggaattagccagggtacacaaaacgacaaattaatatacagatccaaacgtaaataaagagtaaaatacttacagaagaggcacttagtcctcacaccgaaacaaaagtagcggcagcggaaaaaggcaatcctagcggggcttcagctccactccataggcaaaactcaactggggtctgagtcttggtcctctaacatcgtcttcggctcagaagcactacacttttgaaaagggggaataatagcaaggctgagtacaaccaccatattcagcaagccacaccaatgatgcagacgtacaaggggatacaagaagggttgtggctatttgcataaaggcggttgtaaagcatttattgagcaaaacagtaaaactgttgattagttaaggtaatattatatctccactaaacaacgctacaccacgttgaataggcccaaccatcccacctaaactaaccagtgcattgagtcgatttattaggggtaagactaatcacggtgaatctgatcgatcgctcataaccgcgggcacgactattcgaatagttttactctggccagaggtgcacaactgtacccataagacacaatccaccggcatgtcaccgcgcccggccggacatatcacaatgtcgagtgattgtgacaagaccattcatataactccctctgaccaagcacaccacacttcaggtttcgccctcactcctcaacaggcagcgggcagccccttctcgtgtctaggcgaatcaacgagccgcaaaggccatcgcagggcccatccgaactccatcacgctcacccttgcctggatgcatcagccggaggaaagctatactacagatcaagcagttacccattcccgcttctggtaacgttgtatgtcttctagggtttcccacgaaccggtccttaaattgccatgggcgcaactagcaaaaccatacacccacagcccaccactcagttgtattttagttggataattacgaccaatgaaacatggccggatgtcccgagcatgcagctcatcatgatactaagaggtctaatattgtaattatcccattgtgtgatgaggacctacctagctcctcacattcttctacaactgccactcccgatccaacaatctccaatgcgtataagggacctatcacacgagcacgtgcacgggaaattcaaaataaggtgaatatgttcctaagtactttgaattatgatattagtgagcataatttactacctaatagttgctcttttcttgtgctcagatttgaaggaatgatatcattggagaccgaaagacaagaggaagagctctctgatccaatattttgtttaatggcacaaacccataccaatattaccgagagggaggtgtggagggatggcaccagcgacaagatagaaaaaatcagcaccaacaacaaaggagagttgctgtaccggaaaactgaagataagaaggagaaggcccaactcggactcgggtagcagtctgaggttgccatactaaaagaggcccaaatcagtcatacggactccgattgggttgtatgagcacttgttggaaagataacttcaagcccgatccagattatgctcatgggctacaagactcgaagcagtcacatcacaatcatcaaaataattcgtgcctgtaatatgtagtttccaaattgactcctagtttgtttcctagtatttgaattgtatgtaaggccttgttgtcacgccctgaagttcccctcccttgctataaattcataaaataaatcgtccgaaaaaattggttcaaattaacctagagttgaatccttaattaataaacgcaaataataatcggaatcggcatgtggaatttttcttggattctacatgtcaaaatatgctaacatgatttttagtggaattttcagagccttggaaataattttataccaattaaaaatgagcatatgctttaaaaaaatccctaaaaatccttttattttcctttttccctttttccttccttttttcccctttttttttctcctttgggccgtcggcccattccttcctcctcctcccgcgccctccctccttgttgggccggcccgcgcccctttcttcctccctagggtcgccgataggtggggcccacctgacggtcgtctcctacctccggccgttggagccggagccccaactgcccacgccgccggcgccccacctcctccactctgccatcccgcgcccactccgccacccgcctttcccgcgcccacgtcgccgtgacgccgcccttgccttcccgcccgcgccgcgcgcccacaaagggcgggattcgatttgaatccctcctaactctctccccactcccccacgtcgccggccaaatcaggggggtttcccggctgtgtccgcccctcccaagcccctataaagcttccccacaaccccctctctcgtttccctcacttgccggcctctcccgagctctccaccgctcccgcaccgtgcacccacccgccgccgactcttccactactccggccgcctctagccgctgctagggccgccactgcaccacaccaccgccgccgtcgggttcgcgcggccgaggtccacctcgtccacctcccctccgtcgagttccaccgccggagcccgcttcttcccgcgctccggtgaggttccaccattgccgccgcctttggccatgttttcctctcgccgtggaccacccttctccctctaatccctcccattgtgttccctaggtggttccggagctcgtccgcccctcgccgccgtctctcggtcgctcatcgtcgctgttcgtcgtcgcctccctccggccggccgaacacctcggtgagaaccccctccccctttccttcctctctctagcgccgccgctcctcgcatccgcgccgccgcgatgcgccgccacccgcgtcgccggccacccgggtcgccggccggtcgccggtcgccggtagccggacgccaccgccgtgcgccatgcccgggccggcttggatgacgcccatccccagccacccgatctgcctttcggcggatcgtggccgtccatcctgtggcccgcatggccgaccacgtggtgccacgtcggttccacgtgtgcgccacatggttcacctctcctcggtcccgtggactcggtccacagtggaccggcgcccttgagtctatgacaagtggggctcatctgtcggcgccaccaccctcccttggatgatgtcagcagggacctttattgcgcaataattaattaaagactttttcttttatagtaataaacacagagaatcttctaaaattcataactaattcatgcgagctccgattaagtccattcaagtctcagtaaattcataaaaatgcatagaatccattaaaaatggttgtgtttcctgttttagtagacttataacatgttttgcttgtgtgctttgtttgtcgcgtagatttcggccgtttcgtcgatccacggttcctcgaagacgttgctgtggtctcatcagtgcgagagcaaggcaagtcatgcattccaattgatcatattgtacccaatttacaaatgtcccgtatttctattaaatgttgcattcttttacaatatcatgtgggatgggtcctactactcagccatatattgtttaccttatgccattgataacttgggttttaaaatgactagatgttggtttaggaaatggttagccatgcttagttcaactagtacacaaagggggatcacattaatgcatagactttgattattggtatagctttggattaatgccaccgtaatggtgttagttaattaaaatacactacatggtgggctgtgggtgcatggttttgctagttgtgcccatggtgattaaggactggtttgcgggaaaccctggaagaacttatcgtacttaccacaagccagcgtgggcaacggctgggcttgtagtgtagctttcctctagccgacgtacccaggcgagggtgggcgtgatggagttgggtcggccggggtgtccggttgatcggcttctggattcaccgcggcacgagaggggggctggccattgcctgctggggacgggggcgaaccctaaggtgtggtgcgatcggttagagggggttatgcgaagggtcctgtcacggcctctttccggtatgtcgtggtggcatgtcggcgcacgaaaacgtgtcgtggggctatatcttgtgggtacagttgtacacctctgatcagagtaaaactattcgaatagccgtgcccgcggttatgggcggtcgaccagattcaccgtgattagtcccacccctagttagctaatgaactggtgtagttcaggtggttggttgggcctgttgcaacgtggtgtagcgttgaacagtgattggttaatattgattaattactgcaactgttttactgctttcaactactgcttttaaatgctagctttatgcaaaagaacctttagcctcccttggatatatcctgcatcataccttctcttccggtatgacttactgagtacagtggtagtactgtcttgctctcttttcccccacaccagagttgaagttcttctcagttggagatgtctcgaagaagttagtttcgtcgctgccgtcaaggatgcctgtggaatggaattgccgctgcaggagtcaagtcttcaggcttagctcgcttttatcttttccgctgcatttgtaatcttttatatttttgtcagacgtggatctgtatgtcaacgattgtcgtttgtgtaccctggctggtcctggacaggggtttaatacacattcagcttagaaattctggttcgtgaatttctgggcgtgacacttgtgctcgactagaaaggttagaccacatttattctaatgaaaattgcagcaaatttgctcttgttcttctcctaggttttgtgccgccgctgccaaactagagagagggattgggagttctgccatagattgttcttgcttttccttgcagggaattgagagggcaatagatccacttttgcgtggtcaagtgtatcaacctatcaaagcatgtggttttgcgaattcatggtgaaaggtgcgttgcacgggcagcgtgttgttcatccagttcgtgaggtttcacggtgtatccggatcctacgtcgagaaggtcaggctttccccatatcatcttggtatcagagcacgattgtctcggtaggatcttttaccctagctacatattttatttctatcctatacacaaaaacgctaaaaaaaatagcccatagtttgcaatctggttctagtgttttttttgttaggttttaatccattagacttgtgtttggttgctgatcttagtgttccttcatgttacacttgagcctatatcaatttatcttgtttgcttgattttgtttcttgtcgcgttctgaattttcagtgcatatttcgttcagtaaaatagtcatcaaagttgcatagagggttggaaatcagtgtttaaatactttttggaaagagcacgtggtgtcctacaaatcattatctctggttgacatcttaattcggccattatctgcgtgtttcggacacaacaaagttagtggctgttctgagttttgtttgagtcttatttcagtttgtgtgctagtccatatatcaataatacaaaaaaaaatagtgagcctattctatcctttgcgaatacttttgaacccattgagactagctgtaggaagttgcttttgggctttgcacggttgtatttttacagtcatacccgtattgttcaatccggtgtgctgatcgtagtggcaaaaaaaaagaagtataagagttcaaaaaaaaaaagagaaagcaaaaaaaataacaagaaggattaaaaaaaaaagagaagtgctgcgtcaccacatctattgtttatttcagaagttagtctttatttgttttgtgcaaatctggtagcccaattcagattttgagcaatcagctagcgtcactccttgtacttttgaaacatgagcttttgatttcatatccattttgtgtagctctcttcttggttgcataggtcccattatcgttgcgtgtgagtgctgtacacttcatttatatcttgtgattagcaactaggcattttgttctagcttggattactacttaacaagaaaatatcttgaatttagaattgctaggaccaacacttagccctccaagctccacatatttactacttgtgcaattgctcctgaactgtgaattcgcctaaccatcacctttgagttgtctactaccatcagggtgtaatcagcccctcatctcaagaaaggaagggtaagaacatcaattggtgggtgtagttgagagattccacaattttttttctttctattcgctgctgcatataggaattttttcataactaaccatggcaagaataggagaaactgaagatgttgaagaggatggtaataacaatgaaccaatcacccgtctccaatacaatgcattaagagatgtgttgcgaagggagatgaattccaggatggacactctagaggggagaacagatgaactatcacagaagttcgaaaagactattcaagattttgaggtgcaagtgaacaacaatatggagcaattgaggcaaaatattgttcaagatcttgaacatcttctaaggcctgatgttgaggatgatagtgtccatggatccttacttgatgagacggatggtgatgctgctacttgtgagaaacgtcaagcacaacaaagacgcaatattgctgctgcacacgccatgcgtccacatgggcgtggacatggtaatggtggcaatgggaggggccgcggccgtgctggtcgtggccatgctatcggtgcacatgaagatgatgttgatgcagacttcgcgttggatcaagattgtcacgcccggaatttctatccaaaattccaaacgcttacatgtgtgtgaaccctcgtccaggaatcagccgaggcacacaataacaaattgataatagagtacaattattactctaattaataagcgaataaaatgtcattacagaggtagatagttcctctcaatcaataaagatctaagcagcggaaaaaataagataaacggcgcagacgactccactccacaggcagcttgaccagggctacacctaatcctccacaccatcagcatcactgtagaactcttcctctgatgaatgattgcaaggtgagtatatgacatactcagcaagccacgcagcaaatatgcaagtgcacaggataacaaaggatggcatagtagggtttcatttgcataaacagcaattaataaacatttcagagtttaataaaatagttaagtagtaattaaacaatattaatccaacgctatacaacataccctgttgcataggcccaaccattctgaacaaccatcccggctgcacagttctatctccaaaccaggaatataccattccaaaccaggagctaatcaaattattaccagttatagcatcttttattatggtgagaagtgtgaaactaatcacgaaagacattgttagacccgcccataaccgcgggcacggctattcgaatagttttactctggccagaggtgtaccactgtacccacaagacacagctccacaacatgttaccatgtgcctcaataccaccatggtacctcggaaaggagctgtgacagtacccctcgcacaacacaatccaccacagtgcaccgttcctggatcataatcacccccttataaacaaggcatggactccccagcgaccctcgtgggcttatctccgccacttctcagtctggtgctccgcaatgaaccatgatatacaaaaggtaaagccgttgcccacgctggcttgtggttggcacggttaatgtttcacaaccgaaactcgtgaaccggtccttaattgtcatgagcacgaccatcaaaaccatgtgctcacaacccaccattatcaagttttagttggcaatttaattaattaaccaatcacgattgaccatcgtgagctatcattaagccatcattaaataatagtgagtcataagttatcccaatagtgtgctaatgtttctaagcacggctaagcaactataaataatatctagctgaaccaatccaatatataaggtccatgctagtcaaattataacccataggaaaataaagtcatcttcggccatagttaaatgggaaaggctcaccacccaatgacattcgaaaacaatgcataagttaaaataaatcaatagctttaaacaggttcaacatgctcaaagggttgtttgggatctgtgtgacttgccttgctggccttggaactcttcaaattcttctcctgcgaaaacggactctccggaaacgtcggaatctaaagagaaaagagcaaaacaccaaaacagcacataaacaagcatgaacagtatatgtggatatttttaacatgtagatctcaattttagaaaaatttggagacttgaaccaactaaatccgagctaagatgaattagttatgaattttcaaagattaaatcggattaaatcatttatttagattttaattgaattatgacgcaataatgaattatttttgaaaaggaaaaaggggtttattgcgtcagcggctagggttcgcggtgaaccgggtgcatggcggcggctcacggaaacgaacggccgagattgatccatccaaaacggacggccaagatcgatcggtccacggccagaccacgagagacgacgacgatgacgtcagcggtgacgtcaccaccggcggcggctcgggcgcgcaaactcgccggcgaacgacggtgcgacgacgcgaacggaggacaccaacacgtagagggcgacgcggcgaactcaccggtgaccaaaacaacggcggaagatcaacggacggcgacggcatcgaggaagaagcggcggcaaccttcggcttgacgacggcgacagtcctccgcctacggcgacgacggaggggcggacgaggatggcgacgagacggcgaccacgacggtgacctccccgagcgacgacgacgacgggagcggcggcggcgcatggctggacgaacggcgacgacggcggcgctaggctacatggtgctagggctctaccggcgacgagaggcgaaggcgagggtggcggcaggtagcggcgggcttgggggtccttttataggggcaaggaggtggcggcgaaggcccacggcgaccggcgacatgaaggaaagtctagggttcggaggagagagatcgatccgaatcgaactcgaatccagggatttccaaacgattctagccgacgattccaaaagagaaaaggtagaggagatcccgaagatcatttcccctctattgatttcaccggagaaggaaaggcgcgagcaaatttggaaggagaaggcggcgcggctcggctagggttccggccgggagacggcgcgaggaggacgacgagtccgacaggtgggacccacctgtcagcggccgagcgcgcgcgcgggcggctgcgggctgactgggccgaagaggagagagagggaatgttttgggccgactttcggcccaaagccaaaagaggattttaaaaacctttttcaatttaaattattcattaaatgcaattccatttattaaaaatacttccttagctcaaataaatcccagaaaaatctaggaattatagagttaagcaaagtatttaatgaaattttatctggccccattttatattggaatttattaattaaaattagatcttctcgtctaggcttttaaaataaattctaataattccaattaaacaacattttatatatttaggatttttagggtgttacaaagatgatgggcaccaacggcattgtgctcgcaatggcgagcgtgaggacagatttggaaaactcaaggttaccataccaaaattttgtggtaccaatgatcctgaggagtatctcacttgggaatttaaggttgataagatatttcgtatgcgcaactacacagaagaaacaaagctacacatggcatcacttgaatttgatgagtatgctctgatttggtgggagcaaatgctgaaccaaagggaggaacacgatgaacttgctgttgctacatgggtagagatgaagcatgagatgcgtgcacgatttgttcctagtcactacaagcgtgatctttttgaaagattgcagaatatgaggcaaggaacacgctctgtagaagagtactacaaggagatggagaaagccatgattcgagccaaagtgaaggaagatgaagagcaaacaatggcacgtttccttgttggtctaaatcatcccgtcaaacgcatagtcaatttttagatatacaacactattgtgcaattggtgcaccaagctacaaaggcagagcatcaagtgcaagaagatgcaaaggtggcacacaacacctcatttactactcgctctttgtccagtgggggtagaccgaccccaaagtttaacttgagcaagaacttcatctccagcaactctccttctctcaatttagcaagtaagaaagaggagagtacacaaagtgcaagcaagaaatttgttgttcctacaggtagcagcacctcttcggtgggttctacaccaaagagtagcaatattcagtgcttcaaatgccttggacgtggtcacatgcagaaggactgcccaaataataagacaatgctgattttggaggatggtgaatatgaatcaacaagtgaagataaggatgatctagctgctgatttgacgcattttgatgatgctcaagaggaggatgaggaaaatggtgttgtgtattatgactttgaagagggaccttcacttgttgttactccaaaagttttgacggttcagcccaagattgatcatgaacaacgatgcaatttatttcagaccaaggcaaaagttgatggcaaggtatgcaaagtaatcattgatggtggtagttgtcatagcctagctagtaaggagatatgcaacaagcttggtttgaatctggtgcgtcatcctcatccgtatcatgtacaatggtttagtgattgtggggaagtgaagatacaattcatggtgcaagtaacatttcagattggggactattgtgacactgtggagtgtgatgtggtgccaatgacggtgtgtcacttgctgcttggtaggccgtggcaatatgatcgtgcggcgcaacatgatggccgtacaaatcagtacaagttgaggtggaaagaaaaggacatagtgctgcgacctatgactccttcacaaattataaatgagaattgccaaaagctagaagttgttgttcagagtgataaaaaaagagagcaaaagattgttatccacaaatcggtgagtgagagccacaagccaaaacaaaatggtaaaaagaaaagtgaaggagagaagcttgtgatgttagccacaaaatcagaaatgagagaaatgagagatgatcccactatgttgcactttgtcttgctatacaaagatgcactgatttctactaatgagttaacatctcttcctagtgtggtctcatgttttgcaggagtatgatgatgtgtttccataagaaatgccagctggtttgccaccaattcgtggtattgaacatcaaattgacttgattcctggggcatctcttcccaaccgtccaccttatcgtaccaatccagaggaaacaaaagaaatttagcgacaagtgcaagaacttctaaacaaagggtatgtacgtgaaagccttagtccttgtgttgtccctgttattcttgttccaaagaaagatggtacatggcgcatgtgtgttgattgtagagcaattaatagcatttctgttagatatcgccatcctattcctaggcttgatgatatgctagatgaacttagtggtgctgtcatattctctaaaattgatttgcgtagtggttaccatcaaattcgaatgaaagaaggggatgaatggaaaattgcctttaaaacaaagtttggattgtatgagtggttagtaatgccttttggtttgactaatgcaccaagtacattcatgcgtctgatgaatcatgttctaagggctttcattgggaaatttgtggtagtgtactttgatgacattttgatatatagtaaaacaatggaggaacatcttgctcacattcggcaagtgctagagatgcttaggtctgaacgcttgtttgctaactttgaaaagtgcactttttgcagagaaaaggtggtgtttcttggatatgttgtttatggacagggtgtataagttgatgaatctaaggttgaatcaattaaaaattggcctacacctgtgaatgttagtcaagtgcgtagttttcatggccttgctggtttttataggcgctttgtgaaagattttagcactattgcagccccgttaaatgagttaacaaaaaaaggtgtatcttttgaatggggaaaagcacaagaggatactttttgtgagctgaaaagaggctaactgaagcaccattgcttattttacctgatttcactaaaacttttgagattgaatgtgatgcaagtggaatcggtattggtggtgttttgatgcaggaaggtaagcccattgcatattttagtgagaagcttggtagtgcacaattgaattaccctgtttatgataaagaactctatgctcttgtacgtgctttggaaacttggcaacattatctttggccgaaggagtttgttattcattctaatcatgaagctttgaaatatttaagaggccaagctaatctgaaccgtaggcatgctaagtgggttgagtttattgagtcctttccatacattgtgcgatataagaaaggaaaagagaatgtggttgctgatgctttatctcgcaagagtgtgcttttgactcaattagacgtgaaagtttcaagtttagagagtttgaaagaattgtactctaaggatagtgaattttcagatccatattctaagtgtttggatgggaaaggctgggagaagtatcatgtgcatgatgggtttttatttcgtgctgacaagctatgtgttccagaatcgtctgtgcgtttgcttttgttgtaggagtcacatgcagtaggtttgatgggacattttggaagagaaaagacctaaatgctgctatctgagaatttctattggcctaagttgaggcatgacgttgagaggtatgtgcaaaggtgtgtcactagtcataaagcaaaatcgaaattgaatccccatggtttgtacactccattacctgttcctaatgcaccttgggaggatattagtatggactttgttctaggattgcctaggacaaggagggggagggattcaatatttgtagctgttgatagattttcaaaaatggcacactttattccctgtaacaaaagcgacgacgcgtcgcatgtagctgacttgtttttcagggaggttgtacgcttgcatggagtacctcgcactattgtatcagatcgtgatgtcaagttcatgagttatttttggaagactttgtgggctaagcttgggactaagttgttgttttcaacgacttgtcactcccaaattgacggacaaatggaggtggtgaatcgaacactttctatgttgctgagaatgatgattaagaagaacttgaaagaatgggaagattgtttgccacatgtggagtttgc

SEQ ID NO: 10291 - DNA, 15060 bp, Oryza sativa
cagcgtggcaacggcagccaatgtcactgccaactccggtggtttcctcatctggctggcactctaccttgtaccctctccccgctccattcccaaaggcggccggtggggagaaaggagcagcgtggctacattcactatgaaaggctttgagcaataaacaggattaaccgaattcggtcttgccttttcctaataacaattcattccttgagttttgactaaccaaattttgattgaatgcgcacccgtagacaggaatcaattatatagccaatttatttactatggcactgtaactaaacactttctctgaaagtttcctgcatgcttggaaccaagaatatatatatatatatatatatatatatatatatatagctgttagagaaacattgatcccaattgttgtaagtagaagtacatcactgaaacacatgttcaacagaacaatttccaagacaagctcatccctgaatcaaaacttacaatgacactcatggtaaaacgagcctgatacaatcacataaaacaaaatcaattgcgcaggataaacattgaaacaggtatgaacatgaactacgagaatcaatcaaaacattgaagataaaatattttcttccttcataacataatttgtgcaattgtcaagaatcaagcaatcgtatcacaagataattcagatattcctcaaatatgattcttaatgagcttacaaagttacaacttacaaatcaacaataatgaatggagtaaccatcacctcggttttgtcgataggcaatataattggccaggtgtagaagtcatgctgccttctcttgatcaaatcctgaaaaaagttgttcccttgcatcagaaagcaacttttctgcaaacccccgtgatttctccagcccaagtaatttcgggtatgtcgtcttgtcactcgccaagtcctcccctgctgtcttgccaacctcctcagaagacttggtcacatcaattatatcatcaacaatcctatcaacctcgcatacatgcgcaaccgttcaatctgctcataagagcaacctcccaagattgccccaatatccattgatgcctcaagaatttgatgcctattcttttttctaattaaaatgttactaatccaaccaagacaatgtaatctcttcagtaaaattgtgcttaagcagctgtgagatttgagcctaaatgatatctcgagttaaatcttgttacttattttcaagtattataccacaagagggagaagcaaaagcctcacctcatggagagaggagcggcgtggctacattcactatgaaaggctttgagcaatagacaggattaaccgaattcggtcttgccttttcctaataacaattcattccttgagttttgactagccaaattttgactgaatgcgcacccgtagacaggaatcaattatattaccaatttatttactatggcaatgtaactaaacactttctctgaaagtttcctgcatgcttggaaccaagaatatatatatatatatatatatatagctgttagagaaacattgatcccaattgctgtaagtagaagtacatcactgaaacacatgttcaacagaacaatttccaagacaagctcatccctgaatcaaaacttacactgacactcatggtaaaacgagcctgatatagtcacataaaacaaattaattgcacgggataaacactgaaacaggtatgaacatgaactacgagaatcaatcaaaacattgaagataaaatatgttcttccttcataacataatgtgtgcaattgtcaagaatcaagcaatcgtatcacaagataatttagattttcttcaaatctgaatcttaatgaacctacaaagttacaacttacaaatcaacaataatcaatggagtaaccatcacctcagttctgtcgatataggtaatataattggccaggtgtagaagtggtgctgccttctcttgatcaaatcctgaaaaaagttgttcccttgcatcagaaagcaacttttctgcaaacccccgtgatttctctagcccaagtaattttgggtatatcgtcttgtcactcgccaagtccttccccgctgtcttgccaagctcgtcagaagacatggtcacatcaagtatatcatcaacaatcctatcgacatcgcatacatgcgcaaacgttcaatctgctcataagagcgacctcccaagattgccccaataaccattgatgcctcaagaatttgatgcctattcttttttctaattaaaatgtttctaatccaaccaacacactgtcatttcttcagtaaaattgtgcttaagcagctgtgagctttgagtctaaatgatatctcgagttaaatcttgttacttattttcaagtattataccacaagagggagaggcaaaagcctcacctcatggtcgcaatcgaccatctactgcctgttgccaggacgcgagctgcacgatccctgcaaaaaaaaaacttggaatagagcggtcgatgagtcaaagggggagttctttggtttgggggaaattttggaatagacctggttgttgatggagctgacggcatcgtggtccctccaagcgaagtcgtcggtggggaggacgacccgccgagctcctacaggaaggcgcggcacaacgtggactgcggaagggccaagcagacagtcagtacgcgtgctcgtcggcgtccctgtaggacttgcacgaagctggcgaggtggtgctccatgttcagctcaagctcgttgtcgccgctgccgaccacccgccggatcagcggctcctcctcctggttggacactccacgcactgccggagacaccggaactcaccctccaccgcagaaggcttgatccggtggggggagggcgaacgaagcggaggcaggatccgcgacgaggagggcagccaccggtggtgtgacgatacggtggccgggcgggaggaggtggggaatgggaagcgattgggggtaggtgtggttgtttttcaataaaaccccttgtgtttattatgtttacaaaacggaattttctcttcttcttcgcatagtatttctctaaaggataaggggtttttggggaaaaccataacaggctgtcaggcaattcgagggttatatatggacaagcagttttttttttgcaaaataaccagatcccacgtggcatacatgcacagtgaaaacgggcaccagcggtggaagaaacagtcacgcggtatagtcaaaggcaagattaacagtgagattaccagcaaaccgcattttcccggtcgcagacacgctcgtgaggagccgtaatcacaagacgacgacgtgtaaaaaaatgaggtagccagaaaaaaattcaaaaaaaggagaaaaacagtacggttaggggagttattgattgattgatgatccatccacctacccctccgaagcacatcttaattcttgacaaggaattttgttggcacatctttaattcttgacaagaatatttttttgtcatcttggtgcacgggtggcatgagtgtcacaacctcatttttttctcatacttatacttatacttataagccaaaatttaaaatttaaaaagttattttagagtttattttataacatttgtttttaaattactaagaacacatatataaaagtcttagttacaaattattttttgttgctaataaatcagacggataaacatacgtataaacaaaatgatgggctctatctcctgaaagtttgtagaaaggtccttttcaacaaaacggcggggaattgaggaatgatttatacatgaaaaattcatgtagtgtattttaaaacggatggttgattaattcattaccattctcacgcaacatacctcatgtttgaaatataataccaaaaaatgtgacaacatgatgatttggagaatttgaaatcttatgggcgaagtgacacgccatgtggataataacataacaaaagtcatgtttataagtagaaaggctattataatttttaaatatattttttcaatataaatttgtgcattttaagcgtatatattttccgcggcaaagcgcggaggtgtcgtctacactagcacgggttcggtgatctgtaacgggctgcaagcctcatctctattgggtagggccccgtcgcagagcaaaggtcgctgatgtggtaaaatatctcaatcgggcatccggccatcacggatgacacacatcttaatcgtgccaacacaaaaacccgtcacggatgactctcatctctaacgggcctaaacgatagcccgtcacagatgactcacatctctaacgggtctaaactatagcttgtcaaggatgagtataatccaaaaaaaataaattttgtttttttctagcctcatgtgcctctcataggccgggctagtcttttctacacactttatcctcactctgtgcacccgggacagtcatccgtggcgggcgccaacttaagacccgattgagatatgaaatgttatctcaatcaggtctaaactacggcccgacactgatatgtgtcatctgtgatgggcctgagttttatgcccatctaacatgtctatacgaccatatctcaatcgggcattttttcgacccgattgagatgactttcttgtgatggcccgctaattctagaaatgttacaggcctcagatatggaaggttctgtagctataactagttagttcgactacgcgagcagccaacactaatgtgtgtggatccgccaggaccaagctgcctctgagacgaaattctacaattgctccgtcttgcagcaactgcctcttgagtcattaacatgacggcggcctcacaggttgttttgctcctccgctcgagagcgttgtggttaatcagttgatactagggatgcctgcttcggttcagtattgtggagcaacatataacttcctggtctaggtattactcccttctttcctaaatgtttgacgccgttgacttttttaaacatgtttgaccattcgtattatttcaaaaacttttatgaaatatgtaaaactatatgtatacataaaagtatatttagcaataaatcaaataatagaaacaaattaataattacttaaattttttgaataagacgaacggtcaaacatgtttaaaaaagtcaatggcgtcaaacatttagggaatgagggagtatcatttttctaggacaacattcaattcacatggtagatataaattgagtgcaaactgtagagggtggaaacaaagccttcaatatccctgtccctagttaacactttggttctcctccatgtaaatattttaggcatagtagagagttcctcagacaacacatatggtgcctccctgagctatgtattcagaaatgtcgctcacaaattttcatttaggctggttttcatggctttgctttttagggatacttccatccaccatagaatcaaaagtgataattattgactgcgtgttaagtagtgagttaattagcatgagaatggaaggcattgggatgccatactatccagaaatataacatgaagctagttcaacccaattctttctgcacagccttatgcggtgtgagatacgcaatcaaagacatggattgctattgcgacaccaaagtatgttcgtcaacaacatgcaaccctatagcatccaactaagggtgtatttacttcacgctaaaattgaaagtttaattaaaattggaacgatgtgatggaaaagttggaagttttgtgtgtgtaggaaagttttgatgtgatggaaaaattggaagtttaaagaaaaagttgggaactaaacctctaaaattgctataaagcctggtttagttccaattttaaagaaaaattggaaaattgcaggtcaactaaaagcagggccatcttagaggcctaggctggttgttctctaaaatatagagccagccttgaccgaatgtaatacgtcatagaattgtcgtaaatagcaatccattctaggcacaaagagaggaaaatgatatgtaagggcctaagaattcatgctatttttcctataaaactcatgggtaattagtccttgacaactttgtagaaaaataacaactcctttgtttttccttataactgtccataatgcagccctaccttcgatagatgaatattcacaccaaggtcaagaaaaaccaaagaataattacatttttgaattttcttttcttatgaaacattgcaatattgattgtcgacctagtcaggtagtattttcgacccagtcaagtagtattttctttaggtggataatgaggttgtaaattttgattaaaggtagaaacttcaatatctccagagggggaatatcatgtttttccctaagaaagaaacaaggcttgtgatgtaatttttatttgaaatttatttgttttgaggaaatgttaatgtaatttcaaaaccgacaatgggtagaaggctagaacgaacaaggcacggtagcccatttgcataagaccgcttagagcatctccaacagcctccttagtctactctccaagttaaattttagcaattttgacaaaaattcgtgctccaacggactggccaaccgtatggccaagccatccggctggccaaagtgctcctcgcactggccaaatttggccagcaaaaaaggcctagccatttgtaggccccacgcttttccccctctcactctctctccctcccgtgtactagtactactcccaccgctcgccagatccagcgcgccggcgacgccactccgccagcaccgcccctctgcgcctctcttccgcggtgccgcccctgtctcgtctcctcgtctgcttgtccactcctctctcgcctcgtccagtcctctcttgcattggccggccacgaccgccgccctccgcgccgtcgccgaccgccgccctccttgccgttcccggccgtgaccgctgccgccgtccgcgacccaggtcgtcgttgaggtcgtgttgccgaggtagtcatcgtcgcgagcctccgccgccgccgctggccgtgaccgccaacctatgcgcattcgccgtcaccgcatctctctctacttcgcctgcgacgccagccaccggccgccgaccgctgcccctagccgtcgtcgacctccatgcccgcatcggagagaatgtgaaggaggaggaggaatgagagactgacatgtgggacccgatgttaaattggagaatgtgaatagagaggctattggagtaaaaggcaaatttagctctccaattattttatggctggccaaatgagtatttggagagatcaaaatagccaatctgttggagatgctcttattggacccaagcccaaccgaagaaccacaagtctcaggactgagctgataccatttctctgtgaaaacaattaattctatgtgataggcgtaaattgattgcagaccgtagatggtagaaacaaatccttatccctagtaacactttggttctcccattggtgaatatattagcacagacaggcagctagctcctcataagttgtaaccaacacatatggtgtctcactgagatagggaataaaatggtgctccaaattgcattttaggtttgttctcaacttatcatatcttttgcttcctagggatgtatatattacttccatccaccatagaataactgtgtgttagctatgagttagcatgcatgagaatggtaggcattgggacgttatagaatccatggaaagaatatgcatctagttcaattccattatcactgcaaacccttacgcactgggatactcaatcaagctaaggcagggattgctgttcgtgcgcaacagcttctttgtcaatagcatgcaggctctaatgcccatgatgcaaacttactgaacagttccatcccaatgcaaaatatttgagatgcaaagaagaagtacaagatgtaagaccccaagctcatttttcttataaaaattgtaggaataagttgtccttgacaactttgagaattctcactcttttaggtttcatattgcttttccttatgtacagccatatttcgatcaatgagcctttctctccgagatcaagagaactaaagaattcgagagaagattaaattggttaaaatctcggaatcctttttgttccgggacattgtaatttcgaatggccgatcttagtgaggttgtagatttcgaccaaggtatatgtaaaatttcaatatttcgagggtaaaatgcatgtacattcccttagaaagagtagagaaacgtccaggggttttctggttagctccacaagatggtgagctagatgacttgagttcgaaggctcaccccttctaattaattaatattatgtcattttctaatatttacgtcttttctttcttagaaagagcacaagaactgtagtgtaattttatttgcaatacttttgttatatactatttattttccccaagggtgtgtttggagctgttagcatgtggtgatggtgtgtttttattttcctttttgttttcttgattatagcatcccagagtttatgttttttctctactatattcaatgaaattgacacaatcatgtgccggttcgttaaaaaaaaaactttgtttagaggaaacggtaatgctatttgaaaaaccacatagaaggctagaacaacggcagcccatttattattgcagaatgcggcctgttggaccacagcccatctggagaacaacaaaagcatcacggcccaatccaatagcatcacgtgcacacacgctggtggactggtggtctcatctcgtcaactcttgggcccccacatgccagcgacagccaactgcctccggttcaccggacgcggtccacggaacaccaccacctcatttttggcgggaagaattggcgccaagccgcctcctccttcccgccaagaacaccacccccacccaccttgttcttcttctacttgttcccccaaccaaaaccctcgcgcccccgccgcaccacccgcgcagccgcacagcgcaaatcccccccaccccgcgcaaggtttcgagaggtctcgtcggagatggaggcgttcggcgggttcttcgtggacgagaaggcggcgcgggtggagaacatcttcctcgagttcctcaggcggtaaggccggagccgtctccttccattccatttctagggtttaagcggggttccggttcgtctgacgcgtgaggtgggggattattttattttatttttgttgaaacttggatctgtaggttcaaggaggcggatgcggcggaggcgttctacgagacggagctggaggcgatgcggtcgcgggagtccaccaccatgtacgtcgacttcgcccacgtcatgcgattcaacgacgtcctccagaaggccatctccgaggagtatctcaggtgagatttgatttgatttgaaattttttttttggtggggagttcagattgggaaattttgggatctgtccctggatttgctcggatttgttcagagaactcggttgatgtgtacttagcacaaatagaatttttttcctagaaaaaatacaaattaatttgctcatctgtgacgacaatttggaactgactgcttatgtggatttcattgcatcaggttcgagccgtacctccggaatgcgtgcaagaggtttgtgatggagcagaggactggcgagaaccgtgcaccaatcatctctgatgatagccctaacaaggacattaacattgccttctacaacataccaatgctgaagaggtccgcacttgctcctccaggtgtaacagtttttttttccctgtaaaattaactctggaaataacagttatctgacggcaaatgaacgaattctgcaaatgtcctgaaattcactacaaaagtgtgatatatacatatattcaagggtggggctcattgcccctggaatttcatgttagtacgtttcccacatttggtagaaaattatgtctcactttttatcttgcatttctaatttgtcataggttttatgctaaattgtatgatggttgccataacaattgacttaaattgttgttgtaataggttgagggagcttggaacagcagagattggtaagctcacggctgtaatgggggtggttacacggacaagtgaggtccggcctgagttactgcaaggcaccttcaagtgccttgactgtggaaatgttgtaaagaatgttgagcagcagttcaagtatactgaggttgtaactgtgaaccttatgttctacttttttctctcatgcaatgtgtctaatgaaaggtttctgctccttaacttcagccaataatatgtgtcaatgcaacatgccaaaatcgatcaaaatgggcccttctccgacaagagagcaagttcacagattggcagcgggtcaggatgcaggagacatcaaaagaaatacctgctggttcactaccacgctccctggatgtcattctgaggcatgagattgttgagaaggctagagctggagacacgtgaggaactcttgctggaactgctttgtacccactggattggcttcacattaaagtattctgtttcggtcattttcagggtcatatttactggaactgttgttgctgttcctgatgttatggctctaacttcacctggtgagagagcagagtgtcgccgggaggctcctcagcgaaagaatgggtctggtgtccaagaaggtgtcaagggcttgaaatcactaggagtacgagatctgtcatatcgccttgcttttgtagcaaactcagtgcaggtatgacctctttccagcaataaatatcgatctggttagcttggttataatatttttattacaaggttaacctttctctttaatgttattaggtggcggatggaaggagagaagtcgacatccgggacagggacatagatggagatgacagcgaaagacagaagttcactgtaagttcaattcagactcgagactagttactctgtttcgaagaaggaaaagggactagccttgtaaaaagaactatgagaaattctgtttacatggtattcgaacattctgttgcatgctagcaggctggcatggataggtgtaaccataccagcatcctttttctatttttttgacaatgagtatcattcaagctccctaaacttttgcatgatcctggtgcactgttgatttagtgtgttacatattcatgtaaggatgttagatcatgaaatggttatcattccacttttttgtttttgtgtattatattctttatttttgatcatatagttttttgtcatcaaagtgtttatattattaattatctccctcccccctctctcttacaggaagaagaggaagatgaagttgttaggatgaggaacgttcctgattttttcaataagatagttgatagcatatgtcccactgtctttgggcatcaagaaattaagagagcaatccttctcatgcttttgggtggtgttcacaagataacacatgaagggataaaccttagaggtgacatcaatgtctgtattgttggtgatccaagttgtgcgaagtctcagttcttaaagtaagcttctcattgtattctcattgtcatgattcttattttctttttctgtgatgaataaaatttaagttccatcattcaatgttgtcattctgggatatataaaatctattctgctgcttcaccagatcatatgttagtgtgcataaacgaccattgctttctgataagggtccctcagcatgatgcaatacatcttgattagtctactagttgaatttaagttactataagctttttaacaatgtttttctgaatgatatttatgggttgacaacttgacataaaatccagaagttgctcatgtaattttgttcttggattggacttcctatcttgttataagttccattcatcttaatgaaatttattcatgaatcatcacaaatgtgctattaatccaatcctcagatataccgctggtattgttccacgatctgtttacacatcagggaagtcctcatctgctgctggtttgacagcaactgttgctaaagaaccagagactggcgaattttgcattgaggtattatcaaaattttgcgattccatccatttgtattgctaatacatatttagaagtgcacctttgctttgaattgcatgcttcaactaaattgaactccaatgagcttggatgcactttgtgtgcaatcttcctagttcttctgttctattgccttacctcctctgctgctactggttatttttgcaggcaggagcactcatgttagctgataatggcatctgctgcattgatgaatttgataaaatggacatcaaagatcaggtaggcttgccgacttttacctattgttgcctcttttcttattgaacgtgagtgtcccaatttcatttctccattgtaggttgctatacatgaagcaatggaacagcaaaccattagcataacaaaagcaggaatacaagcaactttgaatgcaaggacttcaattttggcagcagcaaatcccacaggagggcgttatgacaagtcaaaaccactcaaggtaagcctaacaaattataaaaaattgtacttccaagtacttctgaaaaacttttgcatccctgtattttgttgacatgttgtggtaaaatttcagtgctgagatctaatatttcaatcgttgcaatccttatcagtataacgtggcattgcctccagctattctttcaagatttgatctggtatacataatgatcgatgagcctgatgaaaacactgactaccacattgctcatcacattgtgagggtccatcagaaacgtgaagaagcacttgcccctgcatttagcacggcagaattgaaacgttacattgcttttgcgaagtccttgaaacctcaggtttatatctttatgcacttcatatataactttcaacttgtcatcaacttatagatgctttatgtcaatgcagctgagttctgaagcaaagaaagttctggttgaatcatatgttacccttcgtagaggagatagtacccctggtactagggttgcttataggatgacagttaggcaactagaggcattaatcaggctttcagaagctattgcccgaagtcatttggaaagagttgtaagtaaaatcctcattcatatattgcatgttttttagattatgcagtatggtgtctaaataaattaacttaagttcaacaatcaggaatagtattattagttggttgtggtgttaaatttaaaaggctgacatttgttccctccctttgcattggggtttttcaccttacggcataatatttctgctgacttcatttgggattaatttcacaggttctcccagcccatgttcgcatggcagttaaattgctcaagacatccatcatcaggcaagtttcttgaaattgctcaagacatccatccatcatttgcatgatgatttgctaacaaaatcttattaattgtgcagcgtggaatcaagtgaagttgatctctctgatttccaagatgctgatgatggcacaaatgtaccagccgataatgatgctggtcagccaacagaaatggatgctgctcctcaacaagacggtccaggtaggtttccccttattattaaaatggcttttttgtgtgttcttgctattattctgatcattccggtaccttgtttttaatgtaaaatgtagaaaatgagcaagcggcagatactggtaagaagaagttggttataaccgaagaacatttccagagagtcacgcaagctttagttatgagactacggcagcatgaagagtctgtcacgaaagatggtattgatactggattttacactacctttccatttgttttgttttgacttattcgctattttgtatccttaccctagcaatttccaactgtagaagaagcatagtaatatctgcttaggttcaaataagtgaattaatttttactgcttatgtcccatataaggagtaacaagatccttagttgtgatttacttacataattatgagcagcatttctgagacatgctttctctcgagaacaaatgaaattacgatctcgtctagattacagcttccagaggtctaggttggcgagcaattctttttaattgcgtaaattaataaatcctttgtttatattctagaaaaacataatttgcaataattgtctagtactattgtattgctttagcttttgttcttctcttacatcttactagaaagatatatgcatcttcttaaaattgatgtggagcctcatgcaggcttgtagatgcatcaatgtgattaacttgtacgccaaccatttatacagtgtagtaagcataaattgtagttatgtctattcaggtttcaccatgttgatgtctcgttatattgttaggacttaatgctatctaattccgctcctgtataagtcattgcttttagttcatcttgtgccgccctaagtgtttccttttatgaacaaggatgatccttgtcagacctccagctgatatagatgtcaaactgacatgttccaacattgaattgcaggagatggtctggctggcatgaagcaaggggatctgataatttggtatgttgagcagcagaatgcccaaggagcctatagttctacagcagaggtgaaggaagaagtgaagtgcatcaaggccatcatagaggtaaaagccttcattgatcttatcatctatgtatcaatttgcctgcattgatcctatcagttcaacagtatggtatggaaattaacctaacaagactacatttaaggcatttagctgcatcaatttgcctgcactgcaagctcaacattgaccatttatattgagcattacctcagctttccatgttgctaaaagttatcaatcgatttgcaaatgcagaggttaatacagagggatggccatctcatagtgatagacgaaggagcagccccagcggctgacgacggtgctgcacgaag

SEQ ID NO: 10292 - DNA, 43266 bp, Oryza sativa
ctagcgcctcccgccatctggcttcacgtggacggctcggatttcccctatggcggttgtagggtgcccgaaagtttggcgctctctccgacttttttctcgacgagtgtagcttcctaggaggaattctggaggagtaccggagctgtcggtacactctgctccgggtccggagaacttcttctgtaaagtaagcattcgtgtttctttcttatgttatttaattactttgtctatgtaagatatatttccatctttgtgggttcattgtttagtattcgtaccaagtgctctagtactaggattctggatagagaaggaagttcctgcgcaagtattagagtagtaattaataacttagaagtggtgtgtaggttggagattatctttgttctttgtgtatcccacggatttgtcagaggtaggtggcaagtggtgacaaccctgaatcccgtcctagtaatcctccacgttcaaatacatcatagagctatagccggaaccacgctggcagaccagcaggggtcggtgcccgaagcaatagataggaaattacctttaacttagcttagataattaaaacacatagaaagtcctctctagcctgcctagcatatctatagttgttgtccttggattgtcttagccttaggtagattacagaaaaacacacacgctagcctgggagatctgcttaactcctgtgcaggtcctaaatcttcctcttaggttcaaagtgtgccagttgatttgatcttgcaatcaacgagaaagaagcacaaagaaatcatggttaaatccaaagacgatagccgatcggctagtgccgatgacgtatcgttcaaactctgagccaatggtattggtaatagattggcaatgagtaataaaaataatataacgttaaatctactcgatcgtttgtagatattaacgatatataatcatcttcttaaaatatatttgaaccatgtgattgggacagatcgaacagcaagtcgagacagtataaatcacttatactcaaaagtactttaagatgaagattatatatacatttatagcatagccgatcaaatagatctaatatgtatcggctaatactccgataccactctatactaagatattgaaacaaacaagatatattagataataaacctaattctctttaatgcaataagatcttaacataaagggcagatttatcatgtcaatcaagcatacaaaggacaaaatagctaaatcaggtaagatcggctgaaacaccgatactatctctattgatgatcataaaagagctagatattagtagttataaatattacttaatagatcgaactcaaccaatgcagcattaagcataagaataaatacaagatctaagcaagatgatgaaaatctctaaaagatggtagatatgctatataatctagattaataacgaaatctaactctatcgaatgctcttcggtaacagatatcaatcgatcagaggttaaatcgtgaaactaatgaagattatgaagcatatatgataactcgacgatttatataaacaatattagagtatcataaagatggaagcactaatcccgagaacgcaagccgccatgacaagtttacctctttttgaagatcgaaatcgatgcagctcaacccaaaagcaagaactcgtcgaaaacaatgaaagtagaaaagggtgacaatgcgccgaaagtgttactgaattgttgttgttaattacatggttttggatcatatttatacccgagatacatgataagtccttgccggacatgactcttatctctaacaaactctaagatacaaacgaatctttacggcagactcttgccgaaacatatctctaaagaaactattcaaaatatcctaattagtagatacaattgtctatctgcgagcttatctctatcgtggcaatcctgatgtagcacgtcggtcgattccggaaacagtgtcatcactatctcaacgaaatcggctatattggctgtatcggctatctcctgtccgatccatctcagctgatgccatcttcagccgatgcccttgcagccgatacgcactctgtttcctaaatacgatccttcactgaatccactttgtttccgatgttgaacctggttcatggtttaccaaatttggtcgttaacacacccattccctgagttcgatatccgtttggggtcacccgaaggtgaagtgctgcagcggtattccgtgcgcttgtggatttatctatggtcgtaagaaataccaacactgggctgggtcggcttggctagattgggccgggaagggaaggaaaaaggagttgggcaccaaggaggtaaagtagactttttgtaaaaagtagggcacccttttacagactgtttgaaaattggttaaggaccttaaaaagactttgggttataccttttaccaaaacaaattttctttttctaaaaaataaaaaataatcataagtagataatttttatttatcaaacccttagggtttaattttaccttatttttggcaccggcaaataacagaacaaaatttggaagagccagcatgatgcaaatttttgtaagaattttttgagcaataaatttggattatgaaatttttatttactagaaaaatatctgtgtgttgcaacggatgaaggctattttaattttattattgttatatggtttagttaaggtgaaattcactgtgcgaattcacttggatatatattttttagaaaatcatgagctgcagttaggagactagtcgtctcaagttagcatgcgagttttttaaaaaagaaatttcttatacgactcctgtacttttaaaattgaacgaacctaaaaacatatttaattttttataatatttttatttatgaaattttcaaggtgttactttaggattgacatcgtatcctatgttactgtaaatttaatgtccactaacttctaaagcttaacatacaagtatgccacatcattacatactagcaattattatatagaacattttaaatatcatgcaaatatgacatattattcataatttttattgcatttttaaaacttaatatgcaagtaatgccaaatcattatctccacatcatttttacattatttaggcatatatgtttatcatttctataaggaaaaagtacaaattaccccccaaactattgcggtcaaccaaattacccctctaaacccaaaaactatacatcgttcaccctgaactttcaataccggacaaattacccccctcgacccaatccagaacggttttatcctatatggctacacgtggaagtcaagtcagcattccatttataaaaaaaaatgtgggagccacctatcatgctttctcttctctctcactcttcctctctcttctctcggcgcggggtttggcaggccggcctctaggtcgatggagaaggggcgccattgtccagcgggatcgagccccgttccccccgagaaggcggagtccagacggcggcggtctcatacggaggagaggtccctgtagccggcggcgggcgcccatcgtcggtgcgggatttgggtgggcgagaggcagcagctgcggaggagctggccagcggtggagttaggggcaccgtcggagcggcacggtggagggggcccgacaacgccagccgtgcaccttgtcgcagtgaagaggtggctgtttcccttggcggtggcaaaggattcccccgagtggcagaggagcggcgtggcagagagggcctgacgacggagatccatgcgtcgacggtcgccatcggaggtgcgggcggcggatggccacagggccggatgtcggaggactgtggggctgggcgccaggcggtcggtggcctccatccggaagaacaaggccgcgaccgaccctcgcttgccgttgtcccactgccatctgccgttgtcctcgacgccccgagcgacctccgccgccatgccaccgccccaagctgtgtccgcccctgccgccgtcccgccgcccttgtcctccaacgccctcctcggtgccgcccactgccgccgcgtcctccttgcactccgccaccgcccgcacaccgccgagagggaggggggaagcgcgccgagcggccgcctcctcatcccctgccgccgctgctctgtgtccccccctccccccgccggccgctgacctgtgagagagagagaggaagagtgagacagagagtgagagagagagaagagagagaggaagagtgagagattgaggaagagtggaaggagtataataggtgggtcccatattttttttataaatagaatgctgactggactaccacgcatacgccatgtagaccaaaaccaccgcggattgagtcgagggggggtaattcgtccggtttatatagttcggggtgaagaatgttcggttctgttgttcggggggtaatttgatcgaccgcgatagttcgggggtgggggtaattcgtactttttcctttctatgatgtactccctccgtattttaatgtatgacgccgttgacttttcgaccaacgtttgaccattcgttttatttaatatttgtgtgcaaatatgaaaatatttatgtcatacttaaagaacatttgatgacgaatcaagtcataataaaataaatgataattacataaatatttttgaataagacgaatggtcaaacgttagacaaaaaatcaacagcgtcatacattaaaatatggagatagtatataatatgcattcagtcacatgtcccgtagcaaagcaaggcgcggagtatcgactggttctaaatatattcattacctcgtctagggagcttccaaaagcttgagcatccctttcctttatctcccgcttcagtaagcaccgatatgccttagtaattaatgtccccacctcaagaatcaaattcttttcgtgttcattttttgatatggccccacccatcctgccttatggggcgcactatttctctcaactccttttaaaagatcattaagaaattagaggggctcttcttcttctatcactaacaagacaaggtttctaccaccagctataggcacatttccataaccaatcgaagttgtatgcatctgtgtaactagctctgccatttggttggaactgcccaaagaaatctacggtatgcgttactatatataaaccgatttatagtcttgtttgtggcttgctgcttaatttcctgtaaccgtacatattttattatatgaatcaatatggtctgtcaaatttgtgtatactatatcattagctagctaggtggcattgtctgagatcttacttaagcaattaactagctagtgtacgaggtctcaaattaaacaattgcatgcatagccaatgaatgcaaaatgctgaacttcaatcaagccatgatctgcagttgctgtctctttctgttttttctaactattttaagctaatgatgctgatgccaactaaaaataacattgctacataaatcgtaatcaacggacgcatattttgattgggactggaaatacaggggatcatgtagttggtaagcatattgatattgatagaccggtagcgctacatgacttgtagcgtgctaggaaaccgctagcacgcctcacaggaggctctttggtattttctcttttttctcctcctgcttcctgagttatctgttgctcctcacatccctcatgcatgcacctgtcagagcattaaaaaagttacttttctctgaatccgtatgcatccatcgcctagtaagaaaaaaaaatacttgtttgcttcagtaaaaaaattactttcttgcttcatttaaaaaagatattttcccattaaagcaaatagtttttattggttacaacatttgtgatgtttttagtggttcctttgtaattatcattttgtaaatacttttcttttaatgaaattaaatggcagaatagctactttagtccctaaagtttctccgtaggatcagtttagtccctaaccttttaaatggttcaaagaaatccttaaactttatcataaggcctagaatagtcattgggtccaccaaaatcatcatatagatatgccatgtcatcattcatgcaaaatctatgatgaattgtccaatttactcttacttatatcatagaaaaataaatataagggtgaattagacataaccataggaaaaaaatactcatccttttttttcaccgttttgaggtatacttttgctcttacattttaccttttgtctttttattttgctatgatatatataagggtaaattggacaaattatatagattttgcataggaatatgacatggcatgtccatgtggcgattttggtgggaccaaggactatatcagcccacgtgacaaaattaaaggacttgtttgaacaatatgaaagattaaggactaaaatgatccagaagcgaaactttagggaccatattggctattctcccaaattaaatcacactacaagataaagccctggcagtgattaaattaaaaaaaatattttcttgcttcctgcattgcatgcatcaatcgcccaaaagttaaaaaaaaaagggtcaatgccagattaggtcccgttaacatttccatgtcttgtcgctcttaattagtttcatccatagcaaatttatttactgaggtttattgtaagtagtaatataattacttggatgtttctcaacaccatacatacgagtataataatttatttactgtagagagtacacaaaaacaagaaaaatagatatgtgtctcctgcacgcgagcatagatagcagcagtcgaaacgcatccgatgtaaggatggcgacaggtaccgctgcgcatggtctgcttgcttctctcgccagcaccgtgcgtcgtccaccgtcgctcacgatagaccgcctcctatccgataaagagtcccaccggcggtggcgaggatcctgcatcaatgtggatctgccgtccatggccgacttctccgactcggataccacctcccaggcgacggggacggtccccagctctgccctcaccacccctctccctcagcccttcctgttcatggtggttatcgacggccaccgcaattgagcgcgaggggagcgacaccaatgtcttttttatttttttttttaaaaaagaagggcagaagctttgtcgcttatgtactgatagagaaggatgcggcttataaggagtacaagtgtacaacaaaactacataatatttaccgagtccaggcacaagaaaccaagcgggcccgcaaaagaaaccgatgggacctactctgctggggtaatctctgtgagttttatcgcacccgcaacgatccaggttcacgcctctttgttctcgacgatgatggtggccggcatagaagccacttgcctgaaaattctaccatttctttcgcaccaaagctcccacgctattaggatgatcaacgatttaagtgcctttcttgaactgttcactgtgcgcgagattttgtaccaccaatcttctaccgttgcgcagtctttcccactcttgtagtcaaaggtccacccttgtccatctttgtatttccgcccagatcattttggacagtgtagggctgatacaggcacggtgcgacagagggtgcaaaaatgttgattagcttccaccctctcttctgtataatctgtcagccgtcatactctaatttcgattttcagccaagagaagaacttgcatttggacggagccaagcaattccaaatagtctggttgtaaattgttctgaccgctccaatgaattggagtctaagcgagcgaagatgtagtgcaacgttaaagtcgggaggcagtgatggcagtcgcggtgagggggttgggcgcggatttgcggcgccaaagaagaacagaggcagagggtatgacgacgaacatgggtgtgaaattgcggcaccggggcaggaccattacgttgtccatggagttctgcaccgaagggggggggggagggggtaggaggaatgccaatttgctgaattgcgacgatagaagtcttcgtcgcagcgtctcaaacacgatagcaagcagcgtggcatcgtcttgatgtcaacaaaagcaagtgatcgtaagcaagcaggccgctgtggtgccagtgcacagttcacgtgggcaggactacacattagccttggcgaacacctccaggagcccgtcggcgtccgatgggcctacatatgcagtggaggcatcggccttggatgacctcaggcggcaaaggagtgttgaacattgccttgtactccgcaagggcttgatcagtgagtttccctttcagttggaatgaagccaagctgctggcacaaattaagttgcgccttgatcgccaccggcactttcatttagccagtggcttcttggctagtcgcctgctcctacgcaccccgttgccttctatggcatcgtccccaatggcatgttttggatagggcacccgtggcataggcaggattgctagggccactggcttgaacaaggcgcatagggtctctccattgtcgtcatcatcctcagcattcctcagggccggttgctctggtgccatctgttctggtcccggcgtccatcggttgcattggagttcacgccggcgatggcgaggtgagctgctgtagcagcaactgctgggtgtcgtccccagcggtcggtggcgcttctcctgctccaggcaatgtgaaagctatcagctccggtccctccgggtcgtccacaaggaggccccgctcctgcctttcctaaagggcatcatcaacctcccacaacgatggaggcccttctagatcggtcttgatgcgcttaaagaccttgcgaaccgggatggttgctccggaccaggcttcactgcctagcatgtgtagtgagagctttcccatgatcgtagcaaggcggtcaacgaccatggaggggctgagggttcacaccgtgatagctgtagaatgttgcaaggctgagagcttaaggtggaaaaaacttgttaaattcgcgtgcatgtagatcttcatcggttggcaggctcttgtgcacgggagggaggaccagcagctcattggccaccgtcaccgctgtcatcatgacgtatgccgtggcggctgctttctccagcattcaacaccgcagcgagtacgtgtgctggagcgcaccgttgagcccctcgcatctatttgattcactgccacgccccacgtccttgcctctatcgtctttgtcgtcgtcgcggtatgaccggcgtcagggatggtcccatagcttgtcggggtggtcatcgttgtagcagcttcggcagctactgctctccttgcggcccttatccttgtttccacttcgcagcccattgtgctccttggggagacgcggcggctatgggtgatgggggaactcctcaaacacgcaggccagcgactgctcgccatcgatcaccccaaggtgccaggccaggaggcttctcttcattggctcgcacttgaccgggttgaggaggtcgacggtcaccgtggtgttgtcatggatttcgtcgtagtggaggagcaccggatacttgtcgccgtgttgccattgttctagcgatgtctctatcaccaagacggacttcgtcgagccatcccacacttttttggtgaagatgagccaaacgtgtttagggatcatgctcgggttcgccatccatgtccagagcttgatgaagcgcgtgtcgaccggctgcacgaggttcatatcaactgattccaaggcgcatcggcgggcaatgacttgtttgatgatgtctaggatccaagcatggcggggaactctatcgagcactaggcacacacaaaacatgagggctgtgtcgagcgcatccttgaggctcctccacttgatgaagtgtatctcgataccccaacgattgtcgtaccccttccagagtgcgtcggcggagtgtcgactatggaggaactttatgaggaaagcctttgggtggtgtttcgtcaccgccaccacatcaccgcgtaggtcgaactcatcctttagcacttactccacctacttggccgtcgtggtcgacagggccttctttgcccaggagaccatagcaatttcctcctactcacgacgctcctgctcaagggcgaaggaggaagggttgatgcattcatcatgcatgggccttgtagtggcatttcctagaagcgccatattcccggtcagggcacacggcgacggaggtggcaggcgctctgggtgggctggctaggccagctaagagcttttccagtgtggcggccaaagctgatgagggacggggtggaggtgtgggcggcggggcatggaggatttgtgtggcaaggagcaacggcgagggcacgcagtagtgcggcaatcgcaatcgcgaacccagtggactgagtgcctgcaggagaagcatcggaccgggtctctgcaggtggacgcacgatggtttttatctaggcagatgaagcacctaccctaggtcttctcttgaaaaggcacgaagcgaggacgtggggtgggcgttgagcttgaatggggatgtgaaggccgtgccgtcctccactgaccatgggcctttacctgagtccatctgtcgtttgtagcattaagaccaccgcgattggtctacgtgcggaggtgacgccttgtgctaggctgcgcgttcgtagcctcataggagggtgggtggatggcacccgtattctccctgaggatggcaaagtaattgctccggacgggcacagtaatgactgatttcaaacttggccatgctagagttttggtagggagcgggattggagacttagcacattgcgggttgacggccgctggatccagagtctctggcacctccacgacctatatgtgtgtactggaaaaaccattttaatcgtattattattagattttttttaaaaaaaagtatatgggatttttatttgaagatagtactgatatctaatttggaatccttctagcttagcatttatattttctaagatcttatcattggcagctagcttcttgcttaaagcatcattagttttagcttgtgcaaagatgagatccttcgagaaaggctggttattgaagttaccactgttgttgttgttgcctccttggtaaaacggcgggcctggttccacccctgacctccttgtggatgatatccattgttcatgaacaccgcctcttcacgggtctcaagacagtctgtctcggaatgacccgagttgccgtagacctcgcacgtgatgtgtgcatccaaggccttaacggtgccttggggcatgttcttctcttggtcttcaaggcgattcatgaggaggtcaagcttagcagccagcatttctatctccttgacagtatgcatgccacactggcgggtctggagtcgttcttcgctctagcccatgtttgaaaccatcttctctatcagatcgacgacacctctgaccgttttggagaagaacgcccctccagctgcagcgtccaggtgatcccgggacaagggagtgagtccgttataaaaattctgcaggatcagccagtcgtccatcccatgatgaggataggcggccacgtactcctgtagcatttcccatgcttcaggaatcgactcgtcccttctttgctagaagcttaagattcttatgtgaagggcattagttttgcccttcgggaagaatttggagagaaatgccgtagagcatttgttccaggtatccaccgttgcatggttgtcgtagaaccactgcttcgccttccctagaagggaaatgccatagagcatttgttccaggtatccaacgatgcacggttagcgtagaaccactgcttcgccttccctagaagggaaaacggaaacagtctgatcctgacggcgtctgggctgacgcctttcattgcgtacgtgctgcagatctccaggaactgttgaagataagcacttggcattctcgttaggcttgccacagaatgggcttgcctgtgccatcgtaatgaggctggtgtttagatcgaaatcgccatcccccaagttgatttgcggcccaaccggcacgttgtcagtagagggtgcagtgaaatagcggagggtcttctcagccatattcttgaagctcggtgacactgggatggttgctttctttgtcgaaagagctttctgcagagggacaactcgcggcttcacactcctgaagaaagcatctgaattgtcttggaagtttttcgtcaaatcaaaaccagccatacacagcaaaagtgaaaaaaaaacaaggttagcctgcaaaggacagtgactatacagaggtaaatataaagttagtagcatatagtaatctctttattaatcttcccagcaagggcgccaaaaatgtttgttagtgtttcttaacgacattatagaaatataaatcccagcaatggcgcataaatattcctggtatattacggttagtgcgcagaaagatccgcaagcgcacggatataccattgtagcatttcaccccgaagtattccaaggtatcgtatttatttaatctcaatggaagattgataagagaagactatactaataattaataatttatatgttacctatataagtcacagtctaagcttgtgttaattaattcaagggtagagtgacacgaagaagaagaagtaagttactctcattaaataaatcctaggctaagtggagaaagaataagaaaagaattcatcctaatacttccagtatacaggtatctttaatttacactatctagtatacaatcatgtagccaataccccctaactaagccctcctggtatttcaagtgaccacccctgattgtcgagtcccttacgacaacccgtcatggccgtccaaccgaaaataaatatggaggagtacccataccatgaaattaacttaggattatatactaacatggaggaatactcgtactgagctgtcaccatcagcggccaacctttgttgtcccgcagcatataacccaaaataatgatatttaataatctaagcaccatgcttaaattatcaaatactactctatatccgctaccatgacatagagcaatcatttgcatggtcattatacccacaccattgcatatctctggtaagctagctacacaattatatcgagataaatgtaaagtgaagtcggtacccaaataataagagtgaagtaaaataccaaaactgaataaagaagcatattccattaattgtgtaagtcttacaaaagagagagaagatactagagccatacccgaattctcctgaagactcgaggactaagaaaactattctatttcctactccactagcactagaatactaactaaacttgagagagagctttgatcttcttgttgagtctgtggagaagtgagtgaggtgagctccttttatagactgagtatgatggttattgcagatggaaaggtcggaaatgccctacagccgttgttggaagtgaatcctgaatgtccatgccaaacactagccttaacggctgtgatgggggtttggccgaaccgtgacctggcccaatctgcccaatttttggcaggcctcctccccgttgattcctcagtccagtgacgtggtgttttgggccttttgagattatttctctggatttgtaggcccatctatccacaaatctacctctcgacggctttcgattggttgttcgtttgttttccgtcgattctccttctctttatatagcaatctctgaaatcaaatagaatccaagtacaagtaaattattctaaaacaaatatacattgtaagcatatctagttctcctttattttgagtatattgacggttgaaattggtctataacgaccatcaacaggcgtcaagcggctgttgatttgtttagcgcttaaacattcttcgtaggcgacaacataacttagttggtcacccgcctttgaaaatagcctttgatcgtagacggagcagctggccgcatgcaaagaagatctactttggccacatgcgaaaatagttttcgtagcagtgattactgcatataaagtaagagtggttaaagcattttcctatgaaggatatttagttgataatatcacaataaaagatatacattgccaatatggcccatcacgatttgcacaagtacgttgggattttgtattattaatattgattttattgaagagatagattaggtttccaacatatgacgctaaatttgcaaagagaagcattgaatcaaatattttgattttacgccattattttttaataaacaactaggtgattcctcgcactttgctgtgggaattactaagtaattttaaatatatatgtttttttcaataatcgagcaaggagtaagcttgatgttaattattagtaacaaataaaactgatttgtctggccatgtttggagagaaataaatttaataggctttgtaaaagattatacatgaaatttaggttgttggccaagatttatatcacaagaaacaaaagatagggaaaaaagaaataaaaagcaaggatttattagtagtaaacatgtaacaaactaaataatatctctgctttgatacgggatatatggatgaatgtatgttaactattataaaaatgatggatatatttgttgaaatattgcggaaatgatgagagaggtgatgattggatctatttgcattttgatttgtagaattaaataaattatggatgatattgcatgtttgcatgagcttttttgataagtagttattgctcgtggatgacgaggtggcatatttgcatattgagctttagacttagtgagctttaactttatagaaaatatagatatgaaaacacaaaacaaaccacatatgcgcttttccacactttccatggatttgatgtatgctacatttgttttaatcattttaatactttcttcaatgattttggtacgtgaaatacatagtttattgttgagaaaattatttagttcatactaattaaaaaagttataaatgacctatgtgattgcattacttgtaatatatggctttttaatattttcagtacatgattttgtcactaacatttgaacatatgcaacaaacagtagcccaagggacagataccatcatcgatcattgattacagtatgaagcgaacatgagccaatctggtgcaactatggagtggatgggaaatccaattgatgattcttttgagtctattccttcagctctttctcttcttcactggaggcctccgacgccgtagaaccaacaaattgatactgatattcatttggctggcctatgtgggagcagacctagttgctgtttatgcccttggtctcctctctcgatatgaatacaaatccaaaattggaagtgactccttgacagtcatctgggttccatttctccttgttcatcttggtgggcaagataccatcactgccttctctatcgaagacaacaatctatggctaagacacctattgaatctcgttgttcaggtcagtctagccttgtatgccttctgcaattcatttggtcagatcagtttgcagctagtagttcctgcaattttcatatttgttgctggtataatcaagtatggggagaggacatgggcactcaagtgcgggagcatagatggccttcaaagctcagctggtggttacaaagacaaagaacaggaagagcaaaaggataataaatatggaagctatcttagcaaggtattctatgctcatcaaatggtgctatatgctcgaggattatttgcgggggtcacggtctcacaacttggccaaaaagtaagaaaggaactaacacatggtataagaaggtgtgaaaaatatgtgaaagcaaagataatagagctggagcttagcatgatgtatgacatcctctacaccaaggcaatgatactccagacatggatcggttgcatactacggtgtatttcccacatcgctatggttgttgcatttgtgctattcctagtaaccccaaagcatggccatagaatggctgatgttgcaatcacctacacactatttgctggtgcccttcttatggaagcatgtgccattggtgtggtagtggcatctccactaacatgggcacgttggagaaggcacaattatgttaatttgcttgctattgggaagatcattggagcaaaggaggagaggtcagttgtgccaatttctttggggcaatttagcctagcaacatgtgctttacatgatgggtccacacccaggataatgtccaatgcgttgtatgcatttggcttggagaagatctatagagatgtacgtcatgtgaaacacgttgaggccactgagattgttggttgttttgtggattgtttcaataatagaccatccaataatgatcaggatgaggtaattatgggggtctctaaagaagggaatgtggatgtcaggttgaacttgttgagcatatctcagcgttttgaggtcggcatcattcaactgcatttgttcacagatatttatacaacttcagtactattacttgaaccaggcatctgggaagaaaagacaggcattgtatgggaatgtgtgatgctatcaaactatatgatgtacctcctgttagcacacccctccatgttgcctgttagcagtgattacgctgtgatggaacatttgaactatatggctaaattagtggacatgtacaaatatgctggtggcaagctggatcctcacgcaaggatggacttactgctcaaagctcttgagcaaatgacaagcaacacaaactctgacctcattgttgttgctagggaactcatttatattactagggtcagtggcacattattgaagttggtgaaggagacgtggatactcctcctcatctatgctgccagcaagagccgcggtgagctccacgcgcgtcggttggacaacggatcggagctcctcaccttcatctggctgctcttggttcatcatggcctcggcaatgtggcagagtttgggttaacactaggccgctatgtcacaagtgaagccccgccaagcttatctgaaattatcgacatcccgtgagtattgaacgttatgacttttgaggtgttttcagccgtctgatcatagcaaacggacaagatcgattgctacagtaaagtgtatccctgtcacgccctaaaaatcgactaaattaataatccatattttaaatcatttctagaaattattttaaaaagccttcaagttaaactctaataatctaggagaaattgtaacataaaactgagttagataaaatctcgataatactttgcttgtttatttattttctagatttttctgggaattatttgagcaaggaaagtatttttaaaagtttttaaaatcctctcctaagctgttggcaacatctctccccctcgtgtgcgtgctgtgcagcccaagccggcccaagccgagctgctcttccccttctcagcccagccgaaaatctaatttgcctccctcagcactgttcatcttctacctctagcagccgaactgagaccgaattggctcggtttttctcctccaaatccaaccttttctcttgtgttttcctaaaatttgttgaggggaaatatttcccttatctacctctttcgtttcccccaagaatcggtttatctctccaaactaacccgaagattttccggtttcgattcctctcgtttggagtcgatctctctcacccatgcctatataaagcatcccctagtcgtcctctttcgtttgccccaagtcccgagccccgccgtcgcttgtagcgcagccgccgcgacgccctagccgccgccgttgccatcgtcgttccagccgccccgcgccgtcgctgtggtggtcgtcgccggtcgccgtcgctatctccgggttcgcgaggagaagccgcgcaccgtccgccccttcgctgccgttgcaagcagccggagcgccgccgtcggcgaggtcgccatccgagccggccgccattgatgacgtcatgctgacgtcatcatctcctatttttcagttttttttaatagattaaaacttcggaaaatcataactaattaaccgtagctccgattcaagtggttcaagttgctaaattcatctaaaatctagatctacatgttaaaaatatccacatgtattgttcatgcttgtttttgtactgttttgttgattttgtttatttgctttagtttccgacgtttcgttggagggcgtttcagttgaggaaggtttagaggtttttgtggaagctcaagacaagtcacacagatcccaaacaaacctttgagcatgttgaacccgtttaaaactaatgttttatttcaacttatgcattattttcgaatgccatcgggtggtgagccttttcccatttaattatggccgaagatgactgtattttcctatgggttataatttgattagctagaaccttatatattggtttggttcagctaaatgctatatatgtataattgcttagccatgcttagaaacataagctcattaatgggatgaatcatactacattattacttatggttatacttaatggtagctcacgatggttaatcgtgttatgttaattaattaataattaaaacctgattaaaggtgggttgtgagcgcatggttttgatggtcgtgctcatgacaattaaggaccggttcacgagctactgttgtgaaacatttaccgtgccaaccacaagccagcgtgggcaacggctttaccttttgtatagcatggttcattatggggtgccagactgagaagcggcgagaagtccgtggggggtcgctggggagtccatgcctctggttgtagagggggtgattatgatccaggtatggtgcactgtggtgagttgtgttgtgcgaggggtattgtcacagttcctttccgaggtaccgtggtggtattgaggcgcatggtaacatgttgtggaactgtgtcttgtgggtacagtggtacatctctggccagagtaaaactattcgaatagccgtgcccgcggttatgggcgggtctaacaatgtttttcgtaattagtctcacattattcattgatggtaattgtgataattaatttgactcctggtttggaatggtatattcctggtatggaggtttgatttgtacaaccggggttggttgttcagatgaggttgggcatatgcaacacgggtgtgttgtatggtgtttacttaatactgattaattattcaactgttttactattctcttaaatatttattaaatgctgtttatgcaaatgagctatattatgccatcctttgttatcctatgcacttgcatatttgctgtgtggcttgttgagtatgtcatatgctcattcttgcaatattcattcattagaggaggtgtacttgagtgaaggtgatgatctggaggactaggcttggtccgggttaagttgcctgtggagtggagtcgccatagctgttccgtagtttgttttattttctgctgcgtagaattttattttttgagaggaactatccacctctgtaataatttgctattttgcgaatattaattagttgtttaagagtactctattatcaatttgttattgtgtgcctcggctgattcctggacgaggatttaacacacatgtaagcgtttggaattttggatagaagttccgggcgtgacaatccctgaccttattgattagattggatgttacttgtatatatgtattagcaattcttatcgattcttacttattttgtagttctattctacatacttatgtgttggcggatggcatgaggcccttcgactaaatctgccgaaacccgtggcgaaggctatgaagcaagaacggcacgaggcgaagagtcgtacgagtgccttgccaggtcagaggcgtcttaggcgaagggtgtaagccgaagactacctgccgaaggaagacgacttcgccatggcaagttcgcccccgcgagggccgaggaagcctttccggcccatcaagcctaagggctatagggccggcgatcgccagacggcccatcaggggcccatgagcccctataacattatgtacccctataaatgtcccttttgtaagggtaatcatgtaaatttccctgtacaacctaaaccctagtagtaagaacctgtaatggagctataaatagtcccctagggccatgtaatggggggatcccaagtgaaattcaaaatttaatacatttcatttttccaaccactgttgagtaatcacgtctttcgacgtatgcagttgtcctttcgacaacagctggcgccgaccgtggggaactccgagcgaaaccactgagagcgaatgccaccgaagagggtcatgaaggagaaggttgccaggcggaaggagaacgacgctggaccggacatggctgccgaggaaggagcagagcctgcggcgcccgtggccgaagatggaggagcacaagcgccatcacaaccgccttcggcccctgcaacctctgtgcaagtgccgaacgcggccgacgtggcgaaggcggctgcggcggcaagggcactccagaccaaggcggagatcctttcgacaagccaaccggtggtgccccaagccaccccatcgcagccggcagcggccccaactgcgctcgccgttgtacaggcccaagtcagccttgaccccgaagcacaagccgaaggcgacatggaagccatgcggcagaacatgagacggctccaagacatgcttcgccaaatgcaagaacaacaacaagcatacgaggcggcaaggcggaccaaggccacgtcggctccaatccttcagtattcggcaggctatgtcccacctcaagtccgtccgcaagtgacgacccagccctctccgccacaagccgcacaggcgccggtgtacttcgccgggcagcatcaaccacctggccaagcgccacaatcagtggcggaaggggcttcggctctgtaggcgcaactcctagctttccttcagcaactcaaccaaccccactgcatttcaagtacaaccccatcggcccgcccggaggggaatacaagtcaaggtacgcttaattggttgccaccgattcagctgggcctgggagtttcgccgtggaatcaaggaccgcagttcgacttcgtcaacgctgctcaggcgccaaccgttcggcagcaagctccgactccaggcttcggaacaaaccaagcaccaattcaagctgccatgatgtggtcacagccaatttttgacccgtccatggcggctcagcaagtaccactagttggagccgggcagccgaacgccatggcccaacctcacgcacaagctgcgatttcgccacaccgtacccgcagcaaggtgcggtaaacagggtgggaggcgaaaaggggctaccgctgagtgggggaatcaagactcgtccaatcccaccctagttcaagttcccacccgtcccgcgctattcgggcgaaactgactcgaaggagttcctctccatctacgagtcagcgatcgaagcggctcatggtgacgaaaataccaaggcgaaggtaatacatctcgctctagacggcatcgcccgttcttggtatttcaatttaccagccaatagcatttactcatgggagcaattgcgcgatgtttttgtccttaactttcgaggcacctacgaggagccgaagacgcagcaacacttactcggcattcgccaaaggccgggggagtcgataagggagtacatgcgtcgcttctcgcaagcccggtgccaagttcaagacataaccgaggcgtcggttataaatgccgcatcggccggtttgctcgagggcgaactcacgagaaaaatcgccaacaaggaaccacagacgcttgagcacctacttcggatcattgacgggttcgcaaggggcgaggaggattccaagcgactgtcacgtcctgataaattcatcccgaaattaaaaatcattcgctaaaaggaataatagaattaattaaaattcggaaaaaaattggcaaacactaaaatacgtacaagaaaaattcaaatgtggcctggagaatttttgttaaattctctttggtctaaaaggagccctcaaattttacttgaattttcagagcaccaaaaatatttattaaacaacaacaacaattatcaaagtttactaaaaagaaaaactaaaaataaatccccctcctccctttgggccaagtttggcccaaagacccctctctctttctctctctcggcccgcggccaaagtcctctcttcctccctctattcctctccctctcctcctctccctccttctcttgggcctcctctccttcccctcggcccactccctcctcctccctctctcccccaggccgcctccccctcctctcctcctgggccggccgcccggcccaagacgagcggcaccctcccgcccgtgccgcgcacgtgcgcgcgctgatgacgcgtgcctgaccggtgggtcccacctgctcggtcgtctccttcctcccgcccggcatcctctctctctcttctctcccgtgaaacctagcgtcgattcctcccctaaatccacgcgattcaaaccgggaattccaaaattgattagggggaattaatcccctctccctcctctctctttcccccttaatttccccttgaatggctcccccaatcgctgggaacggacgcgccaactccggccaccttccatggccgccggccatgtttcccgtcgccgttccgccctctcccgtgcccggctccctcccccatcctataaaacggaaacccctcgctccgttctatcgttttagccccctcccgcgatctcccgtggtccctagccacctccccgccgtcgtcccctctctcccgtgccgccggccatcttcagccgcccctgccgccgcgttagcacgccggccggccgtgccgtcgcctcctccagcatcgcagccgcctcctcttcgccggcctgccctctgttttccgcggagacctccggaagtgcctccccgccggcgacagtggcgttgccgccactgttccgcctccggccgcctctgccgcgtcccctgtgcgccggccgacgtcgccatcacctctcccggcaccggagcgccgtcctctttcccggccaggccacgacgtcgcccgaatttcgccggaacgccgtcgctcgcgctggcctctccttcctcctcgtcggcatctcctctggcagaccctttcgccatgcccgtgcgtcagccggcgctgccgtcccctccctcggcacggtgacgtagccctccacctcgtccacccctcggtttcgcccggaagccgttcttgtccgtcgccgcgaacctctccatccgcctcaccggagttgttcggccgcccgtccctcctcgcccgtgcaccggtcggccgcacctccaccaccttcggcatcgcagccgcgacgtcgtcctcggcatcgcttccccttcggccgaacaccgccggtgtccgtcgtcgtcttcaccgttcatccttgccggctcgtcgtctcgcggcgccgcctccgtcgtcggcatcgcagcggcgtgttccacgccatcctcgcctccgtgcagccgctgccggctgccctcgtcgcctcctcgccggccccggtcgtcgtcgtcgtcgtcctctcgtcgctcccggtcgtcgtggcgttcgtccctccgtcgagccgttctcgtccgtcctcggtgtttcgtcaaggtcgctgtagccgtcgtcgtcttcgtcctcggctccgcgtcgtcaagcctcgtgccggccgcgtctcgccttcgtccaaggatcgccgccgaagtcgtcccctcgccgttcgtcttcgtagttcccggccgtctccgccgcgcccgttcgtcgttgtcgttcccacgcctcgtcgcgtggtggtaaggatctctcctctcgctgccccgtcctcgtcctttcggtgtcgccccgtacccgttgtgcggttgtcgaccccggtatccgtgtaccggtgtcggtagtcgttcacgtgtgcgggtggtgaccgtgtagtgtccgtgttagtgtgcccgctcggtagccgcgtggtttccacgtgtgcagcccgtgtggtgtctagtagagtccgtttgtcggccactcgcctcggttgacacacgggatctgcttccgtcgacccgtggaccgtctctgtgtactcggtctaccgcggtcctttaggttgacatgtggggtccgcatgtcaacggcgcagccttcctgtcttttccaggctagcgtttacacatgttttatagttgcaaagcttaattataataatccgcaaatctccatataacagcattaaacttcggatgatcatatcttggtcatacgagctccgaatcgacccgttcaagtctcttaatgtttgttataacctaaagaactgtgtgctttctttttatgtgttgttattgcttctttataggcttgtagctttgcttgtgtgcttcgcgtagcttctgtcgttccggaggttccagaagcgtggttcgcggtcgtcgccgaaggttcggaaggccgttctctcggagcaaggcaagtcacatcatccttgagcatattgaatcccagtttataaaattattttgatttaaattaatgcattatcgctttatttaaattcccgcgttatcactgttttatctagccatgcctatttacctttgttatgaccttatcattgttgttattgttactattaccttgttcaccctaggataaacaaaaccccaactagtgggtactctattcatggtcccactagtatgaatttaggtagatgcttcgctgattaattaggcaacattaggtggtttttataactttagactttgggaattctcatatcatttggacactatggaatggttggcttatggtggaattggacatacccctctcttcctctttcaaagcccctaaaacctgtttttcggtggggtttgggtgcatgccagttgtggaaagtagcaccccggccactataaggatgaagctcgggcctctgttgcaaagcactaccgtacttccacatgtctagtgggtaaggcttagtttgtggctcagtctggttataaacaaaagtacacggatggagatggacgaagtcgggggtcgatggacatatctaggacaaatgaaggctacacgagctgcggcccggtagtcgagatgtcatggcacagggccggtgtcctgctgctgggggctcagtcctgcctacctgtcccgggggttccggccgtaggtggggttgggtcggtactcttgtttatggctaggatgggttgggaactatgtcacgtcttccgtccgtataccgtggtggtatgtggcacgtggttacacgtgaggaagatgtgtcttgtgggtaaagatgtacacctctgatcagagtataatctattcgaatagccgcgccctcggttatgggcaagccgagcaatgtacccaagttagtgttttaattcttaaaatttgctcaacaactaaaatgtggaatggttggcctgggttggcttgggacgagctgggacccagggtcgggttgccagttcggtctgaatcatcgtaggccttgggttaaggcaggttcgtgtgggtgcacggccttgattaataatactgtgtagctctaggatcgtctttttaaaattggctttgggcaactaagtgacttttaagtgcaaaacctaacccttatattattaccccttgtacccccttgcattagtcatgcatctgccggtgtggcttgctgagtactgtggttgtactcatttttgctcaatctttccccccccccccttcagtaagagaagctttggagatgaagtcctaggtggagtcctggcttataccccagttgagcgcctgtgaagatggagccgtaggcccgctagtccgctgctgtttattttttgattgtcaggccttaagtgcctttgtaataatgtaaatattatcgatataataaagatgtgtcttttatatcatgtttgtgtggtgtaccccggcttttcctgggacggggattaatacactagcgttcgggaaaatgtatttttctcagtcgtgacagcgacggcatgctatacaagctgagtacgacaaagcctccgtcgccgctgctcaagctcaagcacaagtgcaagttgccgaaccacctcccctctctgtccgccagtctcagccggcgatccaaggacagccaccaaggcaaagccaaacccccataacttggagaaagttcagaatagaccgtgcaggcaaggcggtgatggctgtcgaagaagtgcaagccctccgcaaggaggtcgacacccagcaagcgagcaactatcagcagccagcccgcaagaaggtccgaaaggacctctactgcgcctttcacggacgctcttcgcacagcacggagcaatgccgaaacattaggcaacgtggcaacgcgcaagacgcaaggccgcagcaaggaacaactgtcgaagcaccccgcgaagcaattcaggaacaaacacccctagccgatcaacgccattatgcacagcgaagggtaatccaagtgattacaagagctgacccgccaagccagttgtcgaaacggcagaagaagatgcagacccgtatggtccacagcatcacttcggagggtgaaggagcgccgcaatatctgaaccagctaatttcttttgggccagaagacgcagaaggagttatgttcccacatcaagatcccctggtaatctgagctgaaatagctggtttcgaagtccgacgaatcctggtagacggagggagttcggccgatgttatcttcgccgaagcatatgccaagatggggttgcctacccaagcccttaccccagcaccagcatcgctccgcggtttcggcggggaaccagttcaagttctcggccaagcactcttgctgatagcctttggctcgggggagaacagacgtgaagagcaaatactgttcgacgtcattgacatcccgtacaactacaacgccatcttcggccgcgcaaccctgaacaagttcgaagccatttcccaccataattatctcaagctcaagatgcccggcccgacaggggtgattatagtcaaggaggttcagttttcggctgcttcaaaaggcgatctagccataattaacagagcagtgcacagtgttgagaccgaactgcatgaacggccgaagcacacgccaaagcctacccctcacggcaagataacaaaaatgcagattgatgatgccgaccccacaaagctcgtatcactgggggcgacatggaagaagaagttgagaatatcctagaggtgctcaaaaagaacatcgatatcttcgcctggagccctgacgaggtggggggcgtcccggcggatctcatcatgcatcacctagcagtcaagccggacattaagccaagaaaacaaaagttgcgcaagatgtctgccgatcgccaagaagcggcgaaggccgaagtacaaaaattactccgggcaggggttatccaagagattgaccatccagagtggttggcgaatccagtgctggtgcagaagtcaaatggcaaatggcgcatgtgtgtcgatttcacagacctgaacaaagcgtgtccgaaagacgatttccccttgccgcgaatcgaccagctcgtggattcaacagctggatgcgagctcatgagtttcctggatgcatattccggttaccaccagatccacatgaacccgctcgacatccccaaaacatccttcatcactccattcggcacattttgtcacctcaggatgcctttcggcttaaggaatgcaggagcaactttcgccagactggtgtacaaggtccttagcaagcagttggggcggaatgtggaagcttacgtcgatgacatcgtcgtaaaaagccgcaaggctttcgaccatgcgatcaacctgcaggagacgttcgacagcttgcacgcggcaggcataaagctgaatccggagaagtgcgttttcggcatccggcgcaggcaagttgttgggtttccttgtttccgtaagaggcatcgaggcaaatccagagaaaatcgatgccatccagcaaatgaagcctccgtcaagtgtacatgaagtacaaaagctcgcaggccgaattgcggcactcagtcgattcctctcaaaggcggccgaaagaggtttgcccttcttcaagaccctccggggcgcgggaaagtttaattggacaccagagtgccaagcagcattctacgagctaaagcaatacttgcaaagcccgccagctctgataagcccacccccaggaagcgaactgctattatacttagcagcttcgccggtggcagtcattgctgcactcgtccaagaaacagagtccggacagaaaccggtctacttcgtctccgaagcactgcaaggagcgaagacaaggtacattgaaatggaaaagctcgcttacgctctagtgatggcttcgcgcaagcttaagcactacttccaggcccacaaagtcatagtgccatcacagtaccccttgggcgaaatactccgaggcaaggaagtcactggccggctcagcaagtgggcggcagagctatccccgttcgacttgcattttgttgcacgctctgctatcaagtctcaagtgctagctgactcgtagctgaatggacactagtacttgcccccgaccccgagcccgccgaacaattctgggtgatgtgctctgacggttcgtggtcgcacaggggggcaggcgttgcggcagtcctcttctcgccgaatggtgtgccgattcggtacgcagcaagactgcagttcgacacaaccaacaatgcagcagaatacgaagctgttctcctgggcctaagaaaggcgaaagcactgggagtccagcgcctgctaattcgaactgactccaagttggtagcaggccatgttgacaaatcctttgaggcaaaagaagagggaatgaagaggtatctggaggctgttcggtccatggaaaaatgcttcaccggcataacggtcgaacacttacctagagactagaacggggaagcagacgccttggcgaaatccgctgcttgtggtggcccacattcgccgggcatctttttcgaagttctgcatgctccgagtgtgcccatggactgctccgaagtcatggcaatcgaccaggagaaactgggcgaagacccatatgactggcgaaccccatttgtgaaacaccttgaaactggctggcttccggtagacgaagcagaagcgaagcgtttgcaactcagagccacgaaatataagatggtctcgggtcagctttaccgctccggggtgcttcaacccttatttcattgcatctcttttgccgaaggcaaagaaatggcaaaggacatacactaggggctatgtggcgcgcactaggctgcaagaacagtggcctccaaagtatttaggcaaggagtttattggcccactgtgttgaaagtctgtgttgagcaaataatgaagtgcgaaagttgccagcgtcatggccgaagccaatctgcgccccagtatgatcggcagcccattgcgccaatatggcccttcgccagatgggggctggacatcatggggccgttcccggtggcgcgaaacgggtataaattcgcaattgtagctgtggaatatttctctcgatggattgaagccgaaccccttggggcaatcacttcggcagcagtacagaagtttgtatggaaaaacattgtttgtcgtttcagagtgccaaaagagttcattactgactatggcaagcagtttgactctgataagttcagaaaaatgtgcgaagggcttaacctggaaattaggttcgcgtcggtcgcacttgtcacgcccggaaattcactagtaatttccgaacttatttgtgcataaaatcctcgtccaggaatcagccgaggtacacaaactgacaatttaatatacaaatccatcataataataacgttacacacttacaaaagaaaagaaaacagcagcggaataacggtctagcgatggcttcagctccactcccacaggcagctcaactggggtataagccaaacgtcttctccttctggatcctttttcttcaactgaggttgattgattattgcaagaatgagcatatgacatactcaacaagccacacagcaaatatgcaagtgcacaaggatgccaaaggatggcataatataggctcatttgcaaaagcagcatttagcaaagagttaagagtaataaaacggtagagttattgattagaaattttaatcaacactgaacagcacacccatgctgcacaggcccaaccatccaaaacaaccatacctggctgtacagatctaactccaaaccaggagctaaacaaattattaccagttatagcatcaataattattgtgagaggtgtgagactaatcatgaaaaacattgctcaacccgcccataaccgcgggcacagctattcgaatagttttactctggccagaggtgtaccactgtacccacaagacacagcctcaacatcatgtctaccatgcgtcgcgatattggaaagtacccgaatagaggctgtgacaataccctctgcacaacataactcaccacagtgcaccattcctggatcataatcacccccttataaaacaaggcatggactccccagtgacccccgtgggcttatctccgccacttctcagtctggtgctccgcaatgaatcatgctatacaaaagataaagccgttgcccacgctggcttgtggttggcacggttaatgtttcacaacagtagctcgcgaaccggtccttaattgccatgagcacgactctcaaaaccatgtgctcacaacccaccattatcaagttttagttggcaagtaattaattaaccaatcacgattgaccatcgtgaactatcattaagccatcattaaataatagtgagtcataagttatcccaatagtgtgctaatgtttctaagcatggctaagcaatcatatctaatatcaagctgaaccaatatataaagctcaactagtcaagttataataacccaaggtatcaaggaataaagtaatcaatgcaaacaggccataacaaaggaatagattcacaccacccaatggcattcgaaaataaatgcacagttgaaataaatagagaatttaaatataggaacaacatgttcaaaggattgtgtttaggatctgtgtgacttgccttgcaataatcggtcttcaattaatcttcttgaatacttccggcgcactcgcgaaccttcgcaacgacggaaacgacaagctaacacgcaaaacgaagaaaaagactaataaaaaccaaataaacaatacataaaaagtaaacaaacatgtagatcatgattttagatgaattatgagacttgaacggcctcattctgacttcatatgaatttattatgaattttacaagattaaatctaattaaagcccatttaaaaggaattaaataaatttaattcaatttatggataattttaatatgtagatctttattttatataacttttgcaacttgaaccacattaaactgagttacaatgaattagttatgaatttttaaagattaaatcggattaaaacacttatatggattttaattgaattatgacgcaataatgaattatttttgaaaaggaaaagggaattattgcgtcagcggctagggtttgcggtggaccgggtgcacggcggcggctcacgggaacgaacggccgagatcgatcctatccaaaacggacggccgagatcgatcagtccacgaccgggccacggcagacggtcccgatgacgtcagcgatgacatcaacaccggcggcggctcggcaacgcatgctcgccggcgaacgacggctcgacgacgcaaacggaggacaccaacgggtagagggcgacacggcgaactcaccggtgaccaaaacaacggcggaaaagcaacggacggcgccgacgacgaggaagaagcggcggcggtcttcgggtcgacggtgacggcggtgctccggcgatcgacagcgacggcggaggggcggacgaggacggcgacgcgacggcgaccacgacggtgacctccccgagcgacggcggcgactggagcgatggcgaagcacggctggagcggcggcgacgacaacggcacaaggttacacggggctagggtgctaccgacggcgagagacgaaggcgagggtggcggcgggtagagggaagctcgggggtccttttataggggcaaggaggtggaggcgaaagcccacggcgaccggcggcgagatggaaagctagggttcggaggagagagatcgatccgaatcgaactcgaatccacggatttccaaacgaaattagccgacgattccataagagaaaagatagagtggatcgcggggatcttttcccctctatcgattcggccggagatggaaaggagcgatggaatttggaagggcggcggcggcttgcgcgcggctagggcacggctgcggcggcgcgaggaggacgacgaccccgacaggtgggtcccgcctgtcagcggctgagagagaggaggaaggggcgcggcggactgggccgactggaccggggagggagagagaaagagagaggttttgggccggctttcggcccaaagccaaaagagacttttaaaaacctttttcaatttaaattattcatgaaatacaattccatttattaaaaatacttccttagctcaaataaatcccagaaaaatctaggaattatagaattaagcaaagtatttaacaaaattttatctagcccaattttatattgagatttagcaaattaaaattagatcttatcttttaggcttttaagatcatttctaattattccttttaaacaacagtttataatttaaggatttttaaacaagaaaagctcttaacaattataattagatcattattgatcaaataattactgaactgttctttgtatcatttaggaattgagctctgaaaaatccgagaaaatttcagagagttgacttaatcatggagaatttaataaaaattaaatccacccatgctttatatttaggaaattttatttcccacatttaacttcacttgtaaattaatgaagatttaatataaattctaataataatttattaaataatttataaatcctgaaacgaaaatcaggatgtgacaacacccgcagtcaaatggggcggccgaacgtacaaatggcaagatcctaaaagcactaaagaaaagactcgagggggcagcgaaaggcaaatggccagaggaattgctatcggttctctgggcccttcggacgacccccacaagaccaaccaagtttagtccgtttatgcttctttattgcgatgaggcaatgaccccagcagagctaggggctaactcaccaagggtgatgttctctgggggcgaagaaggacgcgaagtatcgctcgaactcttgaaaggagtaagagtcgaggcgcttgagcacatgcacaagtatgccacaagcacttcggcaacttacaacaaaaaagttcgacccacggagctgatgcctggtcatttcgtcctaaagaacaaggcgaacccagtagcggttggcaaacttgaatcaaagtgggaagggccataccttatcaaacacaagtccaggatgggatctttttgcctagcgacactcgaaggcgtggagttcgaccattcctagaacgctgcctctctcaagcgcttctatgtctagaatgggtggcacccaaatcgccaaattgtaaaaatgtacatactgtcatgtaagcccttcagcactatataagcccttcggcactatgtaagcctttcggcaagaaaaaaaagaagaaagagagaaaaagaaaaaaaaaactagatgtagggctattatccaccatggaggccctaaccagtataaaatctctgtgtcctccgccttcttcttatttttcgtgtgattgataatttgtggaaaaaccccaaggaaaacgcctgatcagcgaaaaaggccaggggggcgaaacgaatcggccgaagcatcgctcgccgaacgttgaaaccgcaacagcttgtctcggaaaataaatagccgaacgacattacgtccgatcagcataaaagcaaaagcgcttctctcgacacagaacgctacagatcaaagatgaacgacgaaaagctgaaaagtcagtacacctatttcgctaatatatgcaaaggggccggcatgttccgacctaacggaagcacaaaatgtgacgatgcaaacaatagcgaaaaggaaataaaacacgtctttattaacttcgaaaaaaataatcgaagaatagaagtttcacaacacgacataattcaccttacaagtaaattacatcttcgtccccataatcactatccctctctaaggaatgataaggcgaactaggttcgtcatcactactaatatcgtacacaaccttaagaggagtggggggtgcaacacaaactaaactgtaacgacgctgaaagttcgttccctgacgattagtcttctgatggtttcgccaaaagcgagccatatcctccaaacgttttgaatgaacaagatcgtaatcttctaaggttcgcccggggtgcgcccgcagccagttggcaaccttgaaaaccttataactgcgaccgtttatctccatttcgcgataaacaggccgaaatggacatcgcaccttcggcagacccttcactgccacaaatttctcattttgacttcgccagctcccgaaagggggccggatgaacgactttcggcgaaccccctgatggacagtgcagaaaaagcaaaacgcagcttacatagtaagaataggcggaagaagggggaggtatggcataatgcgagacgagcgaaataataatacgccaaagacttcgatcatcaaaaagtaattaagattgtcacacattccaaatatacaaaaaaaaaagccttttttttttaaggtttggcgacagcctgccgaatgtacaccattcgcctctccaggcaaactcaaaaaaggaagcaaaactacaaaaacctaaggaaagggcggagggcctcacacctctaggtgatcctaggcatcgcctccaacctcttcgcccaccgcgtcctctccttcgccctgatctgccgcctccgccttcgccagttgctccagaaggcgcgccttggcagcggaccggccgtctttctgccagaattgttttcgccacgcgcgaagagcgggcgaaatattctgcgcactaatctcccagtcccacttcgcgtaggtagggaactcggcgacgtgctcgcagccgaactgctgcaagaggcctaaggtgaaagccgccgatacacgtgcacagcaatcgcgccgtacgcggtggcgcagtccgaaaccaatccgccagcctgctgggtccactcggagaagtcgaaggctgaggcatcctcgatagggaccccccgcaccttcgcgcccatgtcggtaagggcgaggcggagtgtttggcaagctgttctcgcagattcggtggtcttcgccatctcctgcgaaaaccgctgcgactcctccgcggcactcgcttcggccctgctagccttctggcgaagagactccatcttcggcttagtaaggttgtaatagcgatgagcaccgccgaatgggccttctccttctccagttcggccgtgaggcgatcaacctcggcccaggcctctttccccttgtccaattcggactgaaggcgtttgacctcagttttcgccttcttgagggtgcggaccagggactccacctccaggttcttgcggcttatttcatcatccttggcccgaagacggctcttaaaaccgtcaaaacgggcccgcacggttcgctctttcgaacagtgagccgcaagaatctagatgaaagataggagcgggcgaaaagaaaaaaaggttaactgcgagacgtaaaaaaaagagggaagaggaaaacgaagaaggaagaaaaggcatacccgaaccgccagacttttgatggtggaacacccctcgtcgaactcgttaagttcggtgaacaggctcggggtgccggcgggcaagaaagattgcttactccctccacaaagggaataaggtccggccgggtctcgaagtcaccaggggcgaagtggggcgccgcaagggaatactccgaggcaaatgcttcggcggccgcacacttccccttcgccttggccagcggcgaaatggctggctcgcgcacagggctcccgaaaaccctcgccgcagccgacaagatccgttcggcggaggcggaagccccggcggcggcgctaccgcctgccccagcaacgccgagcggagcaaggggagcagccgaaaggtccaaactgcggccagcaggtgaggtcggagtctcgtcagaagactcgtcgtcgctgaaaacgcgagcgatgtcgaggaatcccttcttttttaagatcttcttgaccagacctcctttcgccgccttgcccgacgagaacgcaactaaggccttcgccccttccaaatcctttcggcgaagaggggagctgttcgactccaccccagtctcgttgtgatctggacttggggtaggagtgtagccgggggtgtcgacgcggtcttcggtcgcctcgttcgcggccttatcagccacagcctccacctcctcctcttcctctccttcctccttgccgtcacgttcttcggcatcatcctcgtcatcggcgtcggagtcagacgaagcaggaacccttcgcttcctgggggcaagcttcacttgtccacgcatccgctttcgcgaagggcccgcatcgtcatcggctttttggggattcgcccagggaggcagttcgccgttgtaaacccggttcgcccgcccagccgcttgtcacgttagcagctggctatactcgactaccgaaacatcgccgatcatcctgcgggcttcggcttcggcctagttgagggtcgacactgtaaaagtaaagggtgtagctgcgttaaaggtcagacaagacaaaataacaaaacacaggagtgtatagcaaaagaacggtcttactgttcgtcccctcaggaagaaccaagttcggcaaaccgtcagcttcttcccattgctcgatcgtgacttgccacgactaggagaggggaaagatgcgaagcatacagaactcctccaccaagtcacggcagctaaggcaggagcaaaccttgcacaacaggacgaaccgcgcctccatagcgccgtccacggcgatcttgggttttcggttcggcgcaatcgccctacgccggcaccggagggcttttgccgagtcagaaccagccgcgaaagggatggtgtgatagaaccacctcgacatggcagcgttcaccggccagagatcggaccgctcggggcgaacaccgtcttcttcgttccagccggggtaatcaccgtcttcgagttcacggtggcgatgaatatggcgccgaagagctcggcgctaggctcaaacccggaagtccggcatgcccagtcaaagatggagattcaaactagcgccgccgggctcaactgcggaagctccacctggaaaaggcgaaggatctccggcaacaacacgttgcacggaaaccgtagccccacctcaaaaaaggcggcgaacaccaccgtccggttgtcgataggctttggcaccacggccttccctggggcgaaagcttgccccgcgaccaacgccccagagctgaccagcttcgccagctcaacgtcgtccacaagagagacccccaaaaaggcggtgctgtcatcatcgactcggccgggatccagccctttcgctgaagcagggtttggcttgcgaggggccatggagaacggtgcgtttacggtgacgaaaaaagagattgggcgaaacgcctgaggggtcgaaagatgctgtggaaggaagagacggaggaagagagcgcgcacggtaaaatggcaagtgtggtggtgaaaaggaaagagcagtgggaatatatagcccacccaggcgaccgttcgcctacccaccagtaataaagcgccacgtgtcgcaaaggtaggcgaaacggtaaattcccaccgatcgagcagcacagtaaaaagcccacgatgggaaggcccaatactgttctgttcggcccaggaaaagagaatatatataaccaccaatcgcaggaggcgaagcgcggcaaaataataccagccgcacaagtaacaaacttcattcgcaggaataatgtaggtttcggcaggagcatcggtcgaaagggggcgctgcataccataccacatggtttgcacggtctcggccgaagctccaatctcacccttacccgtgaggggcttgttggcggatggcatgaggcccttcgactaaatctgccgaaacccgtggcgaaggctatgaagcaagaacggcgcgaggcgaagagtcgtacgagtgccttgccaggccagaggcgtctcaggcgaatggtgtaaggcgaagactacctgccgaaggaagacgacttcgccatgacaagttcgcccccgcgagggccgaggaagcctttccggcccatcaagcctaagggctatagggccggcgatcgccagacggcccatcaggggcccatgagcccctataacattatgtacccctataaatgtcccttttataagggtaatcatgtaaattcccctgtacaacctaaaccctggtagtaagaacctgtaatggggctataaatagtcccctagggccatgtaatggggggatcccaagtgaaattcaaaatttaatacatttcatttttccaaccactgttgagtaaccacgtctttcgacgtatgcagttgtcgtttcgacaacattatgtatctgctagcatactgtttggtagcattaaaacaaacaaacaaattaaacaatagtaataatgcttgttcttttttgtaattattattactgtttgctctagggccattcacagtgcaaaatactactacgagaagcctcgtagtgccacataggacagagacacatgtctcaaatgactttctccccacagtgcaaagtagctttttagagatgtttcagtcttgcatgccagaccccttttttttaattatagtccccatattttgtaatttacaggaaaccacaatattttgccccaaacaccacataaattagaaaaagaaatataaattttgcacctccccttcgctcgcaaggaggccaccctctatctcctccgtgcaccgcgcaccctctcccgaactgcaccgtcggctctccttcttccccgccccatgccgtagtcctggatctggtcagtgagcttcaacctcggacatccaagggaaaaagtgggggtgatctagtactactatggtgtttagtccacatctctatggtagttgcttttgcaccatttgtagcagcctcaaagtatatatggccaatcttgcaatcacctactcattgtttgttggtgcctttcttatggaagtatgtgctatcggcattgtgatattgtcatcaatgacataggcacattcgagaacccatatgtcttagtttatctatcaggaagaccattgaggagcagagaagttagtggtgtcaatttctatggggcaacttagcctaacaacatatgtaaattttacatcataggtccacacccaggatgatgttgaaggcacgtttcctctaatttcagaggataaacttttggattaaaatgacacgcttttcaaactgctaaacggtgcatttcgtgcgaaaactttctatatgaaagttgatataaaatatcagattaatccattttttaagtttgtaataattaaaacttaattaatcacacgctattaccacctcgttttacgtgaaacacttaatctttatcttcatcttcatcttcaggagattcaaacaccactggcttggatacgatccatatagatgaatcatgaatggcacgtacaaacacgtccagtggtggtggcaattaatgaattttcatacaactttatagtaatccttattatatgctgatgttggagttcagatgctttcctgctgcttattattgaatgtaagtcattgatattgtttgatttgtcttcagttttgatgtgttctttgttcttggttttcttcggctatatgatatctctcggctatatgctagcttcaaaattttcactaaggtggccactaatagaataaacaggtggctgaccgtatagtgagtccaactcaaacagctttcatgagaggtcgcaacatcctagatagggttgttgtcatacatgaaactgttcgtgagttgcatcgcaggaaattgagtggggtcatccttaagattgactttgagaaggcttatgacaaagtaaaatggcctttcctactacaaactcttcgcatgaaaggtttctcgccaagatggatttcttggattgagtccttcatttcgggaggaagtgtagcaatcaaagttaatgatgacattggacggttctttcaaacaaagaaaggccttcgacaaggtgatccgctatctcccattttattcaatattatagcggacatgctagcggttatgatccagagagcaaataatgcaggacagcttgttggactggtgcatcatctcattgatggtggattgtccatcctccaatatgctgatgatattatactctttatggaacatgatctagagaaagcttgtaatctaaaaatgttgttgaacgttttcgaagaattatctggcttgaagattaatttccataagagcgagctttactgctttggtgaagcccaaacagctcagatcaatatactaatctttttcaatgtgaggttggttcttttccattccattaccttggcattcctatacatcataggagacttcgtaattcggagtggaaggaagtgattgaatggcttgaaaaacggttggcaagttggaaaggcaaacttttatcacttggagggtgactaacactaatcaattcagtgcttaccagcctaccaatgtatatgatgtcctttttggaaatacctaaaggagtgatcaagaagattgattatttccgatcaaggttcttttggcaaggggatggacacaaaaggaaatatagactagcaaggtgggacatcatatgttgtcctaaagaccaaggggggttgggaattcaagatcttgaaattaagaacaaggctctccttagcaagtggttgtataaactactcactacagatggtgtgtggcaacaaatgctaaggaataaatatttggggtcacagcctttgtctcaagctcagtggaaagcaggagactgacacttttgggctagtctaatgaaggccaagcctgattttctcaggtttggctccttcaacatcaaagatggctctcaagttcggttttgggaagataaatggttggagaatgcctgtttaagagaacaatatcattgtctctataacgttgttaggcataaacatgcaactatttcagaaattttccaaaccagtcctataagcttttcttggcgcagggaccttactggctctaagttagtggcgtggaatcaccttctctcacgcatcgctaatattatattatctcacgaccaagatgagtttaaatggaatctaaccactgatgggagattctcggttaaatctctttatcttgcgttggtgcagaccgatgttcccaatataaacaaaagaatcaggaagatcaaagcccctctaaagattaagatcttcttatggtacttacgtcatggagtagtcttaacaaaaaataatcttattaaaaggaattggagaggaaacaagtcttgttctttctgccacaaagatgaaactattaatcatttgttgtttgattgtcgttttgcccgcgcagtttggtctttaatccagtttgcttcgaatattagtttacctaatagtacaactcatatgtttgggcattggataagaagacaaccacgcaatttgagatctttggtcttattaggggcaacaaccactatttggtctatttggctttgtagaaataatgtggtttttgaaagaaaaaacatatcttctcctttgcaggttatcttggctccgctcataggctatccttcagaaggtcaatttgcggggtactatcattgcggcttgtcaacaattggagctagtggccatggagttttctaccccggcgcatgggtggcgttctaggctacggttagagggctcctgaagttctttttgtccctgctatttggatgatgagtttatcttttgtttctttcttgttggctgtgtgcactctttgggtgcagaagccggaggtgctctcagaataattgtttcacttgatagaattttactgagattaataaagcttccattatcttaaaaaaaaatatgatatctcttaactgagctttctagctcttccgatttcggttcttagtctttatttttgcggattgtcaggccaacgaatcaacctcaatgtaacttactgagttcaagaaagcttttactattaaaaaaacaaatcaacctatttggttgtttgatttctgggttagaaataagatttttgccgtagaaatgcagcctgcagggctgaataaacaacggacggctgctgctgtttttgcgtcccagtcactctcatttgatagagagagccagtgtctttaacatctgaagctgctgttcaacacctgcaaacccagtgccacgttctgaacctgcaagcttctgcttgtgacgttgtcaagctccaacaattcatatcagctaactagtagcattatagcaaaggttaatatctgcagtgtcataattgcaaatcccccaaaataaacaatgctcttttcctactctctgttagctaaaaacagtgtagccaaaggtacgtttctcgaatcatctgaatctgaatgata

SEQ ID NO: 10293 - DNA, 1268 bp, Oryza sativa
attattgctaagtgcaccttttgcacagaccgtgttgtttttcttggttttgtggtgactgcagctggcatcaaggttgatgaagaaaagattaaagcgataaaggattggcctacacctgaaaatgtgaggcaagttcgaagtttccatggacttgcaggtttctactgacgatttgttaaagatttcagcaccatcgctacaccccttaacaatttgacaaaggaggatgttccattcaagtggggagctgaacaggaccatgcctttgaagagataaaacaaaagctttgtgaagcactgctgctacaactaccaaactttggtaagacctttgagatcgaatgcgatgcaagtggtattggcattggaggtgtgctacttcaagaaggtaaacatgttgcctacttttctgaaaagttaaatggtccacatctaaactactctgtctatgacaaagagctttatgccttagttcgagttttggaagtctggcaacattatttgttacctaaataatttgtaatccattctaatcacaaatttttatgccttagttcgagttttggaagtctggcaacattatttattacctaaagaatttgtaatccattctgatcatgaatttgtgaaatatctgcaaagccaaggcaaactgagccgtcgacatgcgaaatggattgagttcattgaaacattttcctatgttgtcaaacataagtgtggcacagataacattgttgcagatgcttcgtctagacaatgtgctttggttacacaattagatacaaaagtgcttggtttggaatcaattaaaaaactttatgctaatgaccctgattttaacgaacctttctctaattgtattgctggaaaaggatgggacaaattctatgtgcatgatggattcttattttggactaacaaactgtgcattccagcttgctcgatacgaaatgttcttttgcaggaatcacatgctggggggttggctggtcattttggtgtaaaaaagactttggacatgctttctgatcatttcttttggccacatatgcgacgtgatgtccagcgacacgttgagcggtgcataacctgtttgaaaagtcccgtcttaatccccatggtctatatactccattatctattccaaatgtaccttgggaagatatatctatggattttattctgaggtaacctcggtctcagagggggagggattccatttttgttgttgtcgatcgcttctcaaagatggcacattttat

SEQ ID NO: 10294 - DNA, 3236 bp, Oryza sativa
tttatgttcaggttgcccattctgttagcagagttgagtttcacgtaaaagacaatgatgtttttggagcagaacttataggcgtggttcataccagttgaaaacatcacaccaggtgataccgtcagtggttggtttccaatatctggtcagtatagtaatcctatgaaggcatctcctgaacttcatttgtctatccagtacaagccaattgagcagaatccattgtacaaagatggagttggttctgacggttgtcagagtattggtgtgccaaatgcttattttcctcttcgaaagggtggtatggtcactctatatcaagatgcccatattcctgatgacttttgtcctaaaattgaaattgatggtggaagagtatacgaacaaaataaatgttgggaagacatttgccatgcaattgctgaggctcatcaccttatttatataattggttggtcgtgtatcaccctgtcaagctggtaagggaatcaacaaaacctgtgcccaatggaagcccaccaacccttggagggcttttgaaaaccaaggttcaggagggggtccgtgttattgtgtttctttgggatgacaaaacatcacatgacaaatttctcttgaaaacggtaggctgcattccgaattatctattttacccctttatcatcttgatttcctcatgctatgaaaatggctatatatgaaatttactctgcgttttgaagtgttgtgaccttccatttttggttattatgctagtagaatacatgctttgacaaagggacaatgattataaagctaaaagtgcttatctaatatctctacatgctactacattaataataaaaaggtggtgagtgctgaaaatataaactgaaaagggtgggaaaaataaatggtaggtaatatcttccctcttggtactggtgtcatgggagctttggtaggactgctgagaagctaaatatccaaagtactcctttatgtttcggttgttattgtagctcaacttatataaaattgtttatgagataaatcttgatgaacaaaattcttactgcaaatgcatttgtttgaatgctgttttctttaggaaagagtagtctgatggaaatgatgtaggttgaatgcaggatggactcatgcatacacatgacgaggaagctcggaagtttttcaggcattctggtgtccattgtgtgtgggctcctcgctacgctagcaacaaacttagcatttttaagcaacaggtgggatgtatttgctcccttccattttggtggcagaacagttatacttatttatactccctctgtccgagaatataagggattttcactattcacgtgtaacggtttgaccactcgtcttattcaaaaaatttgtgtaaatataaaaaacaaaaagttgtgcttaaagtactttggataataaagtaagtcacaaataaaaataataataattccaaaattttttgaataagacgaatggtcaaatggtgcaagcaaaaagtcaaaatcccttatatccacgaacggagagagtacatactagttgataccccatgctttgctacgggatatgtggatgaatgtatgttatacattacaaaaatgatagacgtatatgtttaaatcatgtgaagatggtgatttgacattgcttacgtgctaagttctaaaaatacaacctaattacaaatgatatatcatgtttgcgagagatctaaaatactctagataataattgctagtgggtgatgatgtggcacacttgcatcttgagctttaggagttagtgggtaccaactatatagaaagtatagattgagtaatcgttcttgttctcttgatttttgctccttgtctatatctcctagcttcttaagtatcatcttttggaaacttaaaaatgtgtacatgcctatacatagagaatgtttgctgtcatacttgacaagattctaatgaatttaattcatgcacatgatgtaatattcctttttttgaccgaaaatgatgcaaaatattcctttcatgtataatgatgttcttcttttcttatttgatattgaaaggagataattagtaatttttcatttgtaaattacttgaaaaaaaattgctagtgttatttataattcagaaatatttatattaggagaaaaacctaattttaggtgtgttgtaaacattaaagcctattactaccccttatgccaactgccatgctcttcattaaacttctgtcgaataaattagcaattctcctcatatttctgattgtctggaaaagtccaggtgaactattgacttatataagagcatgctgcatttgtacttctaatacattctatccgttgaatttgatgcagtgaacaataattacaatgaagttactggttaataaagctttcatggatgcaactaagtttctaacaatgcttagttgcttaatgtactgcatctcaccaaattttcttttccaggttgtaggaactttgtttacgcaccatcagaaatgtgtcattgttgacacccaagtcatagggaacaatagaaaaataactgcttttattggtggcctagacttatgtgatggcagatatgatacacctgaacacaggctcttcaaggatcttgacaccgtcttcaaggatgatttccataatcccacattccaagtaaattctctaacactgtagttttccttctagagattctcctacattatttctaaaggggaatgtccaccatcggccctttaactgtgggcaaagtccatttaaaccttgaactcaagaatcgtctcatcccaaacttctaacgttgggccaaatatcaccctggccagagctaacctcacaattcccatcaactatagtattttccataaaaaccaacacctcttctgagtgctcaaggacacatcatgatcatacagtcatactatctgcagttctgcactattgtggtttctccttgtggactattttttagtttaggggcagaaagtgaaggcttttttcctttctaaaactataaatgagacatgaacctgctaaaatttagaacatcattctttcattcgcaggttaataagtctgggcctagacaaccatggcatgatttacattgcaagattgagggtccagctgcctatgatatacttacaaactttgaacagagatggagaaaatctgcaaaatggaaagtcagcgttagaagagctgtaag

SEQ ID NO: 10295 - DNA, 790 bp, Oryza sativa
tataagggttagggtttgcagtaaacagcattaaaagacccttcgttgctcaaagctattttgtaaatacgatcctagagctatacaatattattaatcaaggccgtgaacccacacgaacctgccttaacccaaggcctacgatgattcggaccgaactagcaacccgaccctgggtcccagctcgtcccaagccaacccaggccaaccattccacattttagttgttaagcaggttttaagaattaaaacactaacttgggtacattgctcggcttggccataaccgagggcgcggctattcgaatagcttatactctgatcagaggtgtacatctttacccacaagacacatcttcctcacgtgtaaccacgtgccacataccaccacggtatacggacggaagacgtcacatagtttccaacccatcctagccatagacaagagtaccgacccaaccccacctacggccgaaacctccgggacaggtaggcaggactgagcccctaacagcaggacaccggccctgtgccatgacatctcgactaccgggccgcagctcgtgtagccttcatttgccctagagatgtccatcgagccccgacttcatccatctccatccgtgtactatctccatccgtgtacttttgtttataaccagactgagccacaaactaagccttacccactagacatgtggaagtacggtagtgctttgcaatagaggcccgaagaccggtccttatatggccgaggtgctactatcaaaaccatgcaccccaagcccag

SEQ ID NO: 10296 - DNA, 2043 bp, Oryza sativa
gtcataaagatgaagcactaatcttgagaacacaagtggttataccaagttttacctcttgttgaagatcgaaacggatgcagctcaacccaaaagcaagaactggtggaaccaaaataaaagcaaaagggtggcgatgcgcagaaattgtattgaacgtgtgtgttaaaaattacatagggctcggggtctatttatgtcatgaccggaaataacccaacgggcgttccttacgtgcgtgtattattctttgtcccaggaggcaaggtacaccaaaagttgatacatttcagactttctcaagcggaagcgtaaataattaatttattacatgggcggcgaaggcccagcacacacaaagacaaacgggaaacagcggaagactagggcgacgaccacaggcgcttgacgacaggcacgagctagacaccaaagccttcatcttccaggaactcctcttccgggtttgggaaaaattgagcaagactgagtacaaccaccgtactcaacaagacacacccacaagtgcagaataaatgcaagggagtacaaggggggttataatataagggttagggtttgcagtaaacagcattaaaagacccttcgttgctcaaagctattttgtaaatacgatcctagagctatacaatattattaatcaaggccgtgaacccacacgaacctgccttaacccaaggcctacgatgattcggaccgaactagcaacccgaccctgggtcccagctcgtcccaagccaacccaggccaaccattccacattttagttgttaagcaggttttaagaattaaaacactaacttgggtacattgctcggcttggccataaccgagggcgcggctattcgaatagcttatactctgatcagaggtgtacatctttacccacaagacacatcttcctcacgtgtaaccacgtgccacataccaccacggtatacggacggaagacgtcacatagtttcggggatcctaccatagacaagagtcgacccacacgcatgcaagctcgaaacctccgggacaggtaggcaggactgagcccctaacagcaggacaccggccctgtgccatgacatctcgactaccgggccgcagctcgtgtagccttcatttgccctagagatgtccatcgagccccgacttcatccatctccatccgtgtactatctccatccgtgtacttttgtttataaccagactgagccacaaactaagccttacccactagacatgtggaagtacggtagtgctttgcaatagaggcccgaagaccggtccttatatggccgaggtgctactatcaaaaccatgcaccccaagcccagcctaaaaccattttgagggttttgaatagagggggaggtgtgaatccaattccacaataatccaaccattccatagtgtccaggtgatatgaatattcccaaagtctagagttgtaaaaccacctaatgttgcctaattaaccagcgaagcatctacctaaaatcatactagtggtaccatgagtagagtgtccactagttggggttttgtttattctagggtgaacaaggtaataataacaatagcaatactaataaggtcataacaaaggtaaataggcatggctaaataaaacattgataacgcgggaatttaaataaagcgataatgtaaaaatttaaatcaaaataattttgtaaactgggattcaatatgttccaggatgatgtgacttgtcttgctcgctttcccaaacgtcggcttcaacctccacgaagagcggatcttccgaagctgcggcgtctacacaaccaacggaaaagaaaaggcttttactctaataaactccatataacaagcaggaacaaagcacaaaattgggttcttgacttcttaaggaaaaattagagacttgaacggtccaattccgggaattcaaaaggccaagttatggcatttgaagtttatatgctctttaaatgaatatttgcaaatttcttcatttaaattttaattttaaaaagggtctattgc

SEQ ID NO: 10297 - DNA, 1882 bp, Oryza sativa
  unsure (1)..(1882): unsure at all n locations
gccatacatcaattgatttatatggataatcaatacatccaaaatagtttacatcgtgtacacaataattacggcaatacatcaacggtgacggttgaccgcacgtactttctcctcactatttgttccctccttgtgatcgctacgtgagtaaggggtgtcttcatttgataggaggatgctaggtcaatcgtcaccgtgaaagggggttgcccatccaactgatcataatcctcgttagtcttgtcctcaactccgacgatttttcttttgcctgggagaacgacgtgacgcttaggctcctcaggccctctgcccttctttcctttgctagacatgtccttcacgaaaaagacttgcgttacatcattggcaaggacaaaaggttcgtccgagtatccaaccttgttaaggtcaaccgttgtcatcccactgtcatcaatcattacgcctccaccagtcaacctaacccattagcaccggaacagagggaccttgagaagaccatagtcaagttcccatatgtcctcgatggcactgtaatacgtgccagttgttccatcgtgcccatggcatcgacacgaacagcgctgttttggttcgtgctcatcatgtcttgggctctcatgtagaatgtgtacccattgatctcatatccctggaatgtcgcgatcgacccagacggtccccttgccaggaaggcaagttgttggttgatcgactcgttacccatgagatgttgtcgtatccatgtggggaaagtatcaatgtgatgccatgtaatccatgcatccgacttaccgatgttcctggcgcgaactagagccaagtgctcctcgatgtaaggagctaccaatgaagattgttgcagaactgtggaatgggctttacggaataaattgttgtctaccgccattattgctttccttcgagagtttccctttcncngtagtctccnttcatggcgtgatcaaggtacccgattgggcgaagtctccgataaatttacgcaaattcgatgacctcctttgttccataacccttgncgatgcttgcctctgnatgagcacagttacgaacatacttcttcagaacgcccatgtacctctcgaaaggaaacatgttgtgtaggtacacaggccagagaatactgatctctttcacaaggtgacaaagcagatgcgtcattatattgaaaaatgaaggtggaaatatcaactcaaaactgatgagacattgcaccacatcattctgaagggcttctaatctatccggatcgatgaccttctgcgaaattgtgttcatgaatgcacatagctttgttattgttgcccggacattgtctggaaggataccccttattacaactggtagcagttgtgtcatcaacacatgacagtcatgagactttaggtttgtgaacttcttctccttcgtgcttattattcacttgatattcgtggagtatccagacggtacctttatgctctccaagcattcaaacatactttccttcactgccttgctaagattgtagctggctggactcaagtaatggcttcctttctcctttggttccgggtgaaggtcgccacgttgttccatatgcttcagatcattacgtgcttccagtgtatctttcgactttccgtatacacctaggaagccaagaaggtttacgcaaaggttcttagtgaggtgcatcacgtcgattgcgtgggtacgtccaagaattcccaatagggtaactcccaaaatatagagttcttttccacatcgccgcgtgaccatcttcgctctctataagctggcttgcagggcccctttccgaacactactttaagatctttaaccttagcaaacactgctttcccgttgcgat

SEQ ID NO: 10298 - DNA, 6470 bp, Oryza sativa
ttttcgcatacggctatttaagaaacccgcataaaaatatctattttcgcaaacagacctctaaggggctatatgcaaaaaggagcatattttctcatgcgattctcaaggagccatatgtaaaaatagatttttgcatacgagccttttaaatggtccacatgggaaattgcctctcttttttcttcctttactctctctttatcctattaggacttcaaatttttttcacttcctctgctctctctctctccctcttcctctcatctcctgatattgttttcacctcctctcgatctctctcttcctcttctctcctctctctctcctctcctttcctccgaccaggagcaggcggtgggcggctcggtgacctcaggcaccactactgccaatgatgaggtggcagccagtaacagcgccatccctgtccccgcttagcacttggaggccgacgacgacaaggaggcggccaggagcggtgccaccatcgacgatgaggaggcggtcgggagtggctccatccccatccctgcctggcgccgccaccgccgacaaggccagtgacgggtggtgcacccgcatgaggttttggttttggctgctagccccatgacagcaggatccgccggcgccggtgctggcactgcgacggccagatccgcagccgccacaattggggagctagggttttgttttttttttatttttttcagatttttttttgcgtgtggacgacataagcacccgcatgcaaaaaaaaaacattactatatgcgggtgcaccaccctcatgaaaaatttgctatttccgcatacctttcctagcagattggcggtctaaccgtaaaaaaaaaggttttggttgcatgggaatatggtttttattgtagtgcttatgcaaacgtttaccagctggtatgcaaaagatataggacgattgaacatgtgttcaccaattccacttaatgaagagacctgccaaaacgtcagaaacctcgtacattcttaagcgtataaacaatttgccactaataatggaataagatatcgccacggcttcagatatagatcacctttgctcaaaactagatccttaattgtatttaagttttttagaactaattattttcaagtgaaaacttaggtatcaaaattaataccccggggacacacatcccacatatatccacgtgaggagagtaatttcatataccactacgctataagactgacgatattctatctaagcatctaaaaaagaatggatggagaacaaatgtcaacatcaaataatatgctttgtgatatcccagtgtgctcttcaacgaatacaagaaccaagtgtaccaaagagggtgaatggtttcaacaccaaaaacttaaacttttagtgcaaagacaaaaaagttaccctcaaacttaacaaaattgcactggtcacaccgctggattgctgctggttggaccgtagtactctcgccagtctaaccgcctgcacgccgacagtctgaccgccgtcttgtcacaggttggaccgctttcctgctgctggtccgcccaatgaactccggtcaaatcgtcgggattcagaaaaacacatatcgatgaaactcttgaaaatatatcaattttattgtatcaatatgtgtttacaaagtgcatataaagcactcatctctcaaatcatgaagtaggattaaaaccttggagtaaaccctaactttaaagtcaatatcttctaaactcaacgccttgtctatttatacccacaacattgctatccctagacacgaatccaactagaactaggactcctaatcacataggaaacctacccaaccaagaaaacaacatccccatacaactccacactccaacactttaaaacttggactcaaatccaaatttgactcctcttttcatactcacatatggaaaccacgtgtagtccatatgaaaagtttctcctccacatgcatcccacacgctattcttgaacgtctagaccttaacttctcctaagtctagtcctgatctattaccggctatactctcatagcctcatgcaacacatgcacaagaacaacaaagaaactccatatccaagtacaagttcaaaccaacttgacttacatcatcacacaatagtatcacatatgaatagaaactatctagaaattaaaaatatgaagcaatttaaaaattctacgaaaataacccgaaaccaactccaagcccggagtctaccggtatgactgtccggttacctagtcagaccgcccggatacccctagtctgaccggacacccattggcaacctgcactgttcaccgtctgaaacactatgtaccatattttccaaaacactcacctttgacacaattatatttgatcatcacttatttcacattcaccacgtgtacataaattgattatcacgtccattcatgcatatcacgatcaacatcgagtatttcggttatgcagtgaatattaactgtgctaatttaatttaattttgtgcttgcatccattcatttcatcggtgcctagctgcacgtacagaagtttatgtactttcaaatatggcccacctgctttgttatattcttctcttgtagctttcatgtttttgtcccctgctgagaatatattcatctgatcataccttgtttggaatggttttctttttggaaaaaaggcgaaacaccccattagctttacttgaactattaaatcagataggtatagtaagcccctaacttgttcatttggtccaaatgatctctgagcggtttcacctctatggtgtcactggtggagaaaccctttgtagtcccggttcgtaacccccctttagtcccggtttccaaaccgggactaccaatccgggactaaagatcgctatctttagtcccgggtgaaataaccgggactaaagatcgatctttagtcccggttggtaaccccaaccgggactaaagatggcttagccgtaccggttggtgttaccaaccgggactaaagatcgagctgacctttttttttgcgtggccctgttgctgcatatatatgtttcagtacatatatgcatatataatatatgcatatatatatatattattatatttatatatgtttcaatacatatgtacatgcataatatatatgtatttatacatatatatgttatgcaaatgcatatgtatatatatatatgaccaaaatatatttacattatagaaaatgtgtacacatgcatatagaaacatatgtagtcatgtattaattacaatccattatatgtcctagctagctacgatttcgacgtagtagtagtcgctagctcagaagttaaggacctatgaattgtgtttccgtcgtagtagaattcacccttgggatcaaggatttgttcgttgatgaatcccatgagttgttcttgaaccgccgcgataaattccttgtgcgtggtcaggttatccctcatgcgaataaactatatgaatgtatgaaattgattagtatttaaacaagaaatcgatacgtaatgaaattttgaatttatttgtacgtacattgagctctcttgtgatgatgatttggtctacaaggcagtggcaatactcgcacacgtaatagccgcacaagttagttcccttcttttgctttgcgcactacaaataaatgacaaacaacgagagatctaattaatatacacttgtatgtatttgaatcggagaataaatgtagagcacgtgtactcacaggaaatttgaacttccgcctaagtctttctctccatttgccgcggaccaaatgacggaaccgataccaagccctacatggagtttaaagctatgattcgtagtagcaattaacataacaagattttcttaattaacagaggaacttatgacggtacctgtctataagttcaaaaaccttgtcaaacgtagactcttttttatccattgagtcatatacgttgacggtgcaggccgacaggtcgaagagtaaaagcacccagtggaatctgcaatgtgcgtgggatgcattacatatgaaacacttagcaagttcgtacgggaatgaaatttggtataggaagacagtaaaattaaactaactctgtgttgtacggcaacagtatgaacgtcttgtaatgctgcgccttcaggagatggacgagattgtcctctgtggcttgcggatattggtcgagcattgcgacgtttactttccgagggtcgatgaatccagtatcgaaaaccccccgccgtttggtcctttgaatctccattctacaacgataaaagggagtatattattttctatagtctacttatatacaaggacctaattaattaaaggagacgtagtaagaaatctaactgaacgatatacttacaaaatccagcaactcataatagagacgtcgagggcgtccagctggtatagttcgtagattcccttgaaattgatccagagaatgtcatcttcttgcaagaagtccgtgtccctgatcctcgctccgatcatctctctaccggtggcgctcatctccatgtacagctgatggaactcgtacatttgtgtgggtagggactgcagcagctcaggcttgacaagcagtttaccgagttcgtacatgtatttcacttccgccttttcgattggtgcgactcctagcaattgatccgtagttagaccggtgtcagtaataaattcttctatcgtcatttctttaccggtcaccaacggctcgatctcctggtttggttgctctccaagctgagggactggtttggactttccagaagaagctttcttcagcgttcgctcatagtccgatagcttaatggcctccttggcaggtgcagacatacccctgaagaagttcatgacactcgggtctataggaatcttcttttctgaacttcgaggcttgaattgtctcttgacttctgatgccacgtaagtgttaagctcctcttgcatgcaatcgtaccccgggtccttcttcttggcggcgtcaactttcgccttctttgttgcccttgtgtgggcaggcggtggagcttggggggcccttgactttgaaggtgccggaagaggagcttgcggaggagtcagtgtaggagcccgaggaggagtcggtgcaggagcctgaggaggagtcggtgcaggagcctgaggtggagacggtgctggagcatgaggaggagacggtgcaggatcctgaggaggagatggcggagccggaggagatggtgcacgagacgccacttgttgcccagggaggatgatgtaccgcctgcgccatagaataatggcttggcttgtgtctcgtagatgcgtctcaccgtctcctccagggtaatccagctcgaggtcgtcgtacgcgccttcgaccaactcaacttcgaccttggagtatcctgctggaatcggcctgcagtggtaagtacctgaaggatccattgggatggccatgcccgacgccaccttcatgtggtgagaggttatttattagtaatcaacatatataagcagcaactagcggaatgggcaaatctaaaatatataaactacgagcttacctttattgataagttcttgaaaggaatatgcagctcacatggtgtccgctgagtgatgtcatcaacggggcaggtggattcgtcctgggtttgcatggcgtccaagctctgtgatcctacctgccccgttgaggcgcagctgctacggtttcctgacgggctcaccattgcaggaggaatggtcggctggggatcattggaccgatgtgcggccatgcgttcatcaaccttccttgccacctcctcttgcatgctgagctcgtagctcgataccctgaactcaagatctgcaatcttcgcctcggtatctctcttgctcctcatcccactcctgtatgtgtggatgtcctccttgaacccaatcttccaaggaatcacccctttccctcgtgtttgtcctggatgctctagagtctgcagggcgagtgacagctcgtccctctctctatccggtcgaaacgtgccgtcagaagaggcttccactgcgtctgttagtcgacgcgcagcctctcatatctgatcgccgaagaccagtgagccatcagctggtttgagtgttccaccgtgagcatagtaccagaacttcgatcgttccggccaattagcggtggccggttcgatacccctctcaagcaagctagcctccatctcctcccacttcggcattgcgacgctatagccgcctgaccccaagtggtgatggtacttcttcttggcggcattttctttgtttctttccatcatcgcctgcccttgttcacctgtcttatatgcaacgaactcgtcccagtgatcccttagctttgggaatgtgtcgaagttcggtgtttgcccattcaggatatatttcatgtacagctcttc

SEQ ID NO: 10299 - DNA, 717 bp, Oryza sativa
ataaggtattgactaataccccagactgattgatcaaagcatggtgcacaacatagtcgacccggtcttagaaattattgaaaaaatcgtgtgccgcatcactattctgattaagatttcccccttgcaacccctaagcaccatcaccttgaactccatgcactccatcgccttgaactccatggatcccttgagagttgtcaccttgacttcctagagaaccgttggtagcacctttgtcactcagttgagccgagccatctagagcttgtttcctgtcttcacctttggaagaactggtcccatgatctacatttactttatacttctgaaccaatgttcccttgcggatctgcatgaatgagttcaagaactgatcccaggcttgctgcaacattgcttcaaaatccttcttctgctcaggtgtgaatttctctggatcgatgggcacgacgtttccttcattgacgtcagtcaaccccaacttctggatcttttctttaacagtgcttgggctagccgaggatggtgacagcggtggcttctcggccatgaggaagaattgcttgctgacttctaatcggtcccactaggcctgccaaaagcgtgttgatagaaaacacgaggcctgggaaatctgcttaactccaatgcaggtccaaagctcgccttcgaatgtatgagcgtgcagttgatttcatcctgtaatcaacaaga

SEQ ID NO: 10300 - DNA, 9398 bp, Oryza sativa
gccacgccgccgccgccgtcgccacgccgccgcgccaaccgccgccccgatgccgccacaccgccgttaacgaacgagaacgagaacgatcgaacgaacgagagcgagaacgaacacgtcaacgtacgttgccgcgacaacgtgaacgagaacgagaacgatcgaacgaacgtgaacgagctagggaacgtgaacgagcgaacgaacgaggacgaacgttaacgtgaaatgcaatatatatatatacatgtatatatatacatgtatatatatatacatgtatatatatgtatatatatatatacatatatatatatatatatatatgttacttcgcatttatcctaatacatttttttatcttgcagaaaagacgtgttgtcggagtcgtccgtcaagcctgagtggaagagctagccctagaaggaattggagcaggcaagtgacgtaataatataaatgattgttatatttgtaatgcaattaattaagattattagacctgtaattagacttatcatataagattgtgtagtgttctaatattatttgagttttaatataagattattttattgcaaattagacttagtatgacattattgactacggaattggtgcgactcctaggaattgactattgtagtcttaattagacttagcatatacgcacgaaacacttagcatacattactattttagtcttagcatgtaatattatttgagttttaatataatattactttatttgtaattagacttggtatgtaattattgactacggaattggtgcgacaagtagcaattgactattgtagtcttaattagacttagcatatacgcacgaaacacttagcatatacatgactattttagtattagcatgtaatattatttgagttttaatataagattattttatttgtaattagacttagtatataattatttactagctagggttgtataatatacgtcacctagacttagcttatatcacgatttgtaattagacttagcacgtaaggttgtgtagggttctaatgtacgacatttacacttagcatacatgacttagattgttaaaacataaatgtctcgtgacttagcagatgtttcttgtatcaacagatggctgaccgcgatgaggaacagatattgtacgatacaatcgcggagggaagcagccaatactggaatgaagaagaggggaacgaggatccaaaccagtacttgaacgaggaagggaacgtggagagggatgcggaggggaaccagcaggggcacgtggaaagggatgtggaggggaaccaggaggaggaggctagtggtagtcaaccctccgttggacagaagagggcacgcgggcaacgaggtgcagcgaagaagcttgagggtcggcacatcataacggaagtggaagaagatggacgtcctagtgccccggccgaagccgccaagaactatgtacgtcacagcggttgggttgtgcgggataacgtgcctgtcagtacggtgtactggcgaagaacaagggcacgcggagatcatgagagctttgtcccagattcggagaaagagatgctgtggaccacaatgctcgagacattcacccttcctgcgggtacagaggacaaagtgaaaaggtggactctaaagaaaatggcagaacagtttcagagcttcaagggagatctgtaccagaagtatatactgaaggggcagacaccgaacttcgacacattcccaaagctaagggatcactgggacgagttcgttgcatataagacaggtgaacaagggaaggcgatgatggaaagaaacaaagaaaatgccgccaagaagaagtaccatcaccacttggggtcaggaggctatagtgtcgcgatgccgaagtgggagcagatggaggctagcttgattgagaggggtatcgaaccggcaacagccaattggccggaacgatcgaagttctggtactatgctcacggtggaacgctcaacccagctgatggctcactggtcttcggctatcagatacaagaggctgcgcgacgactaacagatgcagtggaagcctcctctcagggcacgttccgaccagacagagatagggacgagctgacactcgccctgcagactccagagcatccaggacgatctcgagggaaaggggtgattccttggaagattggtttcaaggaggacatccacacgtacaggagtcggatgaggagcaagagagataccgaggcgaagattgcagacctagagttccgggtatcgagctacgaactcaacatgcaagaggaggtggcaaggaaggttgatgaacgcatggccgcacatcggtcccatgatccccagccgaccattcctcctgcaatggtgagcccgtcaggaaaccgtagcagctgcgcctcaacggggcaggtaggatcacagagcatggacgccatgcaaacacaggacgaatcgacctgtcccgttgatgacatcactcagcggacaccatgtgagctgcatattcctttgaagaacttatcaataaaggtaagatttagccattccgctagttgctgcttatatatgttgattactaataaataatctctcacaacatgaaggtggcgtcgggcatggccatcccaacggacccttcaggtacttaccactgcaggccgattccagcaggatactccaaggtcgaagttgagttggtcaaaggcgcgtacgaggacctcgagctggattaccctggaggagacggtgagacgcatctacgagacacatgccatgccattattctatggcgcaggcggtacatcatcctccctgggcgacaagcggcgtctcgtgcaccatctcctccggctccgccatctcctcctcaggatcctgcaccgtctcctcctcatgctccgccagcaccgtctccacctcaggctccagcatcgactcctcaggatcctgcaccgactcctcctcgtgctcctacacctactcccccgcaagctcctcttccggcaccttcaaagtcaagggcccccccagctccaccgcttgcccacataagggcaacaaagaaggcgaaagttgacgccgccaagaacaaggacccggggtacgattgcacgcaagaggagcttgacgcttacgttgcatcagaagtcaagagacaattcaagcctcgaagtccagaaaagaagattcctatagaccccagtgtcaggaacttcttcaggggtatgtctgcatctgtcaaggaggccatcaagctatcggactatgagcgaacgccgaagaaagcatcttctggaaagtccaaaccagtccctcagcttggagagcaaccaaaccaggagatcgagccgttggtgaccggtaaagaaatgacgatagaacaatttattactgacaccggtctaactatggatcaattgctaggagtcgcaccaatcgaaaaggcagaagtgaaatacatgtacgaactcggtaaaccgcttgtcaagcctgagctgctgcagtccctacccacacaaatgtacaagttccatcagctgtacatggagatgagcgccaccggtagagagatgatcggagcgaggatcagggacacggacttcttgcaaggagatgacattctctggatcaatttcaggggaatctacgaactataccagctggacgccctcgacgtctctattatgagttgctggattttgtaagtatatcgttcagttagatttcttactatacgtctcctttaattaattaggtccttgtatataagtagaccatagaaaataatatactcccttttatcgttgtagaatggagattcaaagggcccgacggcggagggttttcgatactggattcatcgaccctcggaaagtaaacgtcgcaatgctcgaccaatatccacaagaaacagaggacaatctcgtccatctcctgaaggcgcagcattacaagacgttcatactgttgccatacaacacagagttagtttaattttactgtcttcctacataccaaatttcattcccgtacgaacttgctaagtgtttcatatgtaatgcatcccacgcacattgcagattccactgggtgcttttactcatcgacctggaggcctgcaccgtcaacgtatatgactcaatggataaaaaagagtctacgtttgacaaggttttcaaacttatagacaggtaccgtcataagttcctttgttaattaagaaaatcttgttatgttaattgctactacgaatcatagctttaaactccatgtagggcttggtatcggttccgtcatttggtccgcggcaaatggagagaaagacttaggcggaagttcaaatttcctgtgagtacacatgctctacatttatatttctccgattcaaatacatacaagtgtatattaattagatctctcgttgtttgtcatttatttgtagtgcgtaaagcaaaagcagggaactaacttgtgcggctattacgtgtgcgagtattgccactgccttgcagaccaaatcatcaccacaagagagctcgatgtacgtacaaataaattcaaaatttcattacgtagcgatttcttgtttaattactaatcaatttcatacattcatatagtttattcgcatgagggataacctgaccacacacaaggaatttatcgcggcggttcaagaacaactcatgggattcatcaacgaagaaatccttgatcccaagggtgaattctactacgacggaaacacaattcaccggtccttagcttctgagctagcagcgagtactactacgtcgaaatcgtagctagctaggacatataatggattgtaattaatacatgactacatatgtttctatatgcatgtgtacacattttctataatgtaaatatattttgttcatatatatatctatatacatatgcatttgcataacatatatatgtataaatacatatatatatgtatgcatatatatgtattgaaacatatatatgcatggtttatatatatatatatatatataaaccatgcagcaacaggggcatgcaaaaaaaaaaatgtcagctctatctttagtcccggttggtgttaccaaccgggactaaagatctatctttactcccggttatttcacccgggactaaagatagcgatctttagtcccggattggtactcccggtttggaaaccgggactaaaggggggttacgaaccgggactacaaagggtttctccaccagtgatggttaaggaagagcaagacaatatcacccccctcttcatgttttatcaatcattcaaactacaatggcatattcactaatcattaagcacaaattgcatattcacagatttagtactcacaaattgacaatgatattatgatagtagtctagtagacaatgagaaaactgagaataattaatgaagctatgagctagaggagtagagttgtagagatgtagaggtacctacagctacaggaaaggaaataagattacagtcggtgaccaacggcgacgggcaaccatcacagcgacctcctgagcgacgcagcgacctcctgaggaagctggcactgcggcacgacatggaaccagagctagcaagccgggggcgtcttggcttctcatgtctcgccatcttggctggcctcccgagctcccggcgccagcggctccgcggctagtggtgccgctgcgacggggagcgggagcggagatctgcgcgggtctcgagctgggactgcggacaacgacagtggtgaccagcgaggagccgaggagaggcggatagctagagccggtgacccaccatcgctggctcgctgcgagtcgccgaggagaggtgaggaacgacacccgccttgcgccttcgcagacttgatacgagcgtcagcggcgcacgaggcgaagggagttgcggctgagcggctccactcctcaaccctagcgcctgctctacttgggcctgtctctgttgggcctaggcctgaattttgggtggagggatggggttctgggccaaaaccggggtagtcccgagcccatagggactatcccctagctacgccactgcttgcaagtacgtgtcctgctttactacgaaggcatcgtgcatcagcaaccaaccggctactgcttgaaggacggcagggcacgcaagcaggactgtaggaggcagtaggcttgggttggccgccgaagaagccccaacaacccagcctttaatctcatcgctctactttgtcccaatgcagagcacccctttgcccagccactgtcgatgcccaaccgccaccactcgtgtctcaacgttacccatgtgtgtcacgcgtttgctccccatcttccagcaaacctagcaccaaactaagctcgaacccatccgctcagaagtccaggggcggagctacagtgatgcctatgtattcccaggaatacccaactttttttatcaaaaaacaactatacttcaatatatacacataacacatatacacatattagttgtccccactcctccagagtccctcgctcggctcacgcctcaccctcacgcgcaaatgcgctgctcgcccgctccccaattccccatttgattccaaaccctaggtggcggcgttcggcggcggcgcggtggcgcggcgaccggcggaagcggcaaggcgtccggcgaccggcgacgggagcagggagctagaccagcggtggcgcggcgaggcattcggcagcggcgcgacgccgtggcgaggcattcggcggcggcgcggcgaggccgcgagacggcaaccgacgggcgaccggtgacggcgggagcgaggccacgaggccgaggggcaggggcgcggcggcggccggccaacagctgcagctcagcgggacagcgcccagcggcactgcggcaggcacaatttcaggtgacaaatcaagagttcaagattcaatcagtcctaaatccactcactatgtgtccatgtctgatgtttttttaccttagtctctgagtagtttctttttcctgtacttttgtagttctgtagattgaagaactctcaaaatgaagaagaaatcgattgatttgaagactttgtgggatagacattcaaagtctaggaaggtagggttaggttctggttctggatcaacaacacagccagttagaattgacagtgaagttgctgttccttctgttcagccgattacagatgcaaatgagagtccagttcagattcagattactgcagttgaggttgtgcctgaggtagcagccagtgatgcagcaagagatgtgacagaacctgaaacagaggtagctagcaatgatccagacatagcaacagcagtgacacagcaggagcaaccttccacttggtctcctatcagagattggtctcccatcagagatggtgatgatgaagagacagagtatgactcaagtgatgaagctatttatgacattgatttactttgtcatgatcctggaaggcgaattgcaatcaaaaattatgatgtcaataaacggaattctgtgataaggggatatattgcattagggccatgccaaccacgcagccacagttttcctataaggaaaattggaggtaagcctcggcgcttccttcctagttggtatgacgaatttaaatggcttgaatatagtgtggaacaagatgctgcattctgttttatttgttacttattcaagcataaaattaataattctggtggagatgcatttgtaaataggggatttaggaattggcacatgagaaaaaggattgcaaaacatgttggtggtatgactagctttcacaatgtggcacaagataaatacaatcacttccttgcacctaaaacaaatattgttgagagctttgctgccaccaatgaacaagacaaggctagatatatggctcgtttaacctattcaatgaagtgcttgaagtttcttttaaggcaaggtttggctgcccgtggacattatgaaagtgaaaagtcacttaataaaggaaatttccttgagatgttgagtatgctagcagaaaactttgaagaagttggtaaggtggttttgaataatgctccaaagaattgtaagttgactgctcccgaaatacaaaaacagatagctaattgttgtgccaaagaaactactaagcttatcatggaagaccttggtgatgaatattttgcaatacttgccgatgaatctagtgatgtgtaccaaaaagaacagttggctctttgtttgagatatgttgataaaaaaggaagggtagttgagaggttccttggtgttgttcatgttgaaaatactacttccttgacacttaaagctgcaattgaatcattgcttatggagcattccttgagcttgtctaaggtccgtgggcaaggctatgacggtgctagtaacatgaagggtcatgctaatggactaaagaaattgattatggatgagtgcccttctgcctattatgtccattgctttgcacatcaactccaattaacacttgtggctgttgctaaggaaaacccagattgtgtgtggttctttgagcaacttagatttttgttaaatcttcttgggaattcttgtaagaagacagaaatgcttagagttgcacaagctcaaagaattgtagaagaactagatttgggtgacattgaaactggaaagggtttgaatcaagaaatgggtttgggcaggccaacagatactcgttggggatctcactataaaactgttatgcatgtcctatctttgtatccttcaattcaaaaagttcttataatggttggcaaggatcgctcttttggtgcagaatgtgcaaatgcacaaacagtgttgacaatattccaatcatttgagtttgtttttatggcacacttgatgcaaacagtacttgggttcacatctgacttgaatcatgctttgcagaagagggatcaagacattgttaatgcagtaggactgattttattgacaaagtttcaattgcagcaattacgcgaggatcctggatgggatgattttcttcaagaagtgcaatctttttgtgtgaagcataagatcaagatccctgatatggactctttctatcggccggttggaagagataggaggttctttattaaaatcaagaatatgcatcgcttccatgttgacatgtttctaagtgtcattgatagacaactacaagagcttaatgaacggtttgatgaggtaaacacagatttgctcctttgtatggctgcatttagtcctatagataactttgctagttgggacaaagataagttgattaagcttgcacggttttatcctaatgatttctcaagcacagagatgaaccatcttccatcag

SEQ ID NO: 10301 - DNA, 5189 bp, Oryza sativa
tcagtaaaagggttccctaaacttgttcaggaggctgagtcacaggtactgcctgtttcccaggttcaaaataacaatgcattacaattttacatgtgaacttcctgggatttctttcaacattaaaaatgtaagttttctatcaaaaggtgtgtccttggctcctagcaatgaggtgattgtatttgtgcagaatcttgtctgcgcgaaaaatctgcagatagacaagagcatacataatgcatatgtgaaagctatcagatctgcacaacactatatctacattgaaaatcaatattttattggatcttcatactactggtcttcaaatagaagtgcaggtaacaagttgactatcagccatgctattgttttcttttcttattgctatgtgcactgcctcccatataaaacaaactttatatttgcctcacaataccttgtacactagaacatgcatttggattttgtagtaaagcatgctcctgatttccatactggaaacttggtttatttttcatatctactgtagcaattactgggcaatgagaaatgaaaaacaaacatgactatagctggaaacaggtgataaagattaaagaaagctacctcgttagtatctagcatgtgatttattccttaaatcgtggatacaaccatgaatcccgcttttgaataatcttgtatttacaggtgcagagaatttgataccgatcgaattggccataaagattgcaagaaagattaaagctagggaaagatttgcagcttacattgttataccaatgtggcccgagggtaatccaacaactgctgctatgcaggagatcctcttttggcaggtttgttccacatcattatatatcatggcttcatcttgagatattttgggaaatgcatcacacattttgattttaagatattgaatgaatcatgattgattatgcattctaccttatgttttgctgcttctgtttaatctcatctagggacaaacaatgtccatgatgtacaagattgtcgcagaagcactacagaaggaggggttagatgatacgcatccacaggattaccttaacttctactgtcttggtaagcgtgaagtctcaaatgacgtatctacaacaagccaatccaatgagaattccccacaggtagtaatattttcttctttctccgataagcatatcaagctaagcacattcgatgtgctttgctggaaaataaacaattactccctccgtttcatatcgtaagactttctagcattgtctatattcatatagatgttaatgaatctagacacatatatatgcctagattcattaacatctatatgaatgtgggcaatactagaaagtcttgcattatgaaacggagaaagtaattcctttcttttactctctagcgcctggtccaaaagttcaagcgattcatgatctacgtgcactccaaggggatgattgtcgatgatgagtatgtgctcataggatcagccaacataaatcagaggtccatggatggctcaagggacaccgagatcgctatgggcgcctaccagcctcactacagctgggcaggacgcaagaaagctccacgaggacaggcatgctactgttcattttcctcaccaattaaacctttacataatacctacaagcacctttatagtgatctctattggtagtattctactgcctgtattatcactattagtagtatgatcaccagtattagtattacccccagtattatttcttttgtcttcctcttctgttttgtttcacctccttcctatcattctagtctcggccccttttggctttatatgttcttcacccacaattaatacaatggttaaaaggtagagtctgtaacttttgcataaaaaaacaactagtagtagtgatatcaagttttgaatcattgatttattagttttactatcattagaaaaaaaatctactactaatagttgaggtggtagtggtagtactcgctccgtaccatagtataagggattttaccccttctactcgtcccacaatataagggattttggtatgctcacatccatcaactccaattcaaatttctacctattttaacctccaactacctacccacaaccaaaatcacatttaatagaatacctacccacaaccaaaatcacatttaataggggtattctagtctttttattctattcttaatcttacccaaaatggaatgatcccttatattatgggacggaaggaatatataaatagatatgatccattggattggaaatgatgcatggttttgattaattctaccaccattaaagaccatttttaaaagacttcaatatttaattacctgctgctccagcttgtaacctcgcacttcaaaactgttcatttttcaggtgtacgggtacaggatgtcgctgtgggcggagcacctgggtacagtggaggagtgcttccgttggcctcattccgtggagtgcgtccggcaggtgaatgaaatggcagaagagaactgggcgcgctacgtatcaccggagatggtgaacatgcgggggcacctcatgaggtaccccatcaatgttgaacgggatggtagggttggtccggtgcatgggtacgagtgcttcccggatgtcggtggcaaggtgctcggcacacactcttctcttccaaatgcattgacaacttgaattggctggagcatgaacgagctagatgtggcaactaccactaatactttgaaaagaatcattttggggcgtgaagctttttgtttgtacatgaaagagagactgcttgataccagttccacacattgctgttatagagtactgcagttcgactgctgcatatgcagtatgtataataggatttcaattataatcatctctggctggatgcaaatacatctgttcttgcatttagtttgttgtaaaaggcaccttccctttattcagacagtcggttagccttaaaaacaaaattcttggtggcacatgattcaagaatttattggaatgcctcagaagcattacattactttctctcaaaatgtacgagaaaaattatctcttcaaggctgtttggtattgagcaatataaccaaaccttttggcgcgatgtcatgtgaccataattttttagcacataggcaagagagttgcacatttttagtgaacacattatgaccataattgggtggcatctatctactgcaaagttctgtcgagtaactcaaaattgattttcattctagttatcccccaaacattttcagaacacattcacaaacgactgacagttgttaaaaatgacctgacaacattcttttatgagcaattttatggtccttgaggaggtaccattttttctattgtaaatttggtacctctgggtacttaggtattatgaggagtaccaagaggtaccaaattttacaccaaatttttaagtacattatggtacctactgcaactgcacctaatccgaattcaccttactaatactatgatgtatgcatatctcttaagaccatctccagtgtgagtaaaatggaactgtactctaaaagaccgaagacaacatattgcgacaatcaactgatatgtctcagagcaaaaaatcgacaaaaaatatgagtcgaacttagcgactaaaaaatggatgcatgtgattgagagaattttttttatgtgggccatacaatcgaagtgaaacattgtagctactgaaccaaacttttgttcaaccacaatagtcgaatcaagtctgcaggtaccctaaggacatagaaaaagcttcaaccggtttaattcttttacttctcaaacagtaagtaggtacaaggacaggagaaaaatcgcttattacagataagaattctaagcataatatattcatggcattccttggcctaccaaaaaaatatttgtacagttaaaaagattgagggctagtttggtttggttccaaatagccctaccaattcattggcaattttcaatagtgtttctagttgtttagattggtgccaaattttaacaacatatctctttagatagaaaatttttgaccatctaaatttggtagtgccaaaagttacccaaactttggcactactaaaattaaaattttggtatggtaccaaaccaaactggccctgattgtataatcagagtattgcataatagatgtgatatgcatagtagagatgtaagctagccatatattatgctcgctgcaacaaaacagcagcagcgccaaccacactacactgttaaaccataatagaacagggtgtagataaaaaagtcttccggccatgagaccagaaattggttcaaatgcggtcgtcgtgattgaatatcgtttgatcgaaatatagaattgttaatttgatcactgtgtacttgtttatattttttatcactgtgtagtgatataatttcgtttgatcactgtgtacttgtttatatcgttttctttttctccaacgtgtaggagagttacgcactagagaagactcgtccaagcccttcaggaccatgcatggtaaacataacaaacaaagactagaagaaaggaaaacaataacctgcgaaacaaacttatggataaaaattaagaggacctttgctccaccaaacaccataatttgtcccatccctaatattctgcataagttcattggtattaggtaaggtctcctcttgatcataaagcgggcaactgatcaacactccagcatctatctagtgaggccaaccaaacagagaaatgacaacaacgcacgtagaatttttctttcacactgaagaaacaaatatttttgttttatggaaataagaaagatggaagatcttttttttttcatttcactgtgtattctccattatccagactccagagaaacaattttttactctatttttgtttcgtggaaatggggaagatccattaggcaggaaaacatggaaaaactcgaatgcctagttgcatgcagccaagcaaaccccctacaaagaagcaaaggcagaatgcctcaaaattgcatagagccgttgtagacttgtgatataatctatagattcatatggtagcacttgggacatttaaaccagcagaacgtaaagagtggttttgtatgcatggtagacagcgtctaaccagcggacg

SEQ ID NO: 10302 - DNA, 16011 bp, Oryza sativa
cctttctgatttctgcaataagtctgtgaaccatatttgtggcagtgtggatgatgaggctaatgtttggcactcacgtttatgtcatattaattttggcttgatgtctcagctttccagcatgtgtttaattcctaagttttccattgtcaaaggttctaagtgccatagttgtgtgcaattgaagcaacctcgcaagcctcacaaggctgccgaggagagaaacttggcaccattagaactcctacattcagatctttgtgaaatgaatggggtgttgacgaagggtggaaaacgatatttcatgacgttgattgatgatgctactagattttgctatgtgaacttgttgaaaacgaaagacgaagctctagactattttaaaatttataaggcagaagttgaaaatcaacttgacagaaagataaaaagggttaggtctgatcgtggtggagagtttttctcaaacgagtttgacttattctatgaggaacatggcatcatacatgagaggacgcctccctattctcccgagtctaatgggattactgaaaggaagaaccgcacactgactgacttggtgaatgccgtgttggacacagtgggactacctaaggcatggtggggggaggcattgttgacctcgaatcatatgctaaatagagttcctaacagaaataagaacaaaacaccatatgagatatggattgggagaaaaccatcactttcttacttgcgcacatgggggtgcttggtgaaagtcaatgtacaaataacgaagaagcgcaaacttggacctaagactgtggactgtgtctttctgggatatgctcatcacagcattgcctatagatttttaatagttaaatctgaggtacctaacatgcatgttggtacaatcatggagtctcgtgatgctaccttctttgaaagctttttcccaatgaaggatacacatagtagttctagtcaaacctctgaaataattcccaattcaatcacaccaccagaacaaactgaacatacacacgaacatgtcactgaggaggatgacagtgaagctcctcgaaggagtaaaagacaaaggacgactaagtcttttggtgatgatttcactgtgtacctcatggacgacactcctaagtcaatttcagaagcatatgcatctcctgatgcagactagtggaaggaggctgtccatagtgaaatggattccattatcgctaacggaacttgggaggtaacagaacgaccctatgggtgtaaacctgtggggtgcaaatgggtgttcaaaaagaagctgaggcctgatggtaccattgaaaagtataaggctcggcttgttgctaagggctatactcagaaagaaggcgaaaatttttttgacacttactcacctgttgctagattgaccacaagtcgtgtgctactttccctagcagcctcacatggtcttctcgttcatcaaatggacgttaagacagcttttcttaatggagagctggatgaggagatctatatggatcagcctgatgggtttgtagttgaaggtcaagaaggcaaggtgtgcaaattgttgaagtctttgtatggtctgaaacaaactcctaagaaatggcatgagaaatttgacaaaacattgacatctgcaggctttgcagtcaatgaggcaaataaatgtgtgtactatcgccatggtgggggtgagggagttattctgtgcttgtatgttgatgacatactgatatttgggacaaaccttgaggtgataaatgaggttaaatcattcttgtctcaaaattttgatatgaaggatttgggagtagctgatgttatcctaaacattaagctaattagaggtgagaatgggattactctcttgcagtcccattatgtggagaagatcttgaatcgctttggctacattgatagtaagccttctccaacaccttatgatcctagcttgttgcttcgcaagaacaagagaattgctaggaatcaactggaatactcctaaatcattggctcgttgatgtacctggctagtgtaactaggcctgatatctcctttgctgtgagcaagttgagccggtttacctctaatccgggagatgatcactggcgtgcgcttgagcgagtaatgcgctatctgaaaggtactatggaattggggcttcactattctaggtatcctgcagtaatggaaggatatagtgattctaactggatctctgatgtggatgagatcaaagccactagtggatatgtcttcacactaggtggtggtgctgtctcatggaggtcttgcaaacagaccattttgacgaggtcaaccatggaagcagagttgacggcactggatactgctaatgttgaggcagaatggctgcgtgatctattaatggatctccctattgttgaaaaaccagtgccggctatccttatgaacagtgacaatcaaacggtaattgtcaaagtgaatagttctaaggataatatgaaatcgtctagacatgtgaaaagacgattgaagtctgtcaggaaattgagaaactccggagttataacattgggttacatccaaacagctagaaacctggcagatcccttcacgaagggactatcatgaaatgtgatagacaatgcatcgaaggagatgggtttgacacccatgtgaattatactatggtggtaacccagtctatgtgatcgaagatcccgtgaattagaacctgggaagaacaaactattagtaaactataagagagtaccgagatataccctctctaagtgaagatgcatgtactctcgtgagctgcaaggcaggttggctatgccttaatgagttctgttggctttaattagcgaagatgctgtcctgcagagcattcttgaaagaactcacctttgtgagcttgactgttggtcgcagtctatggagattttgggtgaatcttctaggaagcttactaaagacctaagagtatgacttatatgctccacccgaggggtagtctacagacggtctagtaccagataagactctgagtgaaacttgcttgcacaagacttgcaattcaaggcgtagtccattgttcaagttgtgagtaagtgtagcttggagttctaggtggatgttcaaccttaatcggtctccatcaaaccgctggtatataaacagtacattggaaaaggcaaatctcagtgggattttgagatttggtgggggattgttggaattaataaatgggctaaggcccattcgaagattaactctttggaaaatcacaaaagcccaccacatgggatggcatgcatgtgaagtttagtaccaccttacttattctaggagagggggacctccttaaaagggagatgccctcctagccacttgaagcatgtgtggtggagagaagggggaaaacacgcgcgcgcgctcactcgcctcgcctggcctagcagggcagggctggcggcgcgcgtgcacgacgtacacgtcgaatgatccgcaaaattggctcctcacccttgcgcagatgcagcttccttttgcagttttgttttgctacaggaaaattcggatttgttttgttttggaaacattccgaaaaatccggtgcgtgaaaacggcgtgaagtccggataagttacgcgcgacttatccggttcggttacgcggagtggagatcgtgcgggcgccctgatcaagcgacctatctctatataaaccgagccgccgccttcacgcaacacacacgaaatcaatctagggtttgcctcctcctctgttctgcgccgttgctcgtagactactccatcccgctcgcaggcgtgcacctgcaatcgggagagcaggtctccgaaacctctgccttcgacgtcctgcaccgagaaaaggcggcaataaggtttttgggaagcgcttggcgcgactgctccctgttcgtccgcgacggctcgtcttcctcttcgctcgcgtgctgcgcgccgtcgtcgacacccacaaccgcgagtagttcctgccgagcaatcggtttttccgccacctcggtacgtgttcgacatgttgcgcatatttgatctgttcatgttttactgcttagtttagatgtatagatctaatgatgcgttcaatctagtttacatatgcaatgtcatgatttatttatagaaattaaatcattatgtgcttataatttcaacaatctatgcgtccccaaaaagtctatttgggataggatatgatctatcctaagataggaatgccctgtttggtttagggactaaattttaatccctatcacatcgaatgtttgacactaattagaagtactaaacgtagactaatgccaaaacccattccataaccttggactaatttgcgagataaatctattaagcctaattaatccataattaacatatgtgatgctatagtaaacatgttctaatcatagattaattaggcttaaaaaatttgtctcgcgaattagctcttatttaatcaattagttttattattattctacgttcaatagttctaactagtgtccaaacatccgaagtgacaaagactaaaatttagtccttagatccaaacaccacctaagacaggaatctagatatctagattcgttgttctatgataggccacgtcatatcctagattatttctttttggaacggagggagtaagtatactatcgatcataatggcgacgtgaccaataatatacgtgtacaattaccaactgtgtactccctctgtcctataatataagggattttttagggaggtctagacaggctccttatctagattcgtcaaactatgatgtgccatatacttttaaaatcctttatattatgtgacgaagggagtaatacagatttatatgtgtgatatgacatgtagatatcttttgtgggttctcaaaccacggtatactaatatgactgcgatatgtttacgtaacctttatagcgaggtagatttattttcagataagtggaatcgactttgtacatagtaaactctaaataattagtatgtatgcactcatgaaatcggatcaatgatcttaattattaagccttgattttgcatataacgtgcgcacatgatcaattcaagtatcttatctatctacttcctccgtttcagattataagacgttttgactttgatcaaagtcatattgtttcaagattgactaagtttatagacaaatatagtaatatttataatactaaattagttttatcaaatcaataattaaatatatttttataataagtttatcttgggttgaaaatgttactactttttttataaacttggtcaaatttaaagcagtttcactactacaggaaagattttcttggataccggacccttttatttctaggcggactgtaaatggaactgcaaaggaaatggggcggggggggggggggtacatgcgccagaccatcgcccgcataggaaaatcaattttcgtgtgcgggtcactatatagtccaccctacacgaaaatagtccaccctacatcgagcgctcgatatcctttcgcgcccctcgcccctccgcccactgccccactacctccctctctcccacctcactctctccctctctcccactccactcctctcctcccactcagcggagacagcaggcagcggtgggtgatatagcggcagcgcttggcccctccctccctctccctctgctgtgggtgggaagaggggcagtgacagcggtggcggcgggcgaccacggcggcgtgcggcccctcccctccctgcccttgcatatccggtggaggggaaacatgggggcctggtggatccggcaaagctgcgaaaggcgacgtgcgggggcgggaaggaggaagcccccccccctcggtggcgggaggcagttggacaaagtcggcctgcgtccctcggcggtgttaggtggtgggacaaaggcggcccgcgccggatctggaggtgtggcagtgtcaacggctggtgtggaggtgtgactatcggcaggaggtgcgacagtggcatcagcgatcgatgtgagttgatgcccctcccctcccctcccctccccttgcagatctagcggaggggaggagcgtcttcagctggcgactatggatccgacaccagcgacgggagcgggtggtagatctgtagccggcgaccgcgggggcaacggtggcgggcctcggctagggcaggggagattaggattagggttttgtttttattttttttgtttcgatattttattatctcgtgcgggcagcttaagcgcccgcacgcgaaaatccgattttcgcgtgcgggtgaggcacctgcatgtgaaaatcacgattttcccagacccctgggtgcgagcgggccgaccatccgcgcagaaaaattattttcgaccgcacgcaaaaatctttattgtagtagtgtttgactttgactaaagtcaaaacgtcttataactgaaatggagggagtagaaaacaatattttccctttagtaaactcatgaaaccatccggctttgcaatttcaatagacactaaaatttctgttgttgccaaaattttgaaaatttcatgaatttcgatgttttctaaccggaaatattttaagttttaacatatttttgaccaaatttacaaatatttaaaaaaattagaaaaattttgggggagatttgtgcttgccggtggagcaaaatttgtttttttgaacgactcgcacaagacggtgcgaagttttattgatagagcagaaaaaaattacaagattaaccaagaaaaaggaaaaaatataccaccacccacacaccgacagcgccaacacatgggtccgggagaaggctagcaccggacaggccgtcactaagcgtgaccaaccgccactaggccaacaaaggaacacagaagagaacgcccaaaaaacgcccttacaaccaacacaaagcccaactccatctagattgtgcttgcaccaatcgttcgagtggtttcggcaaggggatgcctaaacgacgtctccaacgagagaagcgacggaaaaccgtcgccaccatccgtcagggactcaaaagagccaagattgggctttcgcctggcaaacacctttgagggatgagacggcacgacaacgccctcaggagggggaatgaaccatcgttgtcggtccagtcaagaccaagctgggttttcacccaccgctcatcacctgcaaatccacggctgacgcaccgatgctccaccacagctcaacctctgccgatgtgtgggaccactgcaccccgtccccgccggctagccttcgtgcgccgaagaccgcgccacaccctcaatctattatcagtcatatgtatgagagcaaccacggtatatcgaaaggtaaccttatggcaatgattacatttataaagtggaacacatacattgtgagaaatagctttagcttagagtgcatcttatacttaaggtctaccacaagcataaagaaaatattctctctctcatttatgtcatgaacaagagctgaaaagcaggtttttctatctcataagggccccatattattgttaaatttcagcaagggattagctaaaaaactgttgcaggttttttgagtaaaaaactttcaaatctaactatagtacataattttactagaactacactataataattatataacttgtatagatgtattaaaataatatatgcaactttatatctaatttgatagagataataatgtagttactgtaactagggtataactggagtataagtaacatgtaacttgctaattttttaaaaaacttgcaagctggtgggatcgaggtcctgggttcgaaccccatgcagcgcacaaattatgtttctcacacgggatttttttccatgaacgcgccagcacgaatcttgagatgaatctgacggtcaaaaattcgaaagaatttacccccgttttctgtcgatagaaaactagcaaatccgtttcagcaatagcattatgggaattgctttaacaacaatcaaactattcatgggccacttctaagatcacactagacccatatacattgagattgccctgatatatccatctaattcatggacattttcctagtcttggggggatataatataataggagctagaggggggcatgggtagtgaagtccagccagcgcagaagatccttggggggatctggttgcaatggggatggccaatgaggagtcgccaaattatcaggtgaaaaaaggcggccggattcctccacgtaaggaccaaatccatccacagatcgccccgctctcctcgatcgatcataatatgatctcgcaatggcccccctacctttccctcatccccaacttgccctgtcttcttcttcttcttcttcttgtacctatattattacaagtcatcgatctcgctgatcgatcagtgatcacaagcatttcacaaccctagctagctgagctgatcgagctcaagtgacctcacctgctatagctaacttactagctagctctagctagttgttgtttgtagctcgatcgagtttgatttatccgttcatgtcgatgggaccagcagccggagaaggatgtggcctgtgcggcgccgacggtggcggctgttgctcccgccatcgccacgatgatgatggattccccttcgtcttcccgccgagtgcgtgccaggggatcggcgccccggcgccaccggtgcacgagttccagttcttcggcaacgacggcggcggcgacgacggcgagagcgtggcctggctgttcgatgactacccgccgccgtcgcccgttgctgccgccgccgggatgcatcatcggcagccgccgtacgacggcgtcgtggcgccgccgtcgctgttcaggaggaacaccggcgccggcgggctcacgttcgacgtctccctcggcgaacggcccgacctggacgccgggctcggcctcggcggcggcggcggccggcacgccgaggccgcggccagcgccaccatcgtgagtatcaatccaataatcctgatccggccggcatgatcggctcgattgagccgtgtcgattattaatttccatcttatatattattaattgatgaattcttgattgattcatcgatcctcctcgtcttttcttggcttctttgtttttgttatttagtcaaaaacaactcttcatttctgctgcctatatgccgtacaacttcaaactatcaaaggtcaaataatcgatcaatatataccaagtttgaattaatttggagcttaattaattaattactggcttgcagcagctggtttatagtattgtttctagctatatatgtgagggccgtgtgtgggatgtgatttgcatctttcgatggcgacttaattaattcgatgatatatttcattgcatatgcatacggatccagcctctgtctatactgtacgattccacatacgtatatgtacggttaagtcagtatatatacttttagatagtcgcgtgtgcttttcgagttcggtagctatattttagattgtaaaaacaagtcagaggctaattttataatctagaaatacttatttccccatatataagcgtatgttaaatattgatggtgtaatctacttatatgtcaggaaacatcattgcttgctttctggcgctttcttctacatatcagtagaggaaaatggaaaaaaaaagatgaattttgatgttgtagtttgctatattcagcatatataccatcagttatacatatgcagatcttgctaaaaccaaaataaaaatagaactgtaaggagatattgtgcttctcggtctatttacttacagtttgttgagaagtaatacgagcaagcaaatgtatatatatatttctttagaactgcaaggagatgcatatacatgtgtgattcaaacacacgtactgcacattcaaactataaaaacaacttgattgccgtagaagttaaaagggagacatatccatgggtttcggattctaaatcaatctatgtgtaaatgaaactttagtatagtaggaaataggttttcaaaaaaaaaagtatagtaggaaatagtatgtgtatatgcctttttaacccttaattacaagttgttataattcagtgttaacaaagtcacggactcacagagtgtgcccttacacaatttcagactaatttgtaaatgcatcgatcgtcacattttatgtggttcaattatctgacacagttaattaatggtggccgatcgatgtatgctcttctagctttccagctatatgcgtatgtaataaatgaataaaacgtgtaggatgaaatgtgaatacgcatcattgtaattaatttgattaatgctagtaaaaaatctgcaaatttgtctttttgaaattaaaatatgccttataaaattaatggacccaggcccctagggcaaaatatattggggcacaaaatcatgtccatatatacattcttatttgaaagtagactctgaaacaaaatatgcccatataaatcaagggaggttacaactaactgcatttgcttatgcgtacatctggattgtaacttctatgttttgtacatacgatgattaattgtattcgagcttcttaattgtacatctattaactaactagttttgcagatgtcatattgtgggagcacgttcactgacgcagcgagctcgatgcccaaggagatggtggccgccatggccgatgatggggagagcttgaacccaaacacggtggttggcgcaatggtggagagggaggccaagctgatgaggtacaaggagaagaggaagaagaggtgctacgagaagcaaatccggtacgcgtccagaaaagcctatgccgagatgaggccccgagtgagaggtcgcttcgccaaagaacctgatcaggaagctgtcgcaccgccatccacctatgtcgatcctagtaggcttgagcttggacaatggttcagatagataattacagtgcgtatataccactgactatatatgactgatcatcatgcatcacatatatatatatatatatatgcattattagaccatacatacatatatatatatatatatatatatatatatatatatatatatatatatatatatgtgcttgcatataacctatatatttaggcatgcaattcggtaatatatatatatatatatatatatatatatatatatatatatatatataattagtgatcgatggcccattcagaaaacttgattgcatgcatatacattagcttgctgaataagaaggttgatctgcatgaagataagaaggttgatcatggaaatgtatgattcaaacatatatttgttcaagaatcaagaggttccttagatgctttatcactctttatattctttaaaccagctaatatttcttttgccaaaattgaatcccgcatgcagtagctctgatcaggaagcacaattaatggtgctgggatacataggataattatttggattcaagtgctagtctttcagattttgtccaaattgactaggttacaagaaaaatccctaattcaaagttccacgtatcctctatatatactttcgctaaagatcgataaccatgttggcacaccaaaataaatgtctaaagaaaacagggtccttaattaattcttccatgcatacatcacacacaatataatagtggaacataagataagatgatagagaaatattattgtgcatgcatgtatatatatttgtgccatgagagagcatacatgtatcatgcacaatatccaactaaaaattggttcctttttaatagcacacagccactaaaacttgggaaataaatctagctaacttctgttccgttcacctttagttatgaaattacttggaaagaaattattggccggaaactagtttctgatatgatattgaatgaatttcatgtttgacaagttaaaataatttgtaatacatattcaactaagctctagttcaatttccataagaacaatctggctccattataactgatcataatgttatctaaccggtggtagcgatcaatcgagttagttgatggaattataacaacttgtaattaaggctatctatcggggcaatatatcctatgcacacgagcttaccgtgcacacttcgtgcacaccaactaacaatgtcataaaaaattttataaaaaaattgacatttactcctaatagtactacacatatctacaaagtctcgtattgaaattcattatattgtagccgtaacaaaaaagttaaaaatcttacagttttaagggtaaaaaactgtcagaattttgtcttttttgctacggctaaaatataatgaatttaaagataagatttcacatgtagttgtaatactattggaagtatgtgtcatatttgttttagaattttctgcgatatttgctagttggtatgtatggagtgtgtacgggaagtttgtgtgcataggatatgttcccatttatcaatggtaaagagtattggctactcagttgatccagcagtttgcagttggactttctaccatgaaattatagagaaattcttataatcgatactatagaaaacactatcattgccggttcataattggcaccagcgacagttttttaactagtggtaacaaattaagtggcaaagatatttggggagtataaaaggagttatatagaaactggccattttgatagtaggatcttaattacgtttgaattttgcaacccccaaaatataaggccaagtagtatgacatggtttttcatacaaatatatatgtgtgcatgcggacaaatggagtaaaacaggcgacctctatctgtcatgcaaaggctctttaccatctcaccaataagatagatgctttaatttgacccttcttttccaaaacttattgacgaatatttgggcatctaaataaaatggaaaaggtttcacctatatgaaagttgtacatctctcgtgcatagagagctacagcattgattttttttcttcatccgtattagtatgaaaaaattatgaattttctaagttataggttgctataccattatttttcactcctggaacacaatattgtttggctcagccttgtcactatgtgttataaaggtggcctatattaatgtttgtataatggcaaacattcaactggaacctggaagttaattaggattgataagaaaaaaaatacctcttctgatttatgttctcctattaactatatctttgttgtcttcttattttctcctcctaaagcggtgaaagtatggcactttagtgaggtcatggatttgccacatgattcctccaagtgtgaataaaaggaacgcactcatggaagtatatgtccatgcatcttctatataatctgaaaaaaaagagaacatcttacaccactttttctcacttgactttgtggaagatgcccgattgaatgatctccattggccgggttgggttctaccatatatgttctcatacctgatctcattcagtagtatattcttttttcctagcccatatctgtttctactaattaatatagagaaagtcttcgatcccttgagagaaataaaaagtaacaataaaagatacatagcactgcatgtgagttgttaattaaaagtcgaaaatagttttttttattgaagtttgttagcacataaatttccaaattaagcagcacccacttacacacactagaacgggattgcttatctgtgacgggctgaaagcctcatcactatcgggtaaggtccccgttactgggcaaaggtcactgatgtgagaaaatatctcaatccggcaaaagctcgtcacggatggatgttatctcaatcgggccgaaaacaaagcccgtcacagatgagtatgaccagtcaaaccagcgtagttaggagcccgtcacggatgactaatctcaatcgggcacacaactaaacccgtcacggatgagctgtcatctcaatcgggcatttagataaagcccgtcaccaataggtttgaccccacgtgtggagtcaaactagtcccggttcggatgacttatctctaacgggcttgaccctacagcccgtcacggatgacatatctcttttgggcattactaaaatgcccgtcaaggatgagtttggaaccaaaaaaaaatttataatttggctagcctcaggcctttgctagccatgcccgctgcaaaaattgacagaagcacatttatatagttgttgacaaaaaacacgaggcctcggagatctgcttaactccagtgcaggtccaaagctcgccttcgaatgtatgagcatgccagttgatttgatcctgtaatcaacaagaaatagagacaaagaattcgtggttaaatctataaatgatagccgatcggctaggtgccgatgacatatcatttatctttgagccgatgtcatatatgaatcgatcggcggttataaatagacagtaaggaactaaatctattcgatcggccgtagatattaacgatatatagttcttatattaatatatacttaaatcaagtaattgggatagatcggtcaccatgccgagacagtataaatcacttagaccgaaatatatattaataacaggattatatatgtttatagcatagccgattagatagatctagcatgtatcggctaatactccgatactactctatacaaacatatcaagacaagtataatataccaaacaaaggcttaatatacttaaatgcactaagatcttgacataaagggcggatttaacatgtcactgaggcacatagatcgaatatggttaaatcagatatgattggctgaaactccgatactaccctaatcagcaaccagaggataggctagagattgatattctaagcacgacttaatagatcaaactcaactgatgcatcattaagtatgaaaagaagaacaatatctagacaatcaagccgctggatgtttcataaagtggtaaatatcttatataatctaggacaacgtcgctatttaacctaatcggctgccttctattaatagatgttagccgattgtaggttagatgacgatattgccaaagattatgtaagatatatgataactcgacgaattatataggcaagattagagtgtcataaagatggaagcactaatcttgagaacacaagtcgtcataacaagttttacctcttgttgaagatcgaaactgatgcagctcaacccgcaagcaagaactcgttgaaacaaaactaaagcgaaagggtggcgatgcgccgaaattgtattgaacgtgtgtgttaaaaattacatagggctcggggtctatttatacccgagaattacaagatatgtccataccggacacgaccactatctctaacaaactctctaagataccataaatctttgcggcagacttttacccaaacatatctctaaggaagttacataaaacatcctaattaatagatacaattgccttctcaggactctatccatgtgcggcaatcatcttgaagcacctcaattcaacccgatgtcatacaccaaattatactgtcggaatcggctgcatcggcttacctagtccgacctagacccagccgatcctaatcgtagccgatctggacttctgccgattcttgctctgttctcgaatcaatctccgccttcgactccacctggatctagtctcctcttccgatgctgatattaccaaatttggttgttaacacatgccccccaagtccgggatatttgataatgttccggatttgccgtgtaccgactccgagcaagtttcgcactctgctatttttcgaccgttattctatcgctttaaataccaaccgttgccctcgagaaatctcacgccgtgacttccgttttcaccgctcaagcgaaacattgtccttt

SEQ ID NO: 10303 - DNA, 69446 bp, Oryza sativa
caaaaggtttgtcgaagtatccaaccttgttaaggtcaacagttgtcatcccactgtcatcaatcattacgcatccaccagtcaacctaacccattggcgcgggaacagaggaaccttgagagggccatagtcaagttcccatatgtcctcgatggcaccgtaatacgtggcagttgttccatcgtgtcccatggcatcgacacgaacagcgctgttttggttcgtgctcttcatgtcttgggctctcgtgtagaatgtgtacccattgatctcatatccctggaatgtcgcgatcgacccagacggtcccctcgccaggaaggcaagttgttggttgatcgactcgttacccatgagatgttgtcgtagccacgcggggaaagtatcaatgtgatgccgtgtaatccatgcatcggacttaccgatgttcctggcgcgaactagagccaagtgctcctcgatgtaaggagctaccaatgaagagtgttgcagaacagtgaaatgggctttacggaataaattgttgtctaccgtcattattgctttccttccgagagttccctttccccgtagtctcccttcatggcgtgattcaggtaccccgattgggcgaaggtcttcgataaattctacgcaaaattcgatgacctcctctgttccataacccttggcgatgcttgcctctggacgagcacggttacgaacatacttcttcagaacgcccatgtacctctcgaaaggaaacatgttgtgtaggtacataggcccgagaatacggatctctttcacaaggtgacaaagcagatgcgtcattatattgaaaaatgaaggtggaaatatcaactcaaaactgacgagacattgcaccacttcattctgaagggcttctaatctatccggatcgatgaccttctgcgaaattgcgttcatgaatgcacatagctttgttattgttgcccggacattgtctggaaggataccccttattacaactggtagcagttgtgtcatcaacacgtgacagtcatgagactttaggtttgtgaacttcttctccttcgtgcttattattcgcttgatattcgtggagtatccagacggtacctttatgctctccaagcattcaaacatactttccttctctgccttgctaagagtgtagctggctggactcaagtaatggcttcctttctcctttggttccgggtgaaggtcaccgcgttgttccatatgcttcagatcattacgtgcttccagtgtatctttcgactttccgtatacacctaggaagccaagaaggtttacgcaaaggttcttagtgaggtgcatcacgtcgattgcgtggcgtacgtccaagaattcccaatatggtaactcccaaaatatagagttctttttccacatcgccgcatgaccatcttcgctctcaatatgctggcttccaggcccctttccgaacactactttaagatctttaaccatagcaaacactgttttcccgctgcgatgtttaggcttcgtacagtggtcggccttatgttcgaagtgcttgcctttcttccgtaccgggtggtttgctgcaaggaatcgacgatgacccatgtatacaaccttcctacagtgcttaagatacgtactttctgtttcatccatacagtgagtgcaagccttgtaccccttgttggactgtccggataggttgctaagtgcaggccaatcgttgatggttacgaacagcagcgctcgtaggttaaactcctcctgtttgtcctcgtcccacacggggacaccttccttcttccacaactgtttaagatcttcgaccagtggtcttaggtacacgtcgatgtcgttaccaggttgcttggggccttgaataataatcggcatcattatgtacttcctcttcatgcatagccagggggggaggttgtagatacacatcgtaacgggccaagtgctatggccgctgctcatctctccaaaaggattcatgccatccgtactcaaaccaaaccgtatgtttcgtgcgtcctttccaaattctttaaattttctgtcgatgtttcgccactgcgaaccatcggcggggtgtctcagcatcccgtcctgttgaagctcttcagcgtgccatcgcaacattctagcattccccttgttcctgaacaaacgccttagccgtggtattatagggaaataccacatcaccttagcaggaattctcttctttgttagctgcccgtcaacttctcctggatcgtcccgtctaatcttgtatcgtagtgctttgcaaacagggcatgcttctaggttctcatactcctcaccgcgatataggatacaatcgttcggacatgcgtgaatcttatgaacttccagtcctaacgggcagactatcttcttagcctcgtacgttgtctcgggcaatttgtttccccccggaagaatgttcttgacgagtttcaataaatcgccaaatgccttgtcactaaccccattttttgccttccattgcaacaactctagagtggtatccaactttttgtgcccctgctcgcaacctgggtacaacgaagttctgtggtcctccaacatcttgtccaatttatgggcctccttttcactttcgcagtcttccctggcgtcctgcaacatctgaccaagatcatccgcaacgtcgttaccatcagcagctatttcctcctcgctcgtttgatttccttcaaatccaacatactgagcaaagtccggaatattgtcgtcttccacttcatcttcttccatttcaacaccttgctctacgtgggatgtccaacaattatagcttggcatgaaccccgactcaaacaagtggaaatgaatagtcctggatgcagaatactccttctgattcttacacttattgcatggacaacaaataaaacccctttgcctggtagcttcgggcactctcaaaaaatagtgcacgccgtcaataaactctttggaccgccggtcagcgtacatccattgccgatccatctacatgagtcaaaaaaaccgcacataaataattattcttacaataatgacagtcatacaataattataagatatctttattcatacaaaaatcataaaatattacaccaaataattcttaaaaactatttgtaaagttttaaactaattttaatgtgttttacttcttttaatttttattttagtttgttttctattatttaatattaactttcactagagttttccttctcaactattttataaaaccttgtttagcaaatgaactaaatttctatatattctttcttccccacacacattttctctctcatcaacttacaactaaattttggagacaaaaaaagtgtgcaaaacataggtgcaaatgtagtatgacaaaaaaaaacattggaggatgaagttgcaaaccttttaggcacctccgatttgtatgtaatcacaaaaataaattcaatagaaattttggcatgacctcccctcttttttgaagaaattttgaagcttgctcgggcagctggaggaggaagaagacatatatataggggtgggactttagtcccggttggtagcaccaaccgggggtaaagatcaccgggatcattagtcccggttggtattaccaaccgggactaaagttaagatctttagtcccggttggtgctaccaaaccgggactaaagattccgggggggtctgacaggttctgacagcattctaaccgggactaaagatgatctttagtcccggttggtaacacaaaccgggactaaagatcaaatatgcccgttacccttttgaaccgggactaaagatcatctttagccccggtttttattgcatccgggactattgtggaaatcggccgaccgacgaaagatggtttctccaccagtgcatgaatctaggtgattgttgatgttacgagagcactagtcgaattccagtctgttgcaacgaattaagtctttgttcaaaatattttaatcggttgaaataagacctttcatcttaaattagtgtcttctttttaatagtagtatagattattgctatatttttaattttcgattgccttttcgctaatttgaacttgtatattagatttacggtgtttaaaaagtttagtatatgatgtaaatttgtgaagtaggactacccaatgaaaatttcctagctacgccactgcttgcaagggacgcgaggccgacacggcgggctgctcggccggttggcggtggcgagtggcgacaccgctgttcttggcgcgtcgtgcgttggttgaacgacggtgcggtgggtgtgctccaagacggtgagagaatgaatggctgaagccatttgaggtgtttagcttttgtaaagtacaaatttgttctcattagttggctgcaggctaggtgttccaagtgcttgctggattttagctgctaactgtgttgagaaggcattaactgaaagctatttcagaatcttattccaaaagcctccatctagatcatgataggattggagtaatattggtggttcatatatgtagttcaagtaattcctctcctgtttgaggcccacaaattaagggttagcactaaacaagtagattttaatatgatcaaattattgctcgataatttttttcccgttgcaatacacggacattttttctaatctatatctatctttaaccctacttaaaaaatacgcaagacttccggaatttttttcgttcgcgccagtctgcatgatcaattatgtttccatctattagcaagaaaaaaggggaaaaaattgtatggcaccccatgccacaaagcttgcatggcacctctatcgagatcttgccacctggcgtgcacaaatcttggagcacatctaccttcaaaaccgtatgaaactaattacttcctccgtttcatattataagactttctagcattgcccatattcatatatatgttaatgaatctaaatatatatgtgtgtctagattcattaacacctatatgaatgtgggcaatgctagctagaaaatcttataacctgaaacggaggtagtaactggctatcgctaatctcgcacgcggaaggatgccggcagtcgcgagccgcgactcacacacgcaggtggagacgaacacatcacaggaaatagagacggcggcagccgcagacggccgacgacggcagatcgacgtaacgtattactagcacgcacgcaccaacacggcaaaaaagcggcattgcacagcagcacggccgacggcggcggcagcagcaaagtgcacacaaattgaaacacggcagcgacatcgactcaatcgatcgataaatttaatagtttggaattaacacatgagagcagaactaacataaatattatttttgatatagtttgtacataaagcagagtattaatgaaatattgtgataaaaggaattgttgaatcacaaactgaatcattttcttcattcatgcaatcttcaaagtacatcaatcaaaattatctcacacactaatcattttcttcattcatgcaatcttcaagattctcatcatctgaactgaactgaactgatgatgtgcagtggcttggtctttcatggcatcgtcagcgaagtttgacctcgagtcatgatcgatcaacccgcgcacctctgccacgcgatcaatctgggcagcgctagctccgtcgatttccgccgtgttgctgcatgcttccgcgtcgccgttgccggcagcggccgccctttctggcacacacgtcgtcgtgtcgtcgccgccgccgtccgtttcctgcccgtgcgtcgccgtcacgcgcatcgccgccgccatccttccgcgcgcgcgagattagcgatagcccgttaattagtttttgccctagtatggttttgaaggtagatcagtgctccaagatttgtgtacgccaggtggtaagatcttgataggggtgccacgcatgctttgtggcatggggtgccatacaattttttttcccaaaaaggggcgtgtgaatcatgaattcatgatcaacatccattaatttggctgtttgtccttcctcatacggcctggattggcctgtttttttaaatgggctgctactacaatttttcagagtaattgggctgtttctgtccctcctcatacgggctggattggcatattttgtaacaggctgctataatttttcagagctgagggtgtcctaaatggagtatgttcacttgtaatccctcaacttcacatcgagtctatataacatccctaattcccaatacttaaaatatcgacccctaaagtgttccaaaccgttcaaaataagtcccttggcagtatagaccatattttctcgatttttgctaatgtggcatcggaatccacttcgcagtgacccttacctttcttcacgagtcaccccttcacctctctctctccccctccactttgtgcccatctcattaggcagcggccagtggcgggcggtgtggaagggcaactggcagtgaccgctgaggaggacggcaccggtaacagtggcagctctggctccctcggtcgcttgcgaactcatcgccctccaccaccacccggcctgcacatcccaaccaaacctcgccctgccatcgatgcctcatgccgcctcgagcaccatggcctcccgcccgtatttcacgagctagagtgggatctcatcatggatgccagtgtcggcagggtggatgacgggaccgccagcggctgcggtggcgtactggcttgacgagctcctccctcgcttccgcctggccccgcactcgcgtcttgttggtgattggggactctgcaacggcgaggtcggcatccacaaggagctcgcctccggatcctccgctggcggattctccggcggcgcgattggcctcaacaacttcatcgccgagaaaccgccttccccaaaccggcccagaagaatgggctcgctagcagcggaatgaggtagtcgagtgtggtgcggtgcgacggccgccgtgtggacgttcgccgccgcctccgccgagaatacgtgggtggggttagctgcagcttcggtggacactcgaggtagcgtcggtggcggcggcggtgctcggccaggctcttcggccgcctctaccccctctgttgtcgtcggcctcctaggctggctgaagaaatgagaagaaaagaagagaagacgctcgaggcggtgttggtggtggcggtggagcttggacggactcaccagccgcctccccctcctacccaggctcaccgggcgcttctgccccctctgccgctagcactctccttgctcgctgaagaaatgagaagaaaggaagagaagaaagaaaagaaaagagaagaagaaaaatataataaagaagatgcggatcccacattttttcttctcacttacatgtgggtctcatgttttttcgctgactagaatgccacgtcagtaaaacctatgggactaaaattgcacggttttatatagtataggggtgaagatttttgttattggagataagggttatgaaacaaattcgacacaaaaattagggacgattggtgaacttattccgtcctaaattaattaatcattccgggccaaggtatgattgattccttgaaagttggaaccgtatgagcccattatggtttgggttaattaacctgtaaatgccataataaattgaaacattgtataaatacactacactgaaataataattagccataaatacaaacatccatactaaatacttgaacccaggtggataaggttcaccaccatgaacttaccagctgagctatatcgaggcgggaaactacctggactcggtggcggactatgccattgtaatatgctaaaaaaaaaagttttgaattgagaaccatgtacatgtggcatctgacaattaccacatataatcgatttttgctttgaaagttttgagctaatcatctaaaacactccttatataaccaactgcaaccttcttaacctatatattgtgtatcaatttttttggttttcgcttgtacaataattttaattttgatcccgtaacgaagtacgggcattttgctagtacatacaataaatgtggttaaatttcataactatgtacaaaataccgtcaaacatgaactaatggagatagatgtattcgtctgatcccatggtctgccttgcatgaattgttgcattacatttttgcattgtaaattctgtcttatggctgaaatgaaaattcataagttaagtgattcagtcaccctaaagtctaaactcaagtagttgcatcgaatgtcttgatttcttctctcacagtgatcattagcttcctgtgctgtgtgccctcaaacctcactgttcactgttcattgctataagtagctagctagctggagataagttgctaggtgctaaagcaaataaagagtaaacaaattcattctcatctttcctcccatttcttccctaaagaatcctgtcagtgtccagccatctcctcattgtgtttggttcacaatgtacaaccgtcctagtgtcgcgtggtctaacgatagtaaatttacaaggaaagtatgtgggtaaaaaatattaatattttctccagtgtcatgaactcacgatatatttttaacaaacagacgatgagtgttgttatttcgtaaatggttcacgagattcctcagctcagactctatttgatttgaattcctggttggtaactgaagaacaatgtaccaatcatgtgttcttcagccagtagccttgttcttataatttctgaagcagccacttatagccatatgtttgtgaactgaataattccaaagcaaaattacattgtctggcagaacaaaacgtatttacttaaggtctgataatgtggcctgttcattctgaaattgaggggacatccttgcccatcatctctaatttcactctaaaatggaatgaagaacctatattacaacaccggttgcaagttgtgtcattcaacattgttaatgttggtgtagaacttaaggattttgaagattaaccactgcgaagtgttaggaaacgataagcgaacaaacgataaaaaacaatagatcaatcacagaatacacgagatttaacgtgaaaaccctcccaaaacaggagagaaaaaaccacgggcgccagccagcaaaatatcttcactatatctggggtaaggttacatcgccgcacggtggcttacaagaggtatatatatggtagaaccctaaaaaggatgacgatccatttcgctccggcccaagcctcccggcgacgggcctccgctccactacggcagaagctggcctttattaagtgcaaatgaatttggatcacaactcaacacgaagaacaatttaatgatcagtgactcagtgttgcaacgaaccaaatgctagggtcaaatctacttgctaaacttatggcaaaggtgtggctctgaaccaaactcccccttaatgccttttccctgacagaatctgttcacttttgtttttgttctatgcattcctttttatgtaacctatgcactttaagcagatactatcatatcttaatatcttaaaagttttaagatattaagatatgatagtatctgcttatgtaacctatgtaaaagttttaagatattaagatatgataatatctatgcattcctttttatgtaacctatgctctacaagttgctgaattttttgagtttgtcaagagaatgaaggaagcttcatgaaatggaaacatcaatgacaggaaatccaacaatcagcaaatcttgcttccttgcccagggggcctgtcgttccttcctgacaggggtcgcttatctgaatttaggctgaaatcacttactgtttagcaccaaatagctggaggcactaggcagtctaatattccgcagttagtatcgtcctttatttacaagaaaacagtaggagcctctcctactgtgttagtatcgtcgttgtaaaagcagctcatatcctccaaacattcatagatactgacttcaactgtatatcagctcagttcatttcttcatatttatgagattatctgagttgaagatcatattgaaatattttccaaaactattatcttaatttgtaataatctaaattatcatcaagatggatgggtgccagaggtaggatttacttcatcctttaattatccgtaggttgttttgatggttgtagcattgcactaaaattgcatctgattcttggtgatccacctcgtatgttctgaactttttgaaaggcatctacagactgtgcagtccaatcttcacatgaatacaagaaacaaagtactactaggctttgtagtcaaggtatcaagtcaggttcatgaaagatgccaacaagtaaactacaggcttctcagtttgcttccaaatttccaataggtagtgtacctggttattgagtgataattttcaggtcttcaattactgcacatggaaaataaacaggaagatgggaaagtcctttcttactttgtaatttttttaaaaataacattgtaattctttctaaaataaaatacagatctcttctgatgacttctggtattttttttttcactgcaggtagccaaaattctctggttggcattacttctcaagaaaaatggggaactggttgcccttactgcacacttcgacacatgtgagagcactctttataacaaagtacttattcaccaaataaacaaatttactctttaattaccagacgttctcttgttgatgcacacttgcagggatgtgatggattggaaagaacaaagctggataagaacatgcatgaaactatgaaagtgcaaagctggccacacgtcggaatcacaaaaatgcctccttgccatctcacacagtgccaaatgcaagcacaagcccagatctctgacaatgtacgtatctctacgacccatcactgtactatccttctagtactgtacatatatcctgcatggctatctacctgacctatcatctcatttggccctttctctaatcctatcctgacaaaaaaaagagttgcacaattgcatttgcctgcatcaccccattccaatccttccttgccattttgcaggtcgcttttgagtaaagattcttcagcatggatctgccggcctgtccctacacacttttgttgcttcctgttatcagtggtcagtgccattgataagtgcattgggtgcctaattaaaaactttggcaggagggagagacactccaggacaggcagatgcaactcatcagcgactagtagctgggcaaaaaaaataatcttgcatctctccatgaatgatttgtttctgcatatgcatttgctgcatggcctacatgcttttcaccagattcatacaaaatttaagccaatgcagagtcacatcgccattgtcttcttgtgtaccttgatggtgatgaacaagttaggtatgtggtgcagcgatgacaacgaagctgccaaccatgcatgtttgggggcaggagggagatgtggagccgcaggtagaagctggcagctagcaaggctgtgctggcaatttttttctattaattactctaaatcggctatttaaattactccatacattctaaaatatagcaacttctaatatttaatatttaattttttttaagaatataacaacttcttcactttgctcactcaccatataacaacttcttcctatgctcactcgccttaatcaatcacaaccattttctcaccctcctttttatcttaatcaatatgaaaagaaatagttcaaaacggtagtagaaatcaatataaaccgttcatcttttctaattcaatagaccatatctatttacactgtcatctcaattgttagtagataaagatacttctacaaaaaaattttagaaatgcttatattttgacaaaaagttggtgcatactttgcaagtgctttttactggaagttctactcaaggacaatataattaacttaattgtattataattttaaatttttaaattatagttatgaatatattatttgccttaatacttttcaattttaacttaataattctagaatttacagttaataaatataaataagttgtaattgttgccatgtatgtagtcttagttttagtcttttctagattaaatagctccattgaaaataacaaatacaaaatcgtgtttgatttaattccttatagtatgttgataaataattaatcaagtcctggtcttaacttgatttggggtcttaattatgttgtttttattattcaataactctgaaatttgaataataaggactccctcctttcaaaaatataaccaacttctaaaactcaaattttattccaaatatagcaatcaaatacttgtaaaagtttacttttactactaaactacgtatactaccccccactatcatttagctttattataccctcaactactctgagcctattcctcacccatcccgagtaggcaaccaattctttttatcctgctacttaatatatacccatacccaaggctaaaacttgctatattttgggatggggaaatatcaagttgtatttgacttaaagtattaatttagtgattttggaaattcaaaattgataattgcaagtcgtatatgatataagatcttattttgatttgagctctcacctatatggatggcttgatttatttattgcttcttattaatgtgggaatttgcttgaagtaccatatagtactatagattatatatatatatatatatatatatatatatatatatattactaaattatttttttttgaaaataaacatctctcctatcaatatatatttgtgtgcataagagcaggtacaatagcaggctataaaccagctgcaaacatattttaaggagataaataaggagagagaagagcagcgggctacagatttgtagccagctgtagtacggactccaagacacaatgtgtgtatgataagtgggaccaggtattaatagtgtactatgtaactattgtatgaatgagctattagattgactatagataaagagaaaatcccttatatacccctgaaattttacctaatcccttctatacccttgaattttgcttacttccttgtgtacccccaaaatttgattttgatcccttgcatacccctcccgtcagttgactgttagttgactgtgtattttctataaaaatgaccattttacccttggatgaacaaagaaattcatgaattacattattaaaaatataaaagcttctcgcatgagactattatagttatgagtttgttgtgcgatgtattatttattccaaaaaatatttttagataatgaaataaaaaaatacgtatttatttttttaaaagaagtcataaaaatgaggagcattcatataaagataggactacccatgttcacaacattttttttatgaatgctcccgataaaaaaatccattgtcttattaaaatttcaaataaaaatttaatttattacatttattttatttttaaaatttatgtcaaaattttctgcactaattatttagtctcattagttttataaaatacacatactgtgcactcaaataaaattttcaattgtttttggagcttatatttaaacctaaagcatcaagggtaaaaatgacatttgcaaccaaacgtaacagtgaaatgatggaaaatgtaacggtgggggcatacaaggaatcaaattgaaatttcaggagtatagaagggatcgggtaaatttcaggggtatgaaagggattgagtgaactttcaggggtacacagtaaatttactcatagatgaattggagctagtagttggctatactattaaacttgctctaagatgcgtaccttttagactcatagagtgcttttcagttggaatataatgacattaacttcttgattgcttttcagttggaatgacattaactttttgattgagcagttacccatgacgttttgaactatttatggaggaaactaactagctagctagtgcaagatcggtatatgctgcgtagaattgatcatttgactgtcttcatactcttttggaggaatattctgcaataaggtgagatgctgaagctaataaccatttcagacaaggctaatgcatatggtaatgtggggcccagatgttgtaatggcggcagagatcaggcgctaaccactgcatcaaaaatctgaaaattaattaagcatcggtagcttacgcaacagtgaacagaaaacctgacactcttatatatatatgatttgccaatgtccactttatgcaaacgttgactgtcatattttttatggcactatgttattctacaaatttttgcagttcacatcatgtcgtcgtccctgttaattattagaaaatcaaacaactcatgtttagtactgaagataaaatacacaaagcatgtgattgaagacattagatggatatgttcatgaacaactggatctagcaaatatacaattagtgtgtcgacattctgacttgtttgcactggtgttgcgtgatccatgcatctcacaattaattgtaactgatggtgggtgtcagcggtataattctctgacccggttgatagaagatgatgaataataatacgtggagtaattaattaaattaaaacaacgacgactagcttaataaacatataattgacgaactaattaagttgtattttcttgtgaataccatatgtgataaggatgttgctgatctatatctacaggtactgtaatttcttaaacacatgggtagcttgtgtacaagtatatactagtacattactaatactaatgggtagcttctttttggcacttgttgtgccggttcacagtgccaacgggaactatctaggaccaatattgatatgtttggaaagcagaaaaataaaacagggaaaaatagaaatataaaacaaaggaatgtacgtgtaaaatagagaagtagagaaaacaaatgaatttagttcgctggggggttgtggatggttacaaatgattcggtgtttgaaaacatactcgtgaattatccttttgcaggccatttaatttataaatctaaatcctttgcatagaaatggagcatcctgctaggggaagaagatcaagtgcttttggaagattggtgtaaggttatccaggagaagttccagcaagtgagaccacgggttctagctagtttcccttcgctccattcctataatccaaactgtatgctatagtaaaatttactgtagtttcctctaggttccttccccctcccctccatttatatccttcaatccaaacagcaagatgcagcagatgagtgataataatgtgagaaattgcatatatatgcagttccaatgacaatgagtaatagtagtaaaaactgttgtctccagaatgtctgggatttagcaggcagcacgagtatctcgtggtagggtgtaattttggcaatgcattgttgcgctccatgtgccaaacccaaaaaacttacagagatctctctggcatacatcgatgttgacaaaaggtaatgatcaattgggcttataaaaattttacttggaatatgaattaatattcctaaatataagttttagcaaaccctagctaattggtgctaatcaattaacactagcaatcttgcacactgcctaaaaaaggaaatcttgcacactatctaacgtattgagatacagaaagtaattaaattgggcatatgtatatatagaaaatacagagatgtatatgtgccatctattttgtagctggctgattttgaatcagctattcgatttagctactaactaatttttcatgaacatatttcccgaatggatgttttacgaaaaaacatttaacatagaaatttgtaatagttaacatgcactcaatttatcgtgcactatataagctgcctaggagagatattagctggtactcccctattcctcgaatcctagttgagacgagtagtacgtgttgttcttgctatataacaattttgtttagagacattatacaaatacaagtactcacagtgtgcgcgcactcatcttatttctatgaacacacatacatacaccctacctctatgagcatctcgaaaaaactaagctgacaaatcttgcgattgacaaagtcagtatggacaccttgttatcaatggatacagtctaccactgaaaaaataattagccgtaaatgtgagcacctgtatctaaaaattagaacttgaacccgggtgtgttgattccaccacaagaaacctaatgaattgagttacactcacttcgttgctacataacaatttgttcgtctatccaaatacttaattatatttattttatctaaggctatgggaaaaggcaaggttcgtttgcgcgcatttaaaaaagttacaatatgttctctcttaaaaaataaacactgccacataaaccttcattaatgtttgttgagaagattaatcagtgttggttttctaacaagcactacttttcggttccccaaagagctctactctttggcattgatgagtgggtagcatttgtggtcggttataaaagagttcagatcgggagaatcggctcatttgagccaatgcttcaagcgcctccccgatatccacatacgcatccataccccctaatcaatccttatatagggcttgttcgtttaatccctaagagatcattggaggggattgatgggaaataattccacaccataacatatatggaataaatcccctaaaaatcctcctcaatcccttagtgggagggattagccgaataaggtctcaaagatcaatacaaacatgttcattacatcacatataacattacattgattcagtactaatcatcattccccattatcaagaacaatatttacaatatcgtaccgccttctccccctcctcttccctcctcccctcagtcatcgccttcttctcctatagctcctacggtcactacacaccagatcctaaatgtaagcttgagcaggccgcactggctagatccgctcgcactgagagtggggatgggagccaagtcacttgcctgtcaagccaatatagtcgatctcaccattcccgtaaagccgctcgatctcccttgccagcctgccactccttcatttcgctcggtctagattgagagagaaaaaaagacaaatggcacatgtggagggctgagagaagagaagagggagccagcctagcggtgacgatagtgaggaggacgcgcgatagttccatagagagaacgagaggatttagtgagatagacagagagatcaaccaggaaaggatttttgttggccttcaaataatcgatcgtccggctagctcaatcggctcagctcagtgcaatacccatctataccgatcaatttaaaaaccgacagaagtctcacagtgtcggtgtttttaatgtatagagttggatttttttaatgaaccaacactgatgtgatgcatgtatcggtgcctgttcttccttgtagagggtgtgagccgtatgggtggatagaacacccttatcagtgcttttctcaactaaaattaatagatggtacgagcgaagcgagcgtagctccactggttaagtttcttgtggttgaacgagtccacccgggttcaaattctagatttgatacgggtgctcgtatttacggctgattattcattcagtggtagacgacgtaccgatcgacaacgagacacatgtggtgacttggtcagtatcaataaatgccggctcagtcttgcggaggtgctcataatgatagggtgtgtcataggggtgactgtacgcgtgttgtggacatctgtgtttatacagtgttttagaaaaaataggacggtacgatttaacagttgtgtagtagtggaaaagagggttaatttatcagtggagttacctcatcactgttattttttcttttgcggtgactctcatactgacagtaatgtgcaacttgtgcaacgcgtgagcgaagggcggcgtttgaaaagaaagatatcgtcacgtacgatgtgtatcaaaacgtaggtctacagtaccacatgatcgtaagaacattatcgctaagaaaagataatatgagtaaaagtctaaaagattgcaaatttgcataatacactcggaaattgataatatgcatatccaatccaccaacttgcactaattattaattattgacagagatcaaactactgctccgaagtctatacagtacactaccgtacgtgtctctagtttctggaaaaaaaggtacagctatagtactactcttccaatactaatatattaatctaattgcttaattaattaattaattaatagtagttgattcatcacagaaaattgaaggacgttggctctgccctgaattatgataaatcatatcgtacatataaattacaaggatacatgagccacctcccctcaaatgcttatatattaattgcacacccttgtcgatcgatcgatctgcgagcgatctggaccgcacaaatataaacgaacggctccgacgcacgcacgtggcatccatagaggatgcacatatacgtacgtaagtacgtatattcacaatgtacgcgtatatacgtacgtatacatacgctataccatacgtatgcatgtcgatcttcttcttctctaccttgggagcgggatgtcggccaggtcgtcgcggtacggcaagggctcgtcgtcgtcgacggcgaggtcgccggcgtcggccttctcggcgtcgacgacggcggcgagggaggagtcggcgacgaaggtgacgacggagtccttcctgatggtgaggtagacgacggcgacgatgtagacgagcatgaacgggaagacggcggcgccgacgagcacgttggcgtacttggggaggtcgttgtggatgagccagccgacgaagctcgtgctcaggaagtacatgttgatgccgatgatgagcagacccaggaaccacgagaacactattatctgcattcaattcaattcaatttattttttgacatacatgacgctaattaattcattgatagcgtcactaaataaccagtcatctttgacgggtggtaacttatatatctttttaacgggtatcgactgatgagcatgcgcaatttttataggtagtatatatatatatatatacatatatatatatatatatatatacacatatatatatatacacatatatatatatatacacacacatatatatatatatatatagccatgtgtgtaataataagaaataaatttacatttgttcaattttgttgtagatcagtttatttatggtccttaaaaaagaattacattttctaatgttgacttgtatgtgtctagaaatgtttaagtagagatacaacgacatacgtaatgatctatgttaaattatatttacattttacttccatgcaagaaaaaatatatatagtgtactgaagaacttggctcttcgatgtctgtaaagatcaagcaagtacgttactgcatgattttgacacatcatgccgacgacgcaatacatgattaatctctggtactactgcaagacagaaaaatgatgcaggacgtacatcttggtcgtcgttttcatatgtacgacgatcctctatatgcatggctggaccatatatatacctgtcctgcattggcccctgctgtgctataatactattgcatgagctaggtagctaatgattcaattcaattcactgcacatctcgatctatattatgcacacactgacctatagaacatggtgtcctgtaggggttgcatgcatgcagggtgaaggaccagctagctagccaactatcatcattaatttatattctttaccaacaattattgaaactctaatttcatgcatggacagatagatgcatatatttatgttacttgtacatttgctgccaattgagattaagaaacaaactataattaagcaatgcatatatatagtgtacgatcttacatagatagagttcttgtggggccccatcttgctcttactgctgctgaacttgagaagagggatgagagcaaacggcagctcgaaggacagtatcatctgcatgcacacaacacgtacggattaggaacaattaatcatatatatgtaattaagcaaacaagaactagcaatgatcagatcactactttgatttgatttaattatatataattagtccttacttattgagttggaagctagtctagctagatggtacactgtattatatatatgcatggtgctattttagatcagattgcaaaaaaagaaaagatacctagctagtcagtgacattttgctaatcagatcactactttgatttggcaataatctaaaaaaagaagaaaaagtgcttttgctctaatgacatatatatatgctcttagtactatgtcactaggtacctagtggataccccactactacctagctagctacataaatccgcacgatcgactgcacacacgtgactgtttgggcatgtgcaaaattaaaaatttaaacgcattaaattttaatcgatcggcgacacgacggccggccggttgctcgccggcgggcgccgccgtatggcgcacgcagtttgctatagtaaaatagtaataatagtaaagatttgctatagtaaatagtaataataaaaatgctgaccgaagcgatgatgatgaggcggccggcgcccctggagccgccgatgatggagacgatgaggctcggcgcgatggcgatggttcttgtcatcaggttccgaagccacttcctcatcctgatgtccaagaaaccctgcacatacatggatcatatcatatatatcaacgcgacatgatgatgatttatcatatactccttccgtcattaaatatttgacgccgttgatttttctaaacatgtttaaccattcatcttattcaataaatttaagtagttattaattcttttcttatcatttgattcattgttgtatatactactactactctagttttttaaataatattcataaaagtttttgcataagacgaacggtcaaacatatttataaaaagtcaacgacgtcaaatatttagagacggagtgagtatatcctgaagatcagtcctttggagtgaaaaaataaatatatattttcgggtccgatttatcccgtaactgaaatacgcttcatatcataaatagattattaagaggaatgagactcgaactagatcggttagcccgccaggtagattaggaaaactagttgttctctttctcaacgttcacttcagaaagaaaattttacggtgcgatgggatatcctattttttttaatataatttatagagtttcgttagcatatttttattaatcaattggttttctaagtatatgtaaacagtaaaatcgctggttattgatgagactgcaccgtgaaatggactagaccaaaagagcggagaaatatggacgaaagtggtaagtagtggcagcaaggtagcgtcttaattcgatctgactttaacaaaaacatatggtgaaatccgacgaggatcgccagattacctaattaataaaggaatattatatcactaaatattcgtgatgtaaacaggattaggtgtgcacccctacaattcgtcagttaacctccataattgaacggattaacaaattaattatgtggcagctagccgtttaattaattatagttcaatcatttaattacgcgctaagctagctggtgatgtacaggtacaggtacagttaagttaattaatttaattaattacctgcatgatgtactgtccagcgtatgtgccggtaatagtggagctctgcccagatgccaacagtgccacgccgtacacgatcgcactcgacttgcccagcacgttctgaaccacataaaaaaattgacgtcacaatttgaccataaattagttactcctcctattcaaaaatataaacatatctaataaagttattatattttaggacggagaaatcgtgtagactaattcggtattattgtggttaattaaatattgattaaattgaacacatacaagctagtactacgaatctgaatagatttctatctgtagtactaggatacgtctaatccatttaaaaatttttaatattaaggagtaggaagtaataatgaatgaatgaccttgagaaggaaggaggaggtgtcgaggctgaggttggcgcacttgtcggcgtcctcttgggagaggttggcggaggagcaggcggtgccggagacggagacgacggcgatgtttatcagcagcgccacgaacagcgcgaacccgctctcgtacaggaagaacctgcacccgtcctacgtggcaattcacacaccatatagtacatattaattattagcctggatctttgttcggtttctttccatgcatgaaaaaattctaagctgaatccagtggtactggagcccgaaattatagaagattagtgctaaaataaaacttagctaataaagtattggttttctatgaaatttacatgttaatttaataaaatttaaacaagatttaagagacaggactagatcgagttcatgtcctagctaccctatacctatctcgatctgcccaggctgaatatagctaccttgattcctctgactgatgccggtgtcttcctcgatagcaccaaggcagaatgcaagaacagattgtggctgcatatatataaatgcatgcagtagttaattaactgattagttgtatgaattaattgattgattgttgcgtatgtatgtatgtatgtaaaagcgtacggcatgacaagagctccgaggagggcaatggcgtcggcggtggcgccgtcgccgttgagcctggggatgaagagccccttcatcacctccttcgccggcggcttcacgatgctcagctccccgaagaagcacgccgccatcacgaacaccagcatcgatatcagaaactccagcttcctcacctgttttttttcaaaaaaaattcatcaatcaattttcatgcagttccacagtcagagaaaaaaaactgaataatgtacatataatatgccatttgagtacttgacaatcgatccaactagctaatttcatatactattccatttttataatcgtttctttgagtgcatcctacgctaatgcttgtgatactaaacaaaaacaacttacaaaaaataatttataccccgtatttttggaggccaagaagcagtagagtgctggtgccggtgatgaggacgccgacccacaccggaatatggaacaatatgttgaaagcaaaggccgtccctataactgcatccaccaaaattaacaacatcaaacgacatgtaattaattaattaattataatcacatcgatctgtacctttctatctgttgatcgatctatctatctatctatatatcacctttgctatcatcatgtgaggtatcttccataactagtttaatttttttaaaaaagaacttgcatgcatgatcaattaaaaaggcaatttacaacggttgaggttaactaatcccgatcagcaaagcttcgcgcagctccgttttgcaactgctacaccactgatctctcttccatgttgctagatagatagatatttagatattgttgttattgtttaaacacacatggatgtatacaggacaggacaaatgtgaaatgacaagagggtgacaaaatagttgtttactaatctgcgtaagatgatgaacgtactcacccagtgtttaaaatctaatcttgatgtgcatcattgacacttttatgggaagctactgtggacgtggtcactcctctaaacagctaaaacgcgcatttgcttatgtttgaaacagattattcaacagatatattattggtacatattatctaccttattatatggatgaattaaatatttttttaaaaaatggcttagaacttgtattctatgcaatatcgcagaatatattttttttagaaaaacatatttactagctagagacatgaaagaaataatatgtgagaataatctggtgagtagctgagaagaacgtggcttgatggtgattggtgagatattaatttgcctatgtttgtggattaggaattccagtatgtaggcccgtacggttggagctacatatgctagccagatcaacttgttttcttctactgtcagagagcttaaactgaattaattaattagctcaaagtcaaagatggtgacactgttaaacacaagtagtttaataaattaattattcaggctggaccgtgtcaagttgttactaataagtatataccttctgggatatctgcagcgatgacggccaactctgccagcagccataggaaaatcttgacgaacttggggtactcactcttgcagatctcagccagatgcctccctaggatgtaaattaatgccggccatatattagcactttatcaagttggtaattacagtttaattgcgtgtcatttagtcacctgtaaccactccaagattagctgctagcgactgtatgataagtgcgaagatgagtccaatcagaatcacccagagcagctgcaaattgaaacaacacaatggacagaaaagcacatagaaatcaattaatggtgcagattattcacttttctcttttctctagatgatgtgagagtgagatacatatgcactggggattaaaagtggttctgaaaagtttgtcaatttggagaatttgatggagctagcagatgaattaatggagtgtgagtctgcgagggacaaggaaagggacgaacacctagaaagcatgaaagttactcatgctttcagtcattcagtgcgtaaacagtaaaataaagtcgactgtacgtacctcatatctgtggttggctccggcttgcagatcggtttccactgtttcattttgtgacaaaattaacagttacaatccagagtttgtcaaaataaaagtttcagttgagagagagagagagagagagagagagagagagagagagagagagagagagagagattctcacaattgccaggatccaagtaggctaaagacaccatgaatccaggaccaacatgggcaaggaaccttttccatgcaggctcctgtacacaatttaccaaaactgagaaactaacaaaaagaaacacagacataattgaggatccaatgttccatcagtccttaattaccacatacacacacacacatgaacattcatgagcaatgaatgccatgccaggaagtactctcaagatctatctacattaagctctgctcttgcttctgcagttacagtgaacaactgtccatggtgacagtggagtgcttacaagaagacaactttgtgataattaaggtagcaactgaccttcattagcagctgatcatctgcgtcgagcttcttggcatcttgatcatgtgccgcactagctctccagctgatgctccctctctcactgctctctctctcaatctccattgttgcttcctctcttagcttcttcaggctaagctagagctaagctagagctcaggctagctggaagtagacgaagaagagaatggtggtagtgacgaactctcaagccacaccctcctgtcctacttatacacaaaccatgcaagtatgcagccaaattaacttggtgtatgcatgcgtcaaatataattttttaagacatgaataaaaaaaggaggaaattaaaagagaaaaaaaatgtgggggcctccatgtacgtacggcgtacgtagagaaagcagaattaagagaggggagaaagctccatttggcatctccatgggcaccaaacagcttcctttcattgagggcatgtcttaatcttttattatccaaatgtgtcacactcgctaaatattcatctgggctgtacctaggggagccacagcttgttttgtcccaaagcatggctagctttaagcatttagttaattaattaatatgattagcttttgtgttttgtgtgtgtcatcactgattagaaagcaggagggttatggtgccagggccactattaatttggtgtggatttaatttggtggtttaatattaattaggtgcaagatcagtgtcattggttgggaaaatagggattttggtctagctagctggctaggttcctatacgatttactactttaatgagtgtgttatgccctgtgtgcaaaacctcttgtgttctagaggggaattgaatgagagccatatgtcgtgcaaaaagcttggtgccattgttagttcatttctagaagagcaagaattaactagtaaactagaaacttacatccaacaaacagagtaattaattttaagatatgcagtttacttgtacactcagagagcaacaaagagctaaggtagaagtcaatactatagttatgacttatcatgcatggatatgtatgctataactaactttgcaatcaatcattagacctgaccatttctatgggtaccctattcatataatatgttagcttgccgataatgaataaggccaacaagaacccaggcaaagattgtgttagttagaacactgtaattgacaatcctgcctgctcattacttaatgatgggtggtaagaatgcagaaaacagtggagttaacctcatcaatttgccaccaagcatttactccatcccaaattacaagctgcggtttgactcgagacagtgctcttcaacaacaaaactttgaagtgtattattatcaataatgaaaccaacatcatattaaagtacatctaggtactagtctaacaataccatatttatatcactaaaccttatattgttagactaaatgttagtcaaaactaatgaagtttaaattttaaaatatatgcgcgccttatatataatttagtacgaagaggagtttatactgttttttgtaaataaacagctgtgaatttttctttcatctagaaaaggctgaggcagaaattaataaaaggaaagggagagatgggagatgaagatgaccaagattacaaagaaccaaagaagtgctatagcgatgtgattatatatatggaggatatataaggaaaacaaagcgcgccacacaagagctagcggtgatggaccatcatccaacattgcaagggacgatggctcatgttctgcagtatctgaagtttcaacgtcttagtggagtactgactttgagggttcagtggtacttcagacacaggaaagcccaacaggatggatagatagcagccggccgtgctagtatcatatccagggtctctaccgatggagatgtgaataatatgtccactgttttgagggctatggaggctatagcggctgctatctgatcgtttgagcaacggctgataaaccttggaaaaattattgaaacatgaaaatggatgaaaaaacttaaaaacaactttaaaattaagttttagaatttaaattttagttatgtaccactgataaactaataagtagatgataagagtttctaggaggaggagaggactgttgggacaacggcccagtagttgtgggagttgcgttcgtgatggctataaaagtaattaggtgattccccgcactttactgcgggaattactaaccaattctaaatatatatttttcaacaatcaactaggagtaaaaagaaaaaaaataataaaacatcagggattatcagtacttatcatgaaacaacaaatgatacatgcgcttaaatgtggaacatattaataagtatatgttaaattttataaaaatgatggatagatttattaaaatattgtgcaaatgatgtgactggtgataattggatatgcttgcatattgatttgtagaattaaataaattatagatgatgttttatatttgcatggggttaaatatataattgttgttagtgggtgatgatgtgacatggttgaatgttgaactttagatttataactttacagcatagatatggcggaatcaaactcaccaagtgtatattgagttacatgtaccgactaattcatttcaaaagaggtaatgagaaatgataattctctaacagtattctcacgtggcatataatttacttagttacatcttacatgcaccaacaaccacggatcaacccaaaaaacaatcacttacttctgcggtcacgactaataagctaggaaagacaaacaattgtgcagcatgaccaccatgaccatgacgggtgagatggacctgtgtccacgacattgtgcagcagccccggtcgtccacgggcacggtggtcatgccaatgtctacgaccggcctctctacacccccttggatgtatgcggtcaatagtggaatgtacatagtcaatggttgtgatctcttgcatttctggggcaaccctagcagccctggcctgctagctcgattgcgtctgtcggtgatatgggcccagggtacccgtgctgaagggaaaaatcatttcccccagccatgtggccgtgcgtcccggatcccccgtcggggggtcaggcgtgcgggcaaaaaatggacaatagatgcctaggggcctcggggtatcccgtcgcacccctcgggcctccactccgaggccctcgttcggctaccacgtggcggccgagtggacggaggtaggggcgctaccaggcgcatttatgggcggcgccccaaccgccccccgtcgtgtttaatgcggcgtggctggtcgtgcgccgcccagcagttagacgtgcatcagtcgccttgaccgggctatgaccggatgggataggtggcagcgcacccacgtcttgccctgtgtcagacagcgtgggggcgggtatgccccgtcccatcaatggcaggggatcgatgttcgaccggtacatcccatgcgcttgagcccacaaaagtctccaggaatttatgagggaatgacaagggatgtccccagtgtcaggcgaaggatggcgctagggcccacctgaggacgagcggccgctttgcttttagcctaaggcatgggtggcagctcgacccaggttgatgtgggcccctctccaggaccgagatgtgtagaggcggtgtatgtggtatccccttgaactataaaagcaggaccttgcccaccgagcaaaaggaggactctggggagtttgaaccttaggagaagactagccaaccgtctctttggggttttaggtctcttgtaacagcataaatagaaatccacacatgagttgggtattacgcttcctaacggcccgaatctggataatccctcgtctacctcttgattgtcatccaccgcactagcttgatgcacggtcaagatacgctctcgatcatcgcgccctatcccctggccgaactcacaaagaggggtctcacgtcctcccgctagagaggatctctcctcgacagcgtctctcccgtgtggctgccacgtgcaacaaccaacatgttttaggctccattcgagatcgagctgaaatgatgagcttatatatggcacataaaacaagcttaagtcaatccagaacgagcagtggagaggtcgttgagggcatcaggactcaggcgagtggacagccgtgacgatggcggctgagcatggtcccatggtgtgacttgtaggtggtgccaaccagcaacgaggaggactaacgtggcaggaacgtggcaggcaaaggcacagccccagaggagagagaaacatcggtagtgagctccgatcgtaaactggtgagcgcgtcaatctatgtttcgggacaagggggttccatttttcctagaatttattgaccgatgtggagcggaggtaggctaacaatgatgttatgaatctagagaaaaggcggccatggcggtcatgcatggcaaagaagaggaaggaaaagttgagagcgaatcctcaccaaggcaatgtggtactactggcacaatggagcagcgagagaagcctagtgttgtaggagatgcacaagccatggtgcgggagtgtcccaatgctcgatgatgacatttcagaacttaaaggcttacatgtgggccccatgtacaaaagagagatagagatagagagatgagaaacctaacatgtgggtctaagctagggtatttcaaaactttcatatggtttctcaatcatattcaaccataaattaatatacaataggaacggtgacgagctgattttcgcgtttacaaagtgctttcctctaaaagttaattcatgcgatgttttataaagctaaaaccacgaagtcacgatgctcggtaataaaattatctatgatctttggaggtcacacaacaatagcccgtgacagatgatttatcatgcatgcataagtatgcttagttgctagctaacttttaacttgaataagaaggcggcaacaagtatccacaaattatggatgttatctaattagctgttctgctcatgatttagggtggtgctaatgggcgggtgatcgcccacaacgatcacccccacccccctaaatacactcctctcccccttcctcctccccttcttctcttcctactacaccataaattttaaaaaaaataaaaaaacaaaagttagaaaaatttatgtatagaaatactatctataaaaaatatttgaattcacattcaaattcaaatttaaatcggatatataaacttttgacttataaactttgggtctataaactttaggtgtataaactttagatgtatagaaatactatatataaaaactatttgaattcaaattcaaatttgaataggatatataaacttttgacttgtaaactttgagtctctaaacttttggtgtataaaatttagatgtatagaaatactatatataaaaaatatttaaattcgaattcaaatttgaattggatatataaacttttgacttataaactttgggtctctaaactttatgtgtataaactttagatgtgtaaacttgaggtgtataaatttactaaaatagaaaagtaatgcggtgctaaaatagaaaaccacgtggaagaggggatgatctatgtggggaggggaccgatcgtgcccagcgatcgatcgccggttaggactttcgcatcatttaatttgccgcagagcatgcgcacatgccacatgttaattctaccatcttcccgttttctgaattccgacgacgatgtgcttgcatatatatgctacaacgataacttccaaattaggccaattgatctgttcaattaattatatgcacgcactgagttaattaactgtatggacagtagtcgatcaatggaatgttcttggtagctaagctaggttagatgagacaattgtaatgcccccttcgaatgcctaagttaattaattagagatatgaataatgtaattaatgtcaacacgcatgtttgtttatttgtactagctccttgaactttgaaagatatgaattgtatagcctttttgccaacaattaatataggcatgtacttgatgaggctgtgtaaaatgtcatgggattgacatatagggtgtgtttagttccttaaaaaaattggaagttcgaaaaaagatagaagtttagaaaaaaaaagttagaagtttacgtgtgtaggaaagtttttatgtgatatgatgtgatggaaagttgggaataggaggaaaactaaacacggccatagtatattcctatagacaaatggtagagtagtccaagtgttcgtagtactaagggctacgagggccctcagccctaagtactcttaccatttgtcacgtagcacggtgtacggtataccatatggtctaaagatacacgtacaacagcttcatgctgtcgtcgaatgggagaaatgacatgcttggtgctttcgatctcctgctcatcgagggcaaatgctttctgtattgagattttgaactaattataacttaagagctatagtttgatttgtttgcagttcacaaccactcctcaatcaccatatatatatatttgataactctattctacatctcctctccccttacctcctagcgcagcccaacccatcatttccccttcgtccctccaccccctctctatccctttcttcctatacagtagaaacccactacaacaattattgctataaagcgtataaagcgtgcaccacattttagcatatcattatttattccgagccatcgttgaattgttctgcatgtctccaaatcaacaatatcgcaaagttgggttggctgccatcaaattttttagccccgcctagatcacgcacgcttctactgtgagggaaaaaaacccaaagcgcatctgcatcagcgatgcctgcacgggagaaattcgcggtgaaccaggatgactgcggcatggagagtggtgacacgtgcgcggctgttgccctatcacctctctcactttccctctcgttagcccgattggatgccgctccaccatgtcgtgcctcagtttatgtctcttctttgtttccttagaaaccgccatcaaaattcatcggaagtaatagcagccaccttttcctcttcccctcttattttattgttctcctcctcgataacgcccatgtccaatggttgttgacatcttggaggtctcctagctacatgccttgctactattttcttgcctgcatgactggatctgtgcgctagataactaatttggtgattgcccaagtttttctttttctactgccactggccagttggggtatgggatcagctcaactttgctttggtcatctcagcgcttattctttcctccatcttcacagataattatcagatagtacgttattcggagtattaatttaatattttgtcactttttaagatgtggcaattaagaatttgtcactcacagtctatgatatgtgggtcctcatgtgtttatgacatgtggacccagtggcaaattcttagttgccacttgtaagagtgacagatagttaattattccacgttattcttgcacgttactcctacatactccatatgtgtattttaggtacaccttcctaatttggtacctctaagtttctatctttttccatatgataaatttaatttattttctttaatagaaagcaaatttagaaattcctaggttgcaaaccttctttttcatatatttcctactgtatagcagattgttttgcaaggaggattattgattcacgctatggtcaatcacgtcaagtaacttgcatgtttttattatctccctttgcagacatttcactagccactagccattagccaatatctatctaatatctgcatcaggtaatgcaacagtctatagttaagagcaaacgttattagtcagatcggttagcttcattgtaagtgtgcacatgtcatttcgatgctatctctctatttgtctgtccaagtatcaactatctattatattggtatttcttcaagtttacggtatagatatgaagtcacgcagcaacgcacagagaatcaattagtctatactagaatagagggagtacatatgcatctttactcacacagagaaaaagttaagtccataacttaaacaagtcaatgcacaaatttcaaacatggtacttaacttaattaatagttgcaagtacatatacctgttaatttatcccacttcaaattgttgtttaatattttctagcttcacacatgttccatacttacatgtgcacattgactcgagttaccagcatttgatgggttttaataagtactgaggctgataaatgggcaagtagtaactactatatgtatctagagtttaattaattaatttggttaggcccacatgccaatactggtttaagagattaaaaataatttctaggaattgtcaagcacatatgaaagctccaagaatacatgcatgaatattatctgttctcatcatttcagatctaagcttctctagtactagaatataattgtgtattcattaaatttggctgacatgagctatgagttactcctaaggagtacaaattaattactgccaaaagtcaaaaaagcatttgcatcccagcttgatggccgcaacatcatgtgttctgtagtctacgtgtatatccgtacgtataaaattgtagagacaaagcaagtagcttacaaattcatcattttcatgaagcaacttgccagaatgaaattaaactgacccatatgaacgggagatgatgcatgtgccaagcgtgaatctcgatggaatttaagtgtacagtgctgactggtaagcagtcatgttcgcctcaaaataaaggaaacaacaaaaggaggagggggggggggggggagaattgttattgggacgatgcgatctaagtactccctgtgcagaagtcctaaaacaattactgtgaacaaggtgaaataaattaaaatgcatataaatcttcctggcaacttgacttataccactaaacttatatagattttgggaagataaatagttaggtaacttggcttttaaagctaagtttccttccttatataccattatccgaaggaaatgttcttcaattgttagtgttatgagttctgttcctcttaatgtgtcttttaggagagttctgttccacatcagaattttatttcttggcatgatttgtgtgcttctattgtacatatccagttgaatcgctcatctgattgttttaaatggaactttaatcggaatggtcagttcatggtaaggtcaatgtatcttgctttaattaatagtggctatattaagagaaataagataatttggaagctcaagatgccgcttaatattaagatctttatgtggtatttgcttaaaggtgtcgtgttaactaaagacaatttggcaagacggaattagaatggtagtttgagatgttctgcatgaaaaatgaatctatccaacatccttttatagattgccattatgcaaagtttatatggagagcagtccagttctcttttagtttatacattcctactagcataacacatattttttatggttggcttttaggggtggacaagaaaaggagcaagtttgtacttgtaggagcttctacgatatatgttgggctctgtggttgagcaggaatgatttgatttttgataaatcatcatccatctcatatatgcaggtaattttcagcgcaacatattggctttgatattgggcgtaactacaaaagtatgaagaagacggagagtttataaaagttgcatatcgtaagcttgagacgacagttatgcaactttttgtcaattatggttggagattcacaaatagacttcaataatgtgttttccttattttagtttcgttacttattttgttcattgggtgttttcaatgttttgttgaactacactcttgattgagtgctactctgtaataattggctgtaactctcttgagcaaagaccgggatgttatattccattatctaaaaaaaaatcttcctggtgaaaatggattgggatcctctaacgtgaagttagagggacgtggtgactgacatgtgggccccaccactcacgggccacctgtcagtgaccacgtcagggagcagttcacattagaggatccggttcctttgaaaatataactgcgtcctagctaaggccatgattgttttaaattattgggtaaattattgctacagattatcgatttgatcataggtataaatcaaatattttaataaataaacttaacaaataacttaaacaagtggtataagcaatgcaatagttttttttataaaaaaagtgttgtttccaaagaatatcaaataggaaatactccctccatcttaatttgataactctctaaagtaaatgacatcaaaaccaacaacattaaaacatccatcattgtaaaaataatccttatcgatcaagctccgtcgcttcgtcttaacaaaattaattcacacattaaatgttgcatatataggttaaatgaactgataaaaattaatctttattggttgcatgcatgcagtacatttcacgatacacatttactctttgcacaaataaataaagagacactttgttagataatgatcatttcggaaaaatctcaaaaatcttatgtgataattaaattgggatggagagagtaatacatttcaataatccagtgatttactgaaaagaaataagtgccacatgaaaatttctaccgcctatactatcagtttatttttttattataggatataatccattcgatagaaagcaactgatggcctattatcctagggtaccgtagaaaagggaaaaatagcacaaattaaacatacatggtgggatcctattagattatattaactgttttaaatatgtttatcatattatattgctcatacaaatacttaattagcatccataaatatatacggacaattgctcgtttaaccgtattttgatgcttaactactaacataatcctactttttaaagtttgctattgaccccgcttttcaaaattgtagctaccttctgaccttgttttcactccaccatttgtgttacatttatgaaaaagaaaaaaaaatactagcccgaactaaccaaaatgtccttgattccgcataaccgtatcccccaaccttaacaaatccatgacccccggcctgacccaagtcaatttggcgacgcagctggcctagcactaggttttcactgatacggagggctgggatagagggagcggtggcgcggttgccacaaccgggcacagagggaggtataggccggtagagggagagcagcggcgtggagcgagacccggagcgaggtcaaggagctaggtccggcgcacggttgctggcatgtggcgcggaggtgggtgaggggatgaagagggtaaggtcactactgccatgcatggaggcatgcgcgggtgaagggagagcagctgcgtggagcaagagacccactgcacgcaggggaggcgtgccacccaggggctcactggcatgcgcacggagttggatgagggggagggtgcgggagctcaccggggacaagtgtcaaggaaggcccaagagagcacgctgtcgccatggctgcccgcccacattcagtagccgcttccccctccatgccagctttcatgagactctagacaatgagttgagccgcccccaacctcgtcgagccatccatagcctcgtcgccgaccaccgtcgttcccacgttgctttgctcggcggctgcgcgctgcttgaacgagagagaaaccgaggggaatgagaaagaggaagaggaaagaatgaaagtctgacatgtgggtccatccatctgttagtgatgcaagtaatttttcgtaagaaaataattcagaaaaagaaataaagtcccaacagtacagatttggttgaaaaaaaaacgagaaagcatgtcaaatgagtaagggtataaatccttgagttaacatcgttaggttgctttgtgaaatgggttaattggatctgtgccattatacattttctgatttagaaaaatgctactccatccatctactttagattggcatatttcaatccaaccatctttcttcttaatgactttctcggatttaatgcgtgactcttcattcttccacataagattggctacatgggcatgggaaatataaatattaatgaatcgcttgtttacgagaaatactccctcagtaaaaaaacccaaccctggatttgaatgtccagattcaaatctaggattgagttttttttgggatggagggagtaactaatagcatgtttaaatatatgataagtagatttacttatatatcctcggtcattgtgccatgatattcatatttgcacaatgaccaatgatatttatgatattagcatgctatcaccatcacattttccatgttctttctttttcttttcttttcttcttctccctgtcagcatgctctggggacgtggcagcgtgcgggcggcgcaacagtaatgtcggtgtcctgattggggcggactggagcacgtcgagcatggttgacgttcggacctcaagcggatcgaggcagtgcagtacggcgacgggcttctaccttctttgacattggttggggcaacgatatatgtccaggacaggggaggtccaggacggtagtacggtacggatcggaggctggtgtggccaatgaagctctgggcttcgtctactgtcttttttcaatggccgccgtcggtaggagctccatgccaggggtggggtgatggggtaggcaggaagcactgggggatggcgttcttggctccggcgatggcctttgatgggggaggatgctcgtcgcctacctcttttttattgatggagaggggcttgccaactagcctcctcgcagcgagaggatggaagaaaagaaagaagaaaatagaaaatgttatggcgatggtatgttttcaaatttgcaaattttcagtggcacttagcggatatcgcaaataatagtggtacttttttcgaatttgccaatttgaagtggtatgaattcaattaacccttatgaaatagggtcaaccatgatcttcgtttaaaaaaaaggtttaaataagaaaacataaaacgggggcgttaatattagggaaggacctaatatcaaataattaaaaaggatgagactttcaattcagatcgtctatcccaccatctttgtacctagccagaagaccgctgggtgtttctcgagaaaacttaaaatagcaggatctaattggacattataacagggtcaaatgcacaatcaccccaaatatatatatatatgtaccattattgttcgcgaataattcatatgcaacgtagtacaactaatttctgacagatagttggccaggcatttaagtttttgccggcagataaatggttttacaacgtgatacaatcattgttttcgtcccctctcggagcgcacacaaaagaatcattgtgaatttgtgatattttattacagtgaaattatgttatgtctaaattgaacaaatgtgcgttcagttctctgggtcttttaaagcatatggacacacatctgaagtattaaacgtagactaataataaaacaaattacagatttcacatgtaaactgcgagacgaatttattaagcctaattaatctatcattagcaaatgtttactatagcattacattatcaaatcattaggctcaaaagatttatctagcaatttacatgcaaactgtgcaattggttttttatccctatatttaatattctatgtatatgtccaaccatttgatgtgacgtttttagccaaaatttttttatgtaaacaaggacaaagaattccaacatgcatggctagtattgtaactctgtaagtcatgggtgacttcatcactgtctctttcgcttattacaaatggaggttcattaactgttttcaattatagggcatgcagcacagatcatgcttgtccgatcatttatataaattgaagaacataattattttaggactcttcaagaacacttcatcagtgtaactaagtgatcgatgactccatcctccaacgttatgatgaatatatgttaattgaagtcaacttatctaaaatatcttgagagggctacatatgtctcgctgtatgtacttgtttgaacaactgtgtacggagacttattttgtaagatatattggccccatcgtttcgctttttttctaataagccaaaacggcttattaggaaatacaaataaatttgtaggtacgtttcaaaaaaaaattgtaggtaaaacttttttacatgtgttcttgatgacttaaaagccaatgctgaaaagaaactacgttgaaaatatctcacaatcaatctcaaaatttaaaaatttaaaatttggctttttcgttagcttaatgggccatccgatgggagcctatatatgtattaattaagccattagtagacagatgtttatcactgaattgctttcaacattgatgcaacctgtgaacactagcacaaaaggctcacagaggtcagcgttataggtgccgaaagtgttaaaagtggcacctatataacttttccctcctccatgagctgaaaacacaagaaagacacatttaaaaaattataggtgtcgattctatagaaaaaccggtacttataatatagatgttggtttttattataaaaaaacaacaactttaatttattataaggccctgtttggcacagcttcaactcctaactccaacttacctggagccaaagctgtgccatacagttcagatcctctgtttttgggagtggagttaacagagctactccttaaaaatgaactacgggggtggggttgggtttttgctgctccacagctccactccaccctaaaagactcactaccctttaatttttaatatatttacacaaaatatgccactgaactaccccttcgtaccccatctcctcccattctctcccctccccatattcctccctacagcagcgacgggcggcagcgagcggtggtggcacggcgcggcgtgcgagagccacgagcggcggcggcatcggcaggtgcactggtggtgttggcacacgggcggcagtggcccgccggtggcggcaggcggcgcacgggaggcacgcgggccatgcgccgcctaccacggtggggcacgggaggcagtggcctgctggcgtccctccggcggcgcacgggcggcaacgggcgagcggtggcagccgcagccacggcagggtgatgcgtgttcggcggtggtggcagtggcccgcgggctgaccggcggcggcggcgacgatgcacgggctgagcggtgacggccgtggcagggcgacgtcaaccaggtgttcgacgaaatgcctacaagggacgtggtggagtggagctaactaatctaggcaaacactttcgtacccacttcaattgctgtaggagttagctctcgctagagttggagttgggagctgggagttgaagtttggagccctaccaaacagggcctaagtgttggttaattagaaaaccaacacctatatacactaaaaaaccagcactcctctctctctcgtcccggtggccacagcggcggcgttctcccctccaccagatctggagggagaggaggcggtggtaggcggttgcacccgaggggaagcggcgggcatcggtggtgccctccccaaggggaggaggcagcaggcagcggtgccctccccttcgccagatccagcaggaagggagatgactacgacgcgctccccgcccccttcctttgctatgctcccctccacgtactgctgctttaggttcttcgatttttatgggcatttttacagcagcggtggtgtcaagcggcggtggtgggtcgagcagcagcagcggcggctctatgtcttatctatctgttcttgatgtgtattttgtgattttgtttttcatggagattattagcttcgatagtaccccggtggctgggaagctgatgttcttgatgttcaggttcatatgttcttggatttttttttgttctaggcgaggtgaaggggagctgatcgatgcatcagctcaaaccgaggcgatacattgagtcgccttttttttaagattcctggaacctcaaaggtgccagttctaaaaccgatacatttaatttctctcatctgtaccgctttctaggtgacggttgaaaaatccagcacctatgccggatttccaaccggcacctccaggtttctatggtactatggtagtggaagctcccgagcaccaaaaaaaacctccagggaatacacaaaagccattcgggagactggttccctaagggcaactcttgtggaactagcagttgggaacttccctccctttgcgtattgcgacatgaagcatctgtacacgttgataggtttaaagaaagcgaaaatgttataattaggttaattctctgtccgaattttatagatataacccagctaatatatatttggaagtaaatgcagttttgaactccatacatgttaagattataggtactgtatacccacacgaacagcttatctaagtgtagataggaggtatagacaatatattaaaaaaataagaaaaaagtatactcaatagtcctcttaactatttcgttgtaccacaaccgagcacagcttttccccaaaaaagaaacaaattatacttatactaagtacactatactacctccatgcgaaacgagagtgtgtaagtccacctcggtaagtcttagatttgatacgggtgcttgtacttatggtaaatatgctttcagcggtaaccggtaagtcctagatttaagcgatgtacccatcgatcgataccgatacacccgtgatgatttcatcattctccagatatactggcctagtttttcgaagagaatcatagaaataaggtgtgcgtgtgtgggtttatcgggttgagtgcgcacgtattgtgagtgtacaaatttgtaatgtatttctagaaaaattatatatattgcctccaaattgtatgaagcattaaagtaatctcattttttttaatgtgagatatatatttatgttgctagctatattatatactagtataatgcccgttcgttgcaatgaaaaaaaattactatggcttgttcgttagttgtgggttgggaacccatctccccgcacagaaaatggaatagtccattagcgcgtgattagttaagtactctctccatctatttttgatagtcatatttccaaatctgaaaaatttatttttgatagacatatttcaatgcaacaacctatccctttaatgattttctcggatttaatgcatgactctccattcttccacacaagattggttgggcatcgagaaatgtaaatattaatgaatcgtttgtttacgatgaatgactagtagcatgtttaaatggatgataagtagaattacttatccttggtctatgtatcaagatgaaatatgactatcaaaagtagatggaaggagtattagctaatttttttcaaaaatggattaatttaattttttaagcaacttttgtatagagacttttataaaaaatacaccgtttagcagtttgaaaagcgtgacacggaaaacgaggtagagatgttgggaacttggaacttttgtatataaacattagatgattacgcttttaatcttcatgatcttagctaattaacattatatatttttttatgaaaccttatatatattatatatgtttcatattgtgcgttagagtggacatggtggtaagtggtaactaattttcccaggaaaatgaccagtaaaaaaatagaccagtttaataaaatatttgttaatcgagccagttcattcagagttctatagaaatgaaagaaaaataaagcacttaatctcaagccggcggctccgccgcaagctgattggtccattttttacccattaacttactgctacgtgtcccttaagcatcttgtactgctgtctttatgccggagcaacgaaaacaacagtggcttctgggatgtctcgcgtctcatgcggtctgtgggccaaacactcccgtccagctccacattgacccatggaccatgcaagtgtgtgccctgtgctggccttagcccagctgtatgctgagttcccgcaggcggataaagtccactttgactcccttaaaaaataggccgaatctaattagtacctctcaaccagaaaaccagataagacgactcccccaagtattgaaaccagtgtaatttgatttcctcagcgattttgaagtgtggttttgctgaagtgctactaacgtgacagtgttacctggtattcgtctcatgtgatgtttaggtggcgttagaataaaaaaatattatatgtgagacctatttggaatttacacaagtataatatgggacccactaccatgtaggacccgcatgtcattcttttctctgtctaacccttcttcctcctctctctcccttatctctatcttttctttccccttcggccctagcggcggcggcagggcctccgcgaggggcacgcacggcctccgcgagcggcgttgccatcaacgacggcagcggcgagtcgcggcacaccgggcaagtggcgctcacctgtagccaccacaaccaccgcatcccgagcccgcgccagagctcccgacgatgtagttgccgctcccagccatgaattgcaccgcggatgagaatcgttggggaggaaatgatagaaacgaaattcaactggaagaacgaaataaaaaaaaaactgttatttatctacaacgatgattgggaagaaaaaaaggccaagattgcccaacgggtgccatagcatgggccaacggcagaggatgtgaacccagtgataaccatcaaacaccacgctgatgcagacctgagtgagctctctgaatattcagacccaacaggaataaactcttacagtctccacataatttacataaacaaactgcatatatactactacaaaagaagaaaaaccacataggtagtattatcagcataagacataacacaatagcaagtgcaatgcatcccgtttagaattaacatttccatattttgattacaagcatccctctctgtcatacaataacaaaacataccaactctggttgataacacattatacattacttttttttagatagacaaaaaaagagggatatgcctcggaatacttgggacctcctaaatgtctccttagcattcacgcaccgtgagcactgacgagataaatgtcatgttcacgaataaaaagatataggaacataaacctctttctgaagagacgctgcgaagacaaaaaaaaaatgatgagatcataaactttttaaagatgtaaatttacatgcagctaatctttgatatgcaaatatgcaatgcaggtacccagatccacaaaaaaagaggtgtacgattcttacaaaggatcagtgttcttggtggatgtggatgaaaaaggtctcttggctccattaatagaatccgaaaatggcggcttcatgggattgtttttcattaaggccatgccagttcttgctgcttgcgttagacaatatcacaagttagaagacaataagcccctggttattgggaatagccgtactagctaggatggatagctctagtggaaacatgatggagtgctctaatgccaaattcctgaaaggcagcaggtatgaaattaagaagataaaaaattgcttggaaacaaatagaaaattcagctgctgtcggaaacatggattaattaattgctgctcataacctcaggatggtggaagagaggggatcaagagagataagagtttagtgtgggcatacagcagcagcgcctgcgcaggtgacagaggaagaagacgcatgagcggcaaggaacaggggcgtcaatctcttgcacaggacacgcgcggcggccatctcagctagtggacgatcgaagtaatccgatccgttcgaaagaacagggtttggccagttggcctcgaccggtgctgcatataaaaaggaggaaggaaagggctcaatcccgaaccagaaacagtcgactcaatcagacgcggaataatatcggaaaacacaacatccgatacggtacagcggcccacaccgttttgaaaccgaatcaagaggggaataagttcactttgactcccttagaagtgacccaaatctaattgatgaccctgaaccgcaaaaccagatatcttaactcctaaacggttaaaaccggtgtaatttaactccctcggcggttttggagaacggttttactgacatggcacctatgtggcgatattgactaagtcttcgttccacgtggcgttcacatggcacttgtgtggcattagaattaaaaaatatgcataggactcattagtcattcacacgaaaagaaatgtggacccactgacttgtggggctcacatgcctcgactgcccttccccttccccgcccttttgctactactgccactcccaccgacaccaatcccaccgcattatccaggtctcatctttctcttatttcattctattgcaattgcaaacgacttcaaggaagattattatcgatttggtttttggtgcagatacggcgttcttcctaccacgacgtggtgcgggcgacggaggtggaggacgtcctcgacatctccggcgtccaaaccagccacacggcgccggcgccgccgcctccccatataactgtcagatctgcgtgactgcgccctcgacctcctcgacccattccgcttctgctccctcggttgcaacttgcaaggttttcatccttttctttactttcacctcaatttccacttctttatttcttctccactatatacaatgccgatgcagtttgttctgctcatctttctcaatctcatctactacaagtggagtactacattttgttttccattttcttctttttgtttgtgtgttatgttgggtcacgcttaagcctgtgtttgcaaccccttgtttccaatccctctctctcgtttttcgcatgtacttaagcctgcctgcagctggtggacagacaccaagacgagggtgcccgcggggccaccgtgcaagctggtaaggtgaccaatgatgatgccgccgccagcggaagcagcaagaacttcggtggcgccctagctcgccttcgccgccctagcttgcctgccgccacgcgcgccaccggccgaaggggaagaagaaggggagagaaagagagagaagcgagagagcgaggaggaagaaggaaggagacagggagggcccatggccccacatgtcagtgggcccacatttctttttgtgtgaatgactaatgggtcccacatatatatattttaattctaaagccacttaagcgccacgtcaacgccacgtgtaaagaagactcgatcaataccaccacgtaggagccacgtcagcaaaaccgcccttcaaaaccgcctagagagttaaattgccctggtttcaatagttcgggggtcgagatatccggttttacggtttagggtcatggattagattcgtgtcacttttaagggagtcaaactgaacttattccatcaagaggctacaaaagtactactagtagatggaccaggataaagggcccatccaaacaatccgggccgttccggcctcaggacataaggccatcgaaaaagcaagttttggcatgggataagtttacttgaggtcccttatgttgaggtggagtttgaattacgtgctcgaaccgcagtattcaaatataacgtgtctcctgtaacttgtaaaactggagattccagacaatatggtgctgctagggtctagctaatgtgacgagtcatgcatgtcctgactatttcttcttcctccgaacttttcactcactcactctctctctctctccatctcacgctcctcgtcgttgcccgagttcaatgtgtggcctagggaacaccgagttgaagataccgttcgaggacgtgtacaccgagctagaacgatgacggcgagagcgtactgtgctgtgcatggttggcgacgccgccaaccagtgggagcaaaggagagttacgacgcgtgcatgctgcacaacccatttatagccccggtttgtaatagtccccggtagcaaacaggacttcaaatccaggactaattaaatatcgttatctttagttaaaaacccgagactaaagatcaccaactaggaataaagatggcggagatttgggttgttaggcagtgggtatcactactagagaaatcatctttcgtcggtcgtccaaagtccctggtcaaaaaagttaccagatctagttaggccccaattaactttagtctcggttggtataaacaaccgggactaaagatatctttagtcccggttctttaccctaaccgggactaaaaatcctcccgagccgcatgcccgccaagtctgagacttatcgatcccctccccttcctctctccctctttaatatcggccttatccttctcatctcgatccaacaaccaggcacatgcacttcccctctcctctcctcttcctcccctttcctctctccttcccctccccaccaagtcctctactcttgctctctgggtcggcggtggcagccgggcgggagcggcggtggccgggagggcgtggcggccgccgggctggggaggcgcgtgcggcggcctcgcgatccccttcgctagatccggcggcggcggtggagcggaggggatggcggctgtggcggccggtggccaacagcgccctctcctgccggtgcgcgcatatgcatgcatggaggacggccgggcatcccctctgccggagatttgtccttctttttatttagactttgtgattcattgtattgattgagatgaagaatttgtaattcattcgatggattgagatgtataatttctttttggagaatctataatccattgcatggatctaagatgtataatctgtgatatattttatttgagatgtatttgatttgtggtacttgggaatttagtttgatttggcgatttggggtttgatttggggatatgcattccactggatttgggagaaaatcactagcaaaaaaacaatgaaaaaaaatagaaactaaccgggattgccgctgcccctctttagtcccggttggtaacaccaaccgggactaaagatctaattttagtcccggttatttcatctttagtcccagattcgttgtctcggttggaaaactaggactaaaaaggattcccaaacgggactataaaaggattctccagtagtgtatactcgcaaacgttgtagccgcacaagttattcccctggtcctactttgcacactaaaggagaaacgacaagatatttaatatacaattctattttagagcaaattaatgatttaatataattttggagcatgtactcactggaatattaaacctccggccaagtttttctttccaagaccctttgtccaaagcacggaaccgagcctaagccctacgtacagttacaagctaagattaattattatccgagatccacatagtagcaatagcaaaattcataatgacagtggaatagatgacattacttgtctatcacttcaaaaattttgtcaaaagtagactcctctttatccattgaatcatagacatggactctgtatgagtccatgtctttgaggaaaaggacccagtggaatccgtaaattgcgtgagatggattttatttgaagatatcattactggaaatggatacaaatatatattcgaacatatctattatatactaaaagtctattaatctccctacaaacgctcctaagccgccatgtggtgttcctataaacgctcctaaattgccacatggcaattttcaatctaaccgttgagtttcacttaaattggtggacccattattttacaccattagattagatctacttgaaaagtcattgctacacccataccgtataagctttatacatgagaaagttttacgagaaaaattaaagtatattccgatcggatataaacccatactactgctcgcttaaaaaaaatcaaacaaacatacgtgcagctataaagccaaaaaaagtactacattgtacattgaagccgtatataccggaaaatcatgtccatacgagtgaaaccgcttataccgaaaaatctacgtatgtacgcacaattaaaaaaaacagaaactttaggtactgtttatttaaaaataaacgaacgtacatacgcgtagacaaaaccaagaaaaaaaatgtacgtatgcgtagacaaaaaaacagatggttttttaaaatagtattttctatagtagaaaaacaaaacttattacttcacaaatatggtaaaaaaacgtacaataaaaaatatatgatttgaaaatatatgttttcagctacgcgggcattctttaaaaagttgatctagcaatatatacagtgactgactttatttatacatgcaagtgaagtggtactgaaagaaataatatatagtcacttttcttttataatttttcatatatgtttgaatgacgtgcataggatagtaaatggaacatggaagaatatacatacataggatagtaaatagaacatggaagaatatacattttatgaatgaagtagatacttacgtatgaattctaattgtgatttttatcataaataacacaatggtccaaatagataaaaaaatgaaggtatgatttaaaagttaaaaattataatgagttaaaatatattgttacaaataaatatataattaagaaggttgtggttatttaaaaattattgttgcaaatattttcataaagagaaagggagaaaatgtaatcaagaggataaacttcctacaaacacttctaatccggacatagtaccctataaatgctcatagaccagcatgtggcactctaataaatcatagaaattttataaaataagaaaaaatcccgaccaatcggttttcatttaatttggtggacccattattttcaactattagatctatcttaaaactacaaaataaatttatttgtaaaaaggcccatgtcgtattggcacgaccggcaaaaatacatgcatgtaggtatgtaggtattccttcttaagaaaagtacgtacctacgtagagtatgtacacagctattcctatgaacagtgcgtatacacaccgcgtcccacatccttatttttttttcttctcatcatttggattagatagaaaaccaaactaataatttaaactaatatcaactatgctttgagttgtaaaaatatatgctatttcgagttgtattcaaattaggcgtatgtcatcgaaacacccataaaaaatataaataaattgaaagtatagattatgtgatagttaaattagacttacattttccaaaataaaaacaacttcaagtgtgtgtagaatttcaaaaattactcactctctctctctctcttgtaaaaaatactgatatggaaaaatgatgttataaatttatcagaaatatttttttatgtattatgtgtttactctattcatatattattagaaaattgaagatcaaatatattcatttgacaccacgtcaatatgttttttctcctacttagcctttgttcgatctagctcattgacttagcgtatccagggcacatgaaaagtcacaagtcattagcacaagattaatcaagtattaaatattaaaatcttgaaaatggatttatttgtatttttagaaaacttctataataaaaaatattttgtaaaatatgcaccgtttaataattcggtaaacatggtcatgataaataatgaagtagccactccgataagcactttagaacttaaccataaatttattacttatgcactaaaactaaatatgtagtgtataatatactttgtgaatctagaatagtataatatatcaatcgtatgtccccgataaattctatgtaataagttctatatacaaaccagtgtcaacaatcgtcaagttatattgtttatgatacatccatgcacaatgcaattaataattagttgacatccaatatgcacgtgcgtcatcaagcaccgaagatatatgatgatacttagtgggaacccataaaaaaatgatagataagtagaggatgacacaaaatcacaacaaacaatagttgactacaagtagactatgagtttaagcaatagtgttcctatacttctacaaacacttgtgagatgtcatgtgatgctctaataaataggaggaaatttaagaaaaaatataaggagaaaacaaaacatctacccatcgatttgcacttaaaccgatgaatccattattttcaaccattaaattagatttattcaggtaagcccttacttctataaactagctaatccctctctatgcacgtacatatacaagagatgacaaaaataaaaaaaagaagtgcgtgtatatatgcacgtacatatacgagatgtcaaaaataaaaaagaagtgtgtgtatatggtccaccacgtctggtagttttcaatttctttctttgtagccctaaggttctcctcaaattatacatatatgtagcgaccactctttgcgaggttgtcgaagaagccacgctgccatggcgccgcttcatgtcaccctcgccaattttcttgaaaatatttttttgactaacgatataaaacgcaatcataggcagttgtttaaacatgtgcacagccaccctatgaatatacatacgcacaccctacctcctatgagagagaaatatttgtcaaaaaaaacatgaaaaagaacgaacatacgagagactaccattcgggaaaaaaaaacttacgtacatacgtacaataaaaaatgtcatatggaatcatattttatcccttttaattatgccgttctcatataaattgtgttaacaattagtacaaataattttgacaatatagagtatttctttgtacattacccatgaacatgcgtaagtgaattagatgtataataaaagaaaaaaaacatcaaaactcatattatgtttgcaaaggatgatgataggtaagtttacatataaccaaaacaaagtgattttttgtttgaatatgatagacactatcatttaccttatcaaattcacggtataaatatttccttcttttatggaaaggttacgaggtaatctactgttcttatagttaatatgatgatatatgactttttttcagattttttttatataaacataaaataaattgcccgcgcatctgcgcgggctaccttcctagttaagggaaaagacaatcatttacctggcctgctctctcgtttacccttgttgcaggcatgaagaaatccatgaattacaatggagtagaattcttcacttttggagaagataacaagctcaaagtatttccaccaaatacctataaattcaagcaaaaaaactcacataatattagacgaactccaggaatgcatattaggcaattttcggtaccaataaaatagtaagagggaagaaaaacgttacatgctgtctatactaaacagtcttgctgaatatttccatttactaaatgacctaatgccagcctcagaaaataatgaaataatacagcaaaagcctatatatgtagtctttgatggaaagctccccggagtttatatatcctttgaagaaataatagcctaaaaaatagatgcaaaaataatgggcggcctatcgtggaaaaaaatatatcgtggaaaaaaatatatagatgttgatgaagctttaagtcaagccatgaaaattttgggaataaactattatatggagccagctgcaaaggaatatatacaaaaatgcaaaagagccaaaaataagaaagctccagaaaccccatactatacgaatataaaagttgaaggatcttctaaaaaaccttcatataaagaatgcttaactaaagggatgtatcccttagatggtgaatacattgactgaaaaataattgaaaaatttgaagaagcctcctcaattgaaaaaagagttaaaagaagaaatacttaaagaattaaaaatgattgacaaatttgaagaaataaaaaagttttatgatgaggaattcgatgtatctttttctgatgttgataccgtagatatgggcggccatgggcagccagaccaataagcaatatagccaaatataagaaattgataataaattatcaaatttttgggcatggtaagcctaataataatatataattttgaatcaatccaaaaatgcttttcggtgaatgacaatgaatgacgtttcactgctaaaaacactgtggagaatataacttttgaaaaaggaagagacacaggtgcaaggtatctccactccagccaaacaaaggacgaagtgaagcaaaaggaagtgccactacatggtgcgagccatcccgtgaaaccacagtgataagcatagagcactgacgagcttccttctccagcccctataaaaggaggagcctggcagctgaaggggaacaacaaagacaccactccagagcaaagctaccagcgcactctcatcctccactatacccctccttgtagtaatctctctagtcttccttgcaaactatattgaagcaaggtgtgtataagtgtaaggtaagaagaaagcttgtatgcaagtttatctgttcagtatgaagtaacttttcttaagtaaccctgtttgttcgttctagtcaagtgtttatgctagggacccgataggagaaacctcttcggttgttctcatttctagcctgcatcttgcataggcgtctggagaatctgtatctgcagagaagtgttcccttcgggtggaactgcctgaggagatgataaactcttagctagatcgttcatgactagggttatctaatttaagttgcttctaaaaagacgataggtgaggcatatggtgagtaccgagtaggtttttaaaacttctgtttcaaagcgctagctgtgttggattcgctaccatgcaaagatcctgaatatttaggttgaatttttcgagtgaacagtgttttcacccctgtgaacagtgtttccagcactaggaatatagtggtaaatagtaattaaagcactaggaatagtgttaccagttgaattgtgtaagcaaatttaccttttttatttaagccagtaaattttaattctataagtgtactaaatttgccttttagttcaagtggcaatagttcttctatatgcatcttaaattcttctatatgctttggatttgcttcaattgggctagtcttaataatatactctgtatttattatattaattttacactcgattgcatttttctcccaatatttcataggaatttctcctataatttggatatcctctaatctttggacgatcttttctatatcctttttagatttaatatccctataccaatttggcgtgaatgcttgtagtcctatgcattctatattgcaatttgatgtataatagttgtctatattttcactgagctcatattcattaattctttcttcagactctttacactgtggaactatattacaacaaaggaactatattgcactccagagcaaacataccagcgcgcgctctcattctatattggaatttgtaatattcttttatctaataaggttattaaaactttagctcctaatttcttacttgtcattcctttgattcctattatatacattccttggtgaatatacttatagcctgaatattttaacccattttcaaacactttagctactatttttaattctactggtttggttaatacacttaattctatttctctagatattctatataacccattcttattctcgaagaatcccatgttataaacttgttgaggtcttattgccctcaaagtatcccgttgatattttcacttctggcgcgaatgcttgtagtcctatgcattctatattggaatttgatatataatagttgtctatattttcactgagctcatattcattaattctttcttcagactccaaattgggtgtttcaagattatcgaggtaagtctaatatgatctttgcaggttggcgaatccaacacagccggcgctttcaaacagaagttttaaaatcctactcggtactcaccatacgcctcacctatctgtctttttagaagcaacttaaattagataaccctagtcatgaacgatctaggtaagagtttatcatctccccaggcccttccacccgaagggaacacttctctatggatacagattctccagacgcctatgcaagatgcaggctagaaatgagaacaagcgaagaggtttctcctatagggtccctagcataaacacttgactagaacggacagacatggttacttaagaaaagttacttcatactgaacagataaacttacatacaagctttcttcttaccttacacttatattacacaccttgcttcaatatactttgcaaggaagactagagagattactacaaggaggggtatagtggaggatgagagtgcgctggtgttgacgtgaaaacacgaggcttgagagatctgcttaactctagtgcaggtccaaaacttacctttgggtgtgtgtgcgtgccagttgatttgatcctgcaatcaacaagaaacaaatacaaagaaaccgcggttaaatccataaacgatagccgatcggctaattgctgatgacatatcatttatcttcgagccgatgttatatatgcatcaatcggcagtcattaataagtaagaaagaactaaatctacttgatcggctgtagatattaacaatatataatccttatatcgatatatactaaaatcaagtgattgggatagatcggtcgccatgccgagacagtataaatcacttagatcgaaatatatactaataataagactatatatgttgatagcatagccgatcagatagatctagcatgtatcggctaatactccgataccactctatattaagatattaaagcaaatagaatataccaaacagaaagcctaatatacttaaatgcaacaagatcttaatataaatgacagatttagcatgtcaataaagcatataagataaaagctaaatcaggaaagatcggctgaaaccccgatgctaccctaatcggcaaccaaaggcaggctagagattgagattctaatcatgactcataagatcaaactcaactaatgcagctataagtatgaaaagaagaacaatatctagataatcaagtcgttggatgtgtcatagagtggtggatatcctatataatctaaatcaacatcggtatttaacctaatcggctgccttctactgacagatgttagcgaattgtaggttagataacgatattgccggagatcatgcaagatatatgataactcgacgaattacataaacaagattagagtgtcatgaagatggaagcactaatcccgagaacgcaagccgccataacaagttttacctcttgttgaagattgaaatcgatgcagtcaactcgaaagcaagaacttgtcgaaacaaaacgaaagtaaaaagggtgccgatgcaccgagattgtattgaacgtgtgttagttttattacatggggctcggggcctatttatacccgagaattacaaaatatgtccatatcggacacgactcttatctctaacaaactctaagataccgtctcgattcttccttcacatccgatccttggattaccaaatttggtcgttaatagctggtagctttgctctggagtggtgtctttgttgtttctcttcagctgccaggctcctccttttataggggctggagaaggaagctcgtcagtgctctatgtttatcactgtggtttcacgggatggctcgcaccatgtagtggcacttccttttgcttcagttcgtcctttgtttggctggagtggagataccttgcacctgtgtctcttcctttttcaaaagttatattctccacagtatttttagcagtgaaacgtcattcactgtcattcaccgaaaagcatttttggattgattcaaaattatattgatttaaaattatatattattattaggcttaccatgcccaaaaatttgataatttattatcaatttcttatatttggctatattgcttattggtctggctgcccatatccacggtatcaacatcagaaaaaatacatcaaattcctcatcataagccttttttatttcttcaaatttgtcattcatttctttctttaattctttaagtatttcttcttttaactcttttttcaattgaggggaggcatcttcaaaattttcaattattttccagtcaatgtattcaccatctaagggatccatccctttagttaagcattctttatatgtaggttttttagaagatccttcaacttttgtattcatataatatggggtttctagagctttcttatttttggctcttttgcatttttgtatatattcctttgcagctggctccatataatagtttattcccaaaattttcctggcttgacttaaagcttcatcaacatctatatttttttttccacaataggccgcccattatttttgcatatattttttgggctattatttcttcaaaggatatataaactccgaggagctttccatcaaagactacatatataggcttttgttgtattatttcattattttttgaggctggcattaggtaatttagtaaatggaaatattcagcaagactgttttgtatagacagcatgtacccttttcttccctcttattattatattggtaccaaaaattgcctaatatgcattcctggacttcgtctaatattatgtgggattttggcttgaatttataggtatttggtggaaatactttgagcttgttatcttctccaaaagtgaagaattcaactccattgtaattcatggatttcttcatgcctgcaacagggtaaacaagagagcaggtcaggtaaatgattgtcttttcccttaatatgttcgaatatatctttgtatccatttccagtaatgatatcttcaaataaaatccatttcctagtagaactctttttcctattaagttgattataatatccacatattgcttcactgtggtgaccccgaaatcctcgctggtccggaggccacagtacaatacctgtgtaacatgtaccagtcccaggatacacaagctagtacacaaagaacatcggtgatccaaagcagtctaataatattacattagtcggatagtccttacataagttgccatcgtggacagaccccagatggacaacgatacgacacaacaaacaataacaacaatgacaacaacagagcggaagcgaacagcggaagacgacttaacgactaagttctaggctaggcacctaagggactaacttattccacaggcatggtttgggaactaggcccgaaactctaaaagtcttcatagttggcgtgctcctgaagatactcttcggcggttggattatatcctccttctttatcttcaaagcctaatataattatatgtagagcaagggtgagtacttttgtacttagcaagccataggaaagatgacatgtgcggctaccaaatgaggcaaagggttttatttgtgaaaactagctgttgctcaaaaggtgtctttttgcaaagctctagtgtgtcaagttttagttattggaaagaggctcacacctcaatccattccacaagttgctttgcaacaacttgtcacaagtaattagtgaatatatgttcttctaccaacaccttagatcttctcttgcttctccaactcttgcacttgtttccacttcacttctccacgagctgtctcatctcagagcacaacgagccatctcagctcagaacaccacgaaccatctcagctcagaacacctctcgaccaaacaatccaactcctagtcacactatgatgccaatcgacatcccagatcacacagacctgttccaaaccactcaggtttgtcgtctgccacacaggctaactctggaaatgattcccatcccacaaaccaatttcacaaacatatacaaacaacactacgctaagagaatcacctcacattcgcccttaaccgtgggcacgactgttcaaacagtttaattaaactctgcagaggtcatacgctttacccacatgacacaaaactgacaccggttgcccgtcggcaccagaagtttgttgcaaggcctttccaaagctagtccataaaaatcccataccacgtagtaggccgagtctcacgacaagcatcaggcagtctcagccctcgtctactcagggtacactagggatgctcctccaccttatcggtaccgtatcgccacaatagaggcggggccactcttggccaaagatctcatcaaatacacgcaacttcgtctcctcatccccagtgtcccactactactggcatacaagatagtcatggactaacaaagtacttttcaaggggtatgccataatacccgtgtggtcgcactataagatgcttggatggaattcccaaaggaatcggtccttaacgacaatacatagctagctacacaggctcagcctacataccatcagggttcgcaaactagttttacttcgcaaacacaccgatagggagcatcgggttttgaatagttgattggaaatccaggtttcccacacgacaatacaatcgtggcaggtccaagcaaaactacctcgatgttcatacccgtagggaaagatgtcggtgcataatatgtggagctataaaggacaggtcgtccaatatcctacagaatataagtgcgactaataggtagatccatcggatgcgttcgcaacacgaggcaaaacagtttaacgtgtaacctaagcatgcacatttgcaaacaacataattttgcacatataggaagcaatatggtcaaaggtggctttccttggtcctgcggaggttcttccttgacgagaacagcttccggttcatccgcgggatcggcaactatacacaaaaagagcaaaatcaacacaagagctaataaagtagctcaaacagtaagatattatactgccattagatagatctcatttttagaaaaattatggaagtggaacgaagtcaattggagtcacggtttaggagatatgaattttcgaagattgaaggaatttctattcaaaggagaaagagtttctttatgggaaaaaggaatatttcgggataaaccccttgcggggcccgctgttagtggcacgggaggagccggcgcaaggtagaccacgtccacggagggcgccacacagagaggtggtggaccgggctcgtggtccaccggtcggtgcgtgtggggcccagccatcataggctcggcgcacatggacctggtgtacacacgggcacaccgcaagggaatggatagggtgggacccgcatgtcattagcacaaggattaagaagggattaaaacaaagattaagcacagtgggcccacatgtcattgagacaaaagaggaggattaaggaggtaattacggtgcaaggattaattaggaatagtggggtacacgggtcccacatgacagtgtctcacatccttcccttttcttctctcttctcctcttctcgttatctcctctcgttcccctctactgctcagggttccccatatcgttttgacagaggttaccgcacccccacggtaggacgattaccgcgataatcgtgcgataatcgtgaaaaatcgaacaaaaatcatatccaaacatttgaattcaaatcctcggcggtttcgcagctttgacgtgattatctcgtggtttatggcgataatcgcgatatttgtctgattatcgcggacagtgaagagggaaagttggaaatgaaattcaaattgaaaaaaacatagaaaatacagttaaatgtatgtctatcttggatataattataagaatatgtaggatacatagaaaatctaacatttgagtgtaaaattcgaaaattcggcatgacctattctatattatggacatcgaagcaattcaacatttaatagcataataaatcaacaacaacaattgaacaacctcacatttcaaagcctaatgaagtccacacaaagtagaaacaatagagtccacgattacaaatatggtagttcatatgacaagcaacacaaacatagaaagttgtagtttggaacgaaggatataaagaaggacatagctaggtgttccactgattgtaagccatgttgtactcttctgttgacatgagcatcaagccatgagagtgtagcaatcccaccttgtattcctgccaagtttgttctgtccatgatgctgttgattgccattgagcgtacaattgagcataccactggggctcttgtcattcatacacccatgtctgagcaggataatcagatgcttggggacggttttacacataggtttgatagccactttcaatgctagaggcactgaaagagctgtagctatcctggggcgtgtcaaactgttgttgttgttggcggcctatcggattaatagtagttctttgtgaggttggagcaccatcatcctggtcttgagtagcgtgagtaaagtcggcctcacctgcaagtgaaatattagcaagaacattaatgagtcatgaattgcaaggtgatagttgtagtagcaagtaaagtatatcgtaccagtgaattgaataaggctgtggtgttctgactgaggtgtgtgacccctagaaggcacatcagtggtgccttggcctccttggcctccttgaccaccgtcatctccatcatctgtatccatctggagctactgtcatcggactcttggtattccgggcttccttcagcgtcggcatcactatcgacactcctcaaccgtgtagttgtagctttgccctttgtttttttggctgcaggtgcttttggccgctgtcgagtcttcctcttcccaatatgattgtcgcctacgttcttttcagcccactcagcaacactagaagccccagtggccctgcagatgtctgtcaagtccactaggtcggctactagtggactaggcacaggggcgtcactctcggtcgagtcttcatcaagttcagggcaagcattagaccaagcattgtccatccagtctttaatttgattgttcatgtcataaaatgaaagatccgctagcctctgaaggggatcgtcatcttccttcctaatttgtgcatttgcttgttgtatgcgaagctgaaggttgtagttgacatacacaagcttgttgagtttcttgtgtgtaagtttattacggagctttgtatgtatgaatgcaaacgtgctccaattacgttcacatccatttgaggagcaacattgtccaaccaaatgtaacgcaagcttcttcaagttcggtgtgtctgaggcgaacatagaccaccattgtgctgcaaatgccaaacaatatgtcatttcactattatgaacacatagagcattgcattatgaaatttttttgctacattagcaaaaaaaataccaagggaagttttcccatccatggccatctttcttgctagtggcttcccaaattcgccactcttacactgatacatctcaacctccagcaaagcggcagctgccgtgtcaatgtccgtcatccactcgaaagcttaacgaaggtcttggaagacggtggaactacaagtgtaagcgtagtgcgtcctcgggttcaataccgcagctacaaaacatagcctaaattagttcaagagttatgggtttaggaattgaacattatgtaaagccgcaactttacttgcattgatgagtgttttagtggtgaggtcgtgcatccttctgtccacaatatccatataagcgttgtacttatccctttcacaagcgaacagactatcatactccattctcaacagttgatatctcaaaagaacctcactcaaattggggttcttgtcctcgtcggcaaaccaaagaaaggagtacatcggttgcactgaattcactaccgcctccaagttttcccaccaactcatgctagataggcaggcatgtgcatatctaccctctgttgtgccattgaacttactttgcatgaatgtagaggaagccatccactgcatgaactgatatcgcttcctttaggaaactctgaaggaacatgcaattggtgccaaaccgcgtagcattccacttaaccaattcaccacctatcgctgagaccatcatagaatgcagcttcgaatgattgtatagccatctgcaaatttttctaccactagcaatcaccatatcatggtctgccatctttccaacctccttaagcatcaagttaattgtgtgagctacgcaaggttgccacataatagctcggtactcttgcataagcagtttgcaggccttcttatagttggacccattattagtgataatttgcatgacatgttgatggcctactttgcataccaccttcctgatctcctgcattaataaatcacagaatacacgtaagtccatcacctatacttcatgataacatgtgaggctaatttgttggatccagtgtgttaccttaagtacaaattgagcatcctggctttggcctgtcgcatcaatggacttatgaaagaacattattccattacagtatatcaaaaagttgatgatggccataccggtcggtctagtccacgaatcacacatcaaagtaacaccataatcatcccagtcgtgcttgaacctctcaaattgtttcttcacgtccttctccgtagaatcaaggtatttaccatctatctccctacttgatggagaaggtatgttttcacctacaattcacataagaaatattagtgtctaaaatgtttatgaaaatataagttgatattagttgcatacgtaccccacttctgtgtctctctcacgacgctgacaaagtaaggattatcgacatttcttgcagcaattccggaggtatgttttcacctacaattcacataagaaatattagtgtctaaaatgtttatgaaaatataagttgatattagttgcatacgtaccccacttctgtgtctctctcacgacgctgacaaagtaaggattatcggcatttcttgcagcaattccggaggtgaagaaaaaccttgcccgtgactcaccaatggcctccctagcctgctttcccttctttgtgaagaaccctgtctcaatgcgtgtctgcacaggggccttggcaactgctagattgtaatctctcaaaaaaggtgactccctctgagatgtagcccttcgtagcaaattggcaattgggttacttttacctctccttgcctcaggctgagcggatccacttccatcgccatgctcatatgtgccacctcgctcctccacatcccttctaaagtcttgctctcgccgtgatgcttccatggcctgttccatttgttcctcctcgtcggcatcacctgtgaggtcatgatagatgacccttgccgcttcaaccctggttgacttttcactcttacgcctagcaccggcagcttttatcctgtccaactcgcgcttgaacaagtcacggacatctggaggcactgaattgcaatatgttgtcccctttccctttccagccaaatgaattttaagtctagttgccctaccaccgctcttttgctgatggcaatatttacaatgaaatccatttcctatgctctccccgtgctcccacacagggtccctattatcagccatctccaccctgaatcatatggaaaaattatatcactaaaagaattaaccaaattacacattaacaacaaatgacccattatcgttaaaagtacatttacatcaataaacatgaaaatgtctactcacccaacaaataacgtactgtacataaccactgtccacatccctaccataattcagaaatcttcatatctcaaataacatcaaacattttacaatgtatatttgacataaaccaacatacaactaaggctactacttgcacaacagtgaaaaattcatacaactaaggctactacttgcacaacagtgaaaaattcatgcacaatgtcgacatcggcactgtggctggggcttccagggcaaggaaggcgcgtccgggaagcggcacacgcggcgcggcacacacggcgctgtgcgagcggctcgacgcggggtggcgcacggcgctgtgcaagcggtgcggaatggctcggtgcatcacttgcctagctcagcattttgtcgagcaggtggtgcgcggtgtggctgctgggtagggaggaagaagaggggagatagatgggccaagctgggccaccttgggccagccgaaagtgagggagggagacagtaacaagggaaacccaaaggaataggaacttctttcctttttctggtaattggaaatttggaatttgatgcaaaggttgtaaatggactgtaaaagggaccgtggactttgataattctaggagtttatttgtggacatggaatgagagatttgagatttttaatggcataggtaaaaattcaaatgagaaccaaattttgaaaatagttttgtatttaaaataggtttttaaaagaaacgaaaaatcaggatgttacattcacaatctgtcctgaccgtaaattctttgaatcccagatataacctaaaagcatttatcgcattgattattgctaagatttctcgatctgtattgtttacaatttttactttataacttccagaagcatacctacatatattttcttctcatttggtagagtatttagtaggtctttgctttagtattgcaccccaaccttattgtgatgcatctgtttcaataataaagtaattctcttctaatggtagttctagaggttttagctcttttaccctttcttttattatatgtactaatttaatgtctttagagttaaagtatttctgaccatttttccttaatttagcatacaagggtcctgctagcgttgccaaattatcaatgtgatttctagcataatttacaattcctaagaattgttgtaatttatttttatcattcataacatcaggaaattgtaaaattttcttagcaatatgttcctgcaaatgaattttgccttctcctatttcatgaccaagaaagttaattttttttctttgcatatttccatttttttctttgataggattaatccattctgctcaacttttctaaaaaataactctaaaatgagcggattgaaacattataactctaaacgacaatgttgacatacagatccacgtcttacaaatattataaaagtcttacacaaatgcagcggaaattaaaaggataacagtagctaagccttgacttggatagcagcgggagacaccattccactggcatccttgacggcatggacgaagcctactcctctgagaagccaccatcggacgcatactcgaactcttgggttgggagatagagcaagactaagtactacccactgtactaagcaagtcataccggaacgaagggtatgatgcaggatacaaccaaagagagctaaaggagtttatttgcataaagctagcatttatgaacagtagttgaaagcggtaaaatagttaaataattatccatcatttaacccaatcactgcttaacgctacaccatgttaagacaggcccaaaaccaccacctgaactaatcagttccattaagctaagctaggggtgagactaatcacagtgaatctggttgaccgcccataaccgcgggcacggctattcgaatagttttactttgatcagaggtgtacaactgtacccacaagacacagccccacgacacgttcccgtgcgccggcatgccactacaatatactggaaagaggccgtgataggacccttcgcatagccccctctaaccaagcacaccacacctcaggtttcacccccactcctcaaaaggtagcgggcagtcccctctcgtgcctaggtgaatccggaagcgacaaaggccgttgcagggcccatcctgctccatcacacccacccttgcctagatgcgtcggctagagaaaagctacattacaagcccagctattgcccacgctggcttatggtaagtacgataagttcttccagggcatcccacgaaccggtccttaattgccatgggcacgaccatcaaaaccatacacccacagcccaccaattaatgtgttctaattaactaacactattgcggtggcactaatccaaagttatactataatccaaagtttatgcgttaatgtgatttccccttcgtgtactagttgaactaagcatggctaagcaattcctaatccgacatctagttatgttacaacccaagctaacaatggattaagatgaacaaatagtatatctgaggcagtaggtaaacatcccataataacattataaaaacaatgcataatttaaaggaaacaatagagcatttgcaatatgggatcaatatgttcaagtgacaagcatgacttgccttgctctgtggctggagggacctcggcaactatctcaaagtacaccggagcgtcgggagagccggaatctatgcgacatacaaggcaaacaatgcaaacaagctataagactactgaacagagaacaaaaccttttgtaatggattgtttgcatttttcttgatttactgagacttgaatgggcttaaacggagcatggacgaattagttatgatttttagaagattatatgtgtttattactataacagaaaatccttaattgatttattgcgtaaataatacccctggcgacatcatcagagagagtggcagcgccgacatgtgggccccacatgtcataggctcggggtgcgccggtccacgggatcggtgaggggtgcaccacgtggcggcgacgtgggctgccacgcgggcagcagcgaacggccccgatctactcgagggtagatcggatggcgagggcggctcgcggcctggcacgcatgggcggcttaagccggcccagcggccatggcgctcggcggcgcggtgcggcgcggcagcggcgcaaggcggcgatcggcggcgagcggccagcagcggagagcggcggcgctactagagggagagggagagggataggggatgtcggtcgtcatcgaagggttcagccggcacggaggaaggcgacggcgaacgacgacgacgggcgatggaatgacgatggcgacgagcagccgagcttcggggaaacctagggaatgcaatgggggaaattagagagggagagggagagcagagagggtggaggcgccggccgaaggcggtggccatggtggtgctcaccagcgcgaggaggaaggcgtgctccggcggcggaatcggccgggcggacggcggacgggatggcgcttgggacggcgaacgcgacgggcgtcgacggcgcggatcggcacggcggctagcggcggctggagcggtggcggcgacggcggagaggagggtgacggcgctagggcagtggagtgcacgggagggctcgacgagaacgggaaaaaggtggaggaggatgcaggggt

SEQ ID NO: 10304 - DNA, 2323 bp, Oryza sativa
gtgtttttgaaaagcctacttaggtcagccacatcactccgacggatcacattggctttccatggtatgattatgagtcctgacaatggggagccattccagaacttcctggttgaactatccagcctgatgaaattcaaggaaatttaccgcgctgagagatccgcattcagaccaaactgggagtaagcgtgatcattcagaaacagcgtgctacagatcaacaccaaaattcctaaattgcatgtccttgccaaaattgtaatagacaatgtgtaatgcttgtattatatttttctgccttctaatatattcgacaatactcttgccgctttcatataaaaaaaccaccaaaattccgaataactgaaggcatggtctatcgtgttgcatgcataccagaattattcctgaaccgctgagagcatgccgtactgtgttgcagatcgatagcagtattgcgagcgcaaaataaaggccgtaaaacttgtttaattcgtgttttacttagagagatatttttttagataataaaatagaatatcctgacctttactcaacaagttacagccaattattacagagtagtacacaaaatgaaaagtttctcacacaaaaaagaagacacctaccaacccaagataaggagtacacaattattgaattctgtttgtgaatctccatccaaaattggtaaacagttgcataaccgttgcctcaagattacgacatgcaacttttaaacgctcgccctcttcatcacacttttgtagcagtacccaagacctgagccagtgcgttgccctgaaaattacatgcatatatgaaacagatggtgatttgtcaaaaatcatatcattcctactcaaccatagagcccaatatataacagaagctcctatgagaataagtttcctatttttcttgtctacccccagaagccaatcataaaaaatatgagatatgcaattaggagggtaaagaccaaaagagaactatacagctctccaaataaactttgcaaaatgacattccataaaaagatgttgaatagtttcattcttcatacagaaacaacatctcaaacttccattccagttcctccttgccaaattatctttagttaatactacccctttaagcaagtaccacacaaagatcttaatcttcagaggcatcttagacttccaaataatcttatttctctcaatataaccattgtttattaaagccagatacattgaccggacagaaaattggccattctgatgatagttccatctaaaacaatcactctgttgattcaactcaatatgtacaatagaagcccacaattcataccactttgctagattctgaccaactaaagccctcataaaagaaacatttagcggaacaggtctcgtaacattagcaactgaagaacttttccttcgaacaatagcatagagagatggatacctacctttaaacactaagttatctagccatttatcttcccagaatctaacttgttccctattattcagaatccaggaacccatgtttaagaaagtattcttaactttcataagacctaacaaaaaatgagaatcaccttgtttcctatcaacttgggtaatagactgattataaagatactttgtttttaataagtcttgccaaaccccttactcatttattaatttaaacaaccatttactcaaaaggcatttattttgtatttctaaattatggacacccaaaccaccctgatctttgggttggcaaataatatcccatcttgtaagtctgtactttttcttatgatcatccccttgccaaaagaatgttgatatataataatcaattttttgaagaaccccttttagaatctaaaaaaagatatcataaacatagctaaactagaaagaacagaattaatcaaaaccagtctacccccaatagacatatgttttcccttccaactactaagtttcttctcaattctttgttcaataactttccaatctttgttactaagctttctaaaatgcattggaataccaagatatctaactggaaaagtacctaacttacaaccaaagatagtagaatattgttcataaaagtcctttgcctggccaaaacaaaataattcacttttattaaaatttattttcaagccagacaacttttcaaacacagataaaatcaatttcagattcttggcttgttataaatgtggaattaccccattaatggtaccaacatccacacttttgtagcagtgaccaagacctaagtcagtgcgttgccctgaaaattacatgcatatatgaaa

SEQ ID NO: 10305 - DNA, 1459 bp, Oryza sativa
actcttgcgaagaaagtgcttgaatctcttgacaataaaagccatttcttcatcttgactttcttcaccacttgactcttcttcttgttttgccttcaaagcaacttcttgattcttgatcatggcggcattcttcaccatttgtctcacttcacgagcttcctcttcttgcatctcatgagacacaattcttccaacaatgtcacttggggtgagcctcttgaagtctttcctttcccgtatcattgatacaagagtgggatttcttggaccaaaagtacggagaagtcttttgacaacaaagtgatttgtcatgtcctcactcccaagtcctttaatcttgttgacaaggatcatcatcctatcatacatctcttgtggtgtctccttgtcatccatcacaaatcttcctagccttccttccaatagttcaatcttggcatcacaaatggcgggtgatccctcatgagccaattgcaaagtatcccatatctccttggcctcctctagtccatcaaccttgttgaactcctccggactcaaggcggagagaattgcattggaagcttgagcattgcggtggatgagttgttcttgctccgaagtgagctccatgtcctcatgaggtacgtcaatacctgtacacacaattttccaaatacttggatgcaaagagattagatgcaacttcatcttgtgcttccaagcggcgtaatatgtcccatcaaattgaggagcacgcccggaaggcacggagacgaagttgtgagagggaatggtaagtttgttgtaatcaaaaggtatagtggctccccttgggtgatggagttcccttgttgctcgctccatcttcatttccaatttccccgtcctttccccctaagtccgacatcgtggatcactcaaagcggtgaagcttgaatcaagagcaccttgatctgataccaattgaacgcacagagatgtagcctagagggggggtgaataggctttcctgaaattttctcaacaatcgcagcggttaaattaacagggcccggaacctcctggtgaagaacaccggaacttcctggcagagatgagcagcccggaacttccggagttcttgagctaggaaattccgggcaacagagaaaatcaaaatttggggaagcaaaacaagtcctagctagagacaatcaggcacaaggttgcacaagatgtaaatcacaagataccagcagattcaaacacaaatcatgcacaagagagacaggcgattttttcccgaagttcggatcacacggatcctactctccgttgaggtgctcaaagagccgggtctcgattaaccccttgcctcacttatgcaaagatcccagaagaagtccacagccttcaactcaacacttctaggtcattttctagaattgagtgaccaccaagatccaactcacaattccttctagaaaagaccaca

SEQ ID NO: 10306 - DNA, 7637 bp, Oryza sativa
atatgcccctttagacacaaccttattgatttgaaacggtccttcccaatttggtgaccacttgccgaacttgttatcccgagttccaatcggcaaaatcaacttccatacaagttcaccttccgaaaaaatcttaggcactactttcttgttataatgcctagcaactcgttccttatctttggtaaccttagcaagggctcgtaaacacgattgaacaaaatcctccctctcatcggccataaggttataatactcatcggctgtcaaaccgtcttgcaattctatccttctagagccgattctaccttcccatggcaaaacagcttcatatccataaacaagcttataaggaggaacttgaattgatccatgacaagccatccgataagaccacaatgcttcggccaaccgggtatgccattgccgaggataatcagaaatcttccacttaattaatttgatcaagctcttgttagatgcctcggcctgcccattagcttgtgcataatatggtgaagaattcaacaatttgatacacacactctcggcaaactaaacaaacttatcggacatgaagatcgaaccttgatcagttgtaatagtttgaggaataccaaatcggtagattatatgttcttgaacaaattaaattgcatccccagaatcaactttcttcaaaggaatggcctccacccagttggtgaaataatcagtcgccaccaatataaacttatgccctttacttgatggtgggtttatcataccgatcatatcaattcccaaacctttgaatggccacggtttaataataggattcatagccgacgccggcgctcgttgaattgccccaaacttctggcaatcttgacaccccttataatatctgaagcaatcctccagcattgtcggccaaaaataccctgcacaccgaagtaaccacttcatcttatgggccgattggtgagtgccacaaattccttcatgaacttcgccgattgcaactttagcctgatcggcactcaaacacttaagtaacactccattaatcgttcgataataaagctcatcatccaatagagtgtacttcaacgccttatatcttaatttcctagaagccgattgagatggattatgtaaatattgatgcacatcatacctccaatcatcggctgttattgctgcaatttaaaccttaacatctttgatcatcagtttataccccgatgccccttgggccaaatcattagcttcaatattttgttctcgagatacatgctttaaagtaaccagccgaaattccttcatcagttcttggcacttctcattataaaccattaatatatcattcttgcactcatactcccctgccaattgactgattaccagcaaagaatcccccatgatttcaatagcatcggcttcaacttccttgagcaactgcaaccctttaagcactgcttcatactcagcttgattattagtcgcataaggtttaatagcataagcaaactcgaaacatgcccccataggggaaattataactaggctgataccacaaccatgagtacacaccgatccatcaaagaataaagtccatggcaccatttcaaccgagccgattgaatcatcacgatgttccacaataaaatcggctatagcttgtcccttaatcgccttcagtgactcataccgaagatcaaactcagttaaggaaaatatccactttccaaccattcctttcaatattggagccgataacatgtatctaacaacgtcggccttgcatataatagttcattcattggacagtaaataatgccttaacctcgtgcatgaaaaatataaacataagcataacttccccataggagaatatctagtctctgcatccaagagccaacgactgagataaaatacaactcgttctttttcattcaactcctgaatcaagactgagccgattgacttctcaccggctaacagatacaatctaaaaggtatccctttctgtggaggaatcaaaacaggaggggaactcaggtatcctttaatattatccaaagccttttgctgctctgctccccaagaaaactgctaatcagccttcaatctcaacaatgatgtaaaagggtctaattttccagacaaattagaaataaaccttcgaaaaaaattaatcttgccgatcatctcctgcaattcggtcttgttttccgggggcttaatcttttttatcgcattgatacttctctaagttatctcaattcccctctcatggacaagaaatcctaagaactggccagccgatacaccaaaagtacattttgtcggattcatcttcaagccatatttccaagtcctctcgaaaacttttattaaatcggctatgtggtcttttatttccttagatttaacaaccacatcatcaatatagacctcaaccagccagccgattagatcatgataaatataattcatggcccattgatatgtagctccagcactcttcaagccgaaagtcataacaacccattcaaataagccgattgcaccaggtcatctaaaagctgtcttatggatatctacttcagcaattaaaatttgattataccctgcgtttccatccataaaactcaaaattttgttccctgacgcagcatcaaccagctgatcggctactggcattggatattcatcttttggtgtagatttattcagatctctaaaatcaatgcataccctcaccttgccgttcttcttgatgacaggaactatgctagaaacccactcagcatatcggcaaggacgaataaaaccagcatcatataaactcttaatctcagccttgacaggttcaagcatatcggctttgcatctcctcggaggctgctggtgtggcctaacccctagtttgataggtagccaatgttctacaattgatcggctgagtccaggcatctcataatactcccaagcgaagcaatctctaaactcttttaagagctctatcagcttggttctaaattctggagacaaattcatactaataaatgtcggccttggccgatcgcttggacctatatctatttcttccaaatcatcagccgacataaaaccttgaccttgcttgccaagaattggacacttttagaaaatctccatcccaaacttttccagataaacaatcaaggccatccatctcccaaagagctaaatcggcactggcaacattaactgacctgtcggctggcacgatctctattttgtcgccttgccactgaatcaagcattgatgcatagttgaaggaatacaacaattggcgtgaatccaatcccttccaagcaacaagctgtaagaacacttcccatcgatgacaaaaaacgtggtaggaatagtcttactgccgaccatcagctccacatttagaacacctttgtttttcgatggattgccaccaaagtccttgagcaccatatttgtcttgatgagatcctcggcatttctacccaacttcctgaatgtagcataaggcatcaaatttaacatggccccaccatcaaccataattttagacatcggcttcccattgacatagtcatttatatacaatggtttaaaatgccgattctctgtcccctcaggcttcttgaacaccgcctgttctggtgatagaaccaacttagtcgattcctcttccacctcatcgacatcgccttaatcgatcccgaattcggctggcaaggtaaaaaccatgttaactggtgccgtcacaacactctttccttttgccaacctctttgcctcatcggctgcaacatcatcggctacaggagcctgattcttaacacgccactcctgcctcggttttgctttcttcagccgatgattaatttctttctcgacctcctggaagcgttctctactcctcaatctttgaacccttcttttctgattcttcataaaaataccagaaggacaccattgagtcttcctattttcgttgtcttccaaatcaccacgttggttcactgggcccaatctttgatgaacaggtactcttgtctgttttggccgattgcctccatcgtacaatcggcttgaaccccctgcaacatcactgcatccaggacaatcctcgatagatggtagcctcataccttcattccaatagaacctgaagaactcacagccccaatgaggatcaaagccaccattatcttcttcatgatgcctttcctgttgcttgccgtatttcctttgatatttgtttataattctagccaaacttacttgataacccctcatgcaccccgtatcagctattcggtcagctatgtgtaccatgttaacaggaaatgggttaccatcgaccctcatcggctttttgtaatcatcaaacttaatcttgcctccctcaatggccacctgaatctgttgtctaaaaaccttgcaatcgttagtagaatgggatccgaaattatgccatttgcaatatctctttttgcctaattcctcagccgatggaatcgtatgaccagcagggagttgaatttgcttccctcggagtagcagatcaaaaatcttgtcagctttagtaatatcaaaaacatacctctcttcctttccagaactctttacccattggcacggtatgacctttttactcctcacccattcggctgcagctatttcagaatcatcctcatcgtcatccgacccatacatgtaaggacaaacatgattaaccttcttagagcttttcctagcctccgcagacctatgctcgtgcaaggtcaccttttgtatcagatgtgacaagctatcatagtcttcggacgagaatttctccctaatcggagcaatcatgccctgaaaggctagatcggctaactgagcgtcagttaaactcaagctaaagcatttgttcctcatctccctgaatctctgaatatattcgtgcacaggttcatcatgccgctgcttaatcacagtcaagtcagataacttcatcttatgaaccccactgtagaaatagctgtgaaattgcttcttcaaatcggcccaactattgatcgacccatacggtagagaagaaaaccaagtaaaagccgatccagacaaatataaccagaacaacctatccctcagagcgtccacagccgatgcttcactacactgagctaaaaattggctaatgtgctcataagttgacacaccatcctgtcataagtccggaactttgaaccgattggagagaggaactctctcaaaccactcagggtaaggctgccgatacaagcctccagtctcttttggtttaagcccaaactgttccctcattacatcagcaatcacatcggcccacggtagttgctgagctgctccctgtgactgttgttgcatgggctcgaactgaccgtactgagacacaaactaaggttgagccagtccccctggctgatattgggcttccggggaaggaggctgatattgataattcaagttgccccctggtaattatgaaggttcggctgaatattacgtgccaaatgctcgggaacaacttgaggcattactgtgccatccggctgtacgtggtgaaccaagtgttctgggacgacttgatttaaaaattgttgtacaggctgtcctccaggcgtcacaaacctgaccgatgtgctcattgagccttggtgctaaatcggctgaacgatttgctgtcttaacggcgcctactgaattggccgcggaggctgttgccttggtggcgtttgctgaactagttgcacaacttgttgctggattggttgtacaacctgctgaatcaggagtgtctgttgaatcggctgctgctgtattggatcaacagcatattgaggcggcagaaacgtggcagcaacctgatcctgcatcagccgattcgcaacctgcccactatgctgtggctgctctctcattaacaaccctcaccagctggcctggtgccaatgctgacggagcaggtaagggagtcgatgccagcgccgtcggctgagctgatggtgcgatggggggaactgcctgaatagatggctgggcatcagtgatcaaaggccgataatttggaaagacacctccttgcaaataaactgggcctgcagcctgatgctcagctattaatccatcggctattgacttcatcatgtttgataaggtattgactaataccccagactgattgatcaaagcatggtgcacaacatagtcgacccggtcttagaaattattgaaaaaatcgtgtgccgcatcactattctgattaagatttcccccttgcaacccctaagcaccatcaccttgaactccatgcactccatcgccttgaactccatggatcccttgagagttgtcaccttgacttcctagagaaccgttggtagcacctttgtcactcagttgagccgagccatctagagcttgtttcctgtcttcacctttggaagaactggtcccatgatctacatttactttatacttctgaaccaatgttcccttgcggatctgcatgaatgagttcaagaactgatcccaggcttgctgcaacattgcttcaaaatccttcttctgctcaggtgtgaatttctctggatcgatgggcacgacgtttccttcattgacgtcagtcaaccccaacttctggatcttttctttaacagtgcttgggctagccgaggatggtgacagcggtggcttctcggccatgaggaagaattgcttgctgacttctaatcggtcccactaggcctgccaaaagcgtgttgatagaaaacacgaggcctgggaaatctgcttaactccaatgcaggtccaaagctcgccttcgaatgtatgagcgtgcagttgatttcatcctgtaatcaacaagaaatagagacaaagaattcgtggttaaatctataaatgatagccgatcggctaggtgccgatgacatatcatttatctttgagccgatgtcatatatgaatcgatcggtggttataaatagacagtaaggaactaaatctattcgatcggctgtagatattaacgatatatagttcttatattaatatatacttaaatcaagtaattgggatagatcggccaccatgccgagacagtataaatcacttagaccgaaatatatattaataacaggattatatatgtttatagcatagccgatcagatagatctagcatgtatcggctaattctccgatactactctatataaagatatcaagacaagtataatataccaaacaaaagcttaatatacttaaatgcagtaagatcttgacataaagggcggatttaacatgtcactgaggcacatagatcgaatatggttaaatcagataagatcggctgaaactctgatactaccctaatcggcaaccagaggacaggctagagattgatattctaagcacaacttaatagatcaaactcaactgatgcatcattaagtatgaaaagaagaacaatatctagacaatcaagccgctggatgtttcataaagtggtaaatatcttatataatctaggacaacgtcgctatttaacctaatcggctgccttctattaatagatgttagccgattgtaggtta

SEQ ID NO: 10307 - DNA, 6278 bp, Oryza sativa
aactataacgcaaatatgtaacattgttcacaaaatttacatatctgcgttatagtttatgaaaccagatgagagatatgtgagttttgtgaacaatgctactatcactttgtcggatgaagaaatgaccaaaataaaagttatagatcttgatgagttatacaactttgttgttgatgactttttcagttgaaatcatttagtatttgaaaatgttgtttgaagttgccatatgtttaaattcaaattcaaactgttcaaaaaatgttatatagaaaaatgaccaaaataaaagttatagatcttaatgagttatacaactttgttgttgatgactttttcagttgaaatcatttagtattctaaaatgttgtttgaagttatcatattttcgaattcaaatttaaactgttcagaaaatgttatatagaaaaataaccaaaataaaagttatagatcttgatgagttatacaactttgttattgacaattttgccatttgaaatcatttactacccgaaaaattatttgaatttcttatattttaaaattcaaattttatatagttcaatcaaacccagatggagaaatgaccaaaataaaattagtagatctcaatgagggatgctggggtgtggcatcttggcccaggacttaataggattaatagaatactcataccaacaagttaccacttcttatttctaaagaactctgaggttaagcgtgcttggcctggagcaatttagggatgagtgacttgcacaagcctggagcaagcacatgagtgaggacaaagtgtacaacaaaaaagacttgcctggcctaggagaggcgggacgttacatgggatttcttttttttttttgtggattatactcatccgtgacgtgctaatgagagtcatccgtgacgggcttttttgttggcccgattgaaatgtgtgtcatccgtgacggtcgaatgccccattgagatatttcaccacatcagtgacctttgcttgacggggcccctacccgatagagatggggcttgccgcccattacaaatgactgaacccgtgctagtggtcataaccatatcataaatatcaattacttagatgagcatggttccctatgatagatggttgttcacaagtgacaagtggtagcaaagaataaaaggtatacacgattaatcataggaagattctatttgttgagagttaatgttttcaattttcattttgagtcaaactaaattatatttaaactttcgatgcaggtttgacttacaaacaggggaggataagggaggagacgcgcaaacctgaccacacggcgaaagggtgacagagccaggctaggcaagggtcgggtgaacacttggtttggccaacccagccaggaattggttctggctgctgaattttgtgcacagccgtgggccagcgttcatcataccatcatgtcaagttgatcttgttgcgcgtcgggagttccgaaaagactcccccacatttgtcttgtaccttttctttattcaacaaaaacataaaaaacaaaatgggcttccatcgggatgaaacaccggccaaccaaactttattcaataatcctaggcgcatgaagttcctaaatttattttttttatctttatcttgataatttttttcatggcaacaatgagcatggtgggtatcttagcagggtggagatatgatgcacaaggtggttgagattcttaccggatagttcttaccaagcttagaactaaatcgaatgcaacaaagttttgcatttgttctgcttggttccatgtgcatctttgttttctcggagaccaaggagcgtggtatgagtgttgtagttattttacactgctccttagttgtctttttatttactgcaaaaggttagtggacaacaaatacccgagggattacaaagaattggaaagattttatcataccctcaagatcagttgttcacatccatgctaaaaaggaattgaattcaaaacttcagaagtgtggatctcacaaatttgccataattttattttgtcatcatttttttcgagagacactttattttattcttgaaaacaaatatatatatttttcatttttttattgttcaccaaattttcatttaagcaaaactcttgcagggctgaggtaaatttgcctgaacaaggtaaaggagcattcaacaatatacgcactgtgcaccttgagaggtgatctatttctcttttgcatgttagcaattgctttattcctggccctgtcctacctctagtgtgactcgtgcatgagaactcacctcggttgacggaactcgtcatgaaaagcttgtagacctccccccacacacacacttggacttttgtgtcataagacgtcaaaaaccaagtgtgagatgttggggtctcttgtgttgcatcgccaaggatcaccaacgtgctcggttgatgtagctcttgcattcttaggcatcgtatgaccctcgttcttaatctcaacctgtgattgttagtgaccaagaatacccgaatgtgcatactattctaaaactggtccttgccttcattggaaaaaaaaacttgccatgataatccggggtaactcctggcagtgctttgtttatggtcacaagctcagccatagagacatcttgctgcaaagttagtgccacaaacacatacgagatttgcaatagttatgataaatataagcatccacaaccacacttctaatcatgttagaaatgatggccaaaaggcggttgtggtcctcgcacaagaaagcgatactaaactaataggaccctggggattccttatgtgagcatgaatcttggggaattttgaaagagaagctttcatgctcaaagtgccgttctcatcctccagagttgatgtctcaagcttatccataacccaaaggttctccttctcaagagatgcatcgtgcaagaacgaggttgtttcttgacaactgtcaagaacaacatattgagggccagagagataaggttttggctcgattggaggtcatgatggtggttttatggaatgtaattcaaagatctcaaccgactcttctttttcttggataaaatccagagcgtcttgtttagaagatgatttgagcagctaaaatggaagaacaaccattatgtcctccacgatatcttcttcaggaagggtatcagtcaaggcttttcttgactgcgagaatggaacaaagaaattgaccctcctaaagagaatttgaggctacctaatcgaggagtattgatgagaagtttctcgattggatgtcttattagaacatcaaaatcttggatttcaaaaacatgaataatccaagattgcctccttgccatcatgaatgacaggcacgtcttgtacaatacctaattcttcaataagactcccgttagggtgctcgaagaatttgtttgtcggtgtaattgccttgtcactcagaatagtgaatacaaaggattttgagacaatattggcacagactgatggactgtaaaggataccaacattattcccttctaagtgatagggaatggttcgaggagcgatatttattagaattacttcggaagaaagctctgcctcctttagccattcgtcactcatgattgatgtcagctcccgaactgtttcctttagatatccatattctattggatcgagagttggctagagaataggtggccgtaatattcgagaagatcgtccctgaatttgggagcacatcccggatcatgaatttcttcaatatctggagatagttcccgggaggattcctcattagatctgatgatgttgacggttcaggttcctccgtacctgacacagatgcctctggagggggttcaaatcactgcccgaaggtatttttggatattctatcgagaatttcctttccttcgacgggggttttgtgcatgaatgacctccagcagttatgttgaggtaaagtgcagactccttatccaaacccgtatggaaatgttgcagtaatgcaaaatcgggtatggcaaggttgggactagactgtaccagagtaacaaatctggcccaagctgcacctattgatttcttattattctaccgaaagctgaggacttcgatccggaggaaagtaatacgactaacaggaaagaatgtgaggcacaaaatctgtctcgcaattcattccagctaccactcacactcccaacggtgtaaatgtaccattgttttgctctctcttgaagagagaacggaaacaatttccatttaatagtctcccgtggcatgccttggatcaagaggcacgaacacagatgctcaaactctcgcaggtgatgataggagatttcctggtctagactagagaaagatttctccctaaccgtaatgatgaattcgggacgaatttcatagccaggtgttaaataggctccgatgaaggaggtggctcgtaaaatttgccccgtggagcagatagttgaaagatatattgtggctccatgggcgagaagagttttacaagaacatttctctgggtagcaggggtgaaggtagaagaaagaaaagtaaaaaggatatgaggatgaacaaggtgcagagataaacaacaaccgttctccggcaacggctctagaaatgcttgttggtatttcttaacgtcgcagatagaatttgcaagcgcacggaagataccgatgtagcacttgacccgagagtattccaaggtatcgatttctgcagggaacgtgtgtgttaactctttaccaggttcatctaaggacacgaagcaaagataggcaaagggtagagaggatttactagtgggagacaatgtctatggaaagcttaatttaatcctaacgcgatacttcgggtactggccagctcgctactcccagatatcgctctactacgtacccggacaggaaggactttagtgatcttgagggctgtcaccacctctacacccactgcacacctactgtgggatacagagcaaacactggaaatcaactacctagacaccatgtctaagcaattaatagctattctagtgtttagaactcactaaagcaatcactattttactgtattatagtgaacgatgatctagcacgctgattaggaaataactaagaggtaattctcaccaagcaaaactaaattactcaaaagatatttctattataatcagagtaattaacagagcagaaagaaataagaagaggattattgataactccggaactcctccgacttcttctactctctctccctaatctaatatataataaagtacaatagagcctcttataatttagctcaagctttggtgtgtgtgaatgagggagaggagagggccgtatttataggtggagagatgccttgggaatgtggagatgctaagcatcctaagagcattttctctcttgtgttgacaagtgtcctctctatgacggtttccaccggtagaaacggtcacaaccgccaatggatgaggattgcaactgccaggtgaaaaatgggcctggatggactagctggtggtttggccgaaccctggccggctctgctagcccagcccttcctcctagagactgatatgtgggccccattgtatattcttctgaagattggctcaaatgattgcatcttattgggtttatgggctcaagactccattagcttggatatgaaagttatattctcatccttcatgtatattttctctcaactttagtaacttgtcacctgcatacaaatatataccaacactcgtggaaattgttagaaataaaccctaccactatgttggatgttttacatttatggttttatgcaggtattgacggcattaatttggtacttaacagccgtcaacaaatccccacacttagctctttactcgtcccaagaaaaggttaaggattaatgtggaataaaatttccgaaaatatgtacaatataagtacacaaattattttaagccatacctgtacctatgaatttttgcactgtctaacttaccatcttgggcaattgatgaatggaacggatgtgactcaagtccttcttgttcctctcgtcaatctcttgggttttcatatattttcacaaagcagatatactcctcaaagggctttctctcaaatcactcatgtggtttgatttgtggatcctcaccaaggcatattatgccgaattgtccctattctaaaaggctgtatatgtggagctctgtagggatcaatcgg

SEQ ID NO: 10308 - DNA, 8487 bp, Oryza sativa
aagaggacctttgctccaccaaacaccataatttgtcccatccctaatattctgcataagttcattggtattaggtaaggtctcctcttgatcataaagcgggcaactgatcaacactccagcatctatctagtgaggccaaccaaacagagaaatgacaacaacgcacgtagaatttttctttcacactgaagaaacaaatatttttgttttatggaaataagaaagatggaagatcttttttttttcatttcactgtgtattctccattatccagactccagagaaacaattttttactctatttttgtttcgtggaaatggggaagatccattaggcaggaaaacatggaaaaactcgaatgcctagttgcatgcagccaagcaaaccccctacaaagaagcaaaggcagaatgcctcaaaattgcatagagccgttgtagacttgtgatataatctatagattcatatggtagcacttgggacatttaaaccagcagaacgtaaagagtggttttgtatgcatggtagacacgcgtctaaccagcggacgcccaaggtgttctactgcagtgcatgcagtagaaagtgcatagactctgctttagcccttgtttagttcctaactttttctttaaactttcaacttttccatcacatcaaaacttcactacacaaataaactttcaacttttttcttcaaactttcaattttagtcaaacttctaattttagcgtggaactaaacacatccttattccgtgctctccttcggttatcaacaagacgtctttcaggcggttgctgggctgggagctatctctgctgtgcagtgctctccatctcttctttgttcagcacggttgctggacgcccagtcgcccagcgtaccgtgcgaatgcctctggagttgggatcaccctctagatccgccaatgctatccagagctaagcagcgtccataggcgagccgagacatggatacaaatggaagcagtggggaggagaactcgatagccctcatctttaattttcacccgtgggtgttgtgttagccataataatgggttattgtacttgtgtgcattatcccattgttgcacaaataccagttacatccatcagtttttctttttccggccaagatgagacaccagcacacaacataacactatccacgccattcatgtctagttttgcaactctcaagttgaacagcccccacaacgttaagaatcagctccacaaggcctcaactgcatctatttcccttaaaaattacattataaattagctatcataaatctactatgtgaaattagctatcataaatctactatgtgtgtgcttccatacttctagtagtagagagcatggctcacctcaatccccatgttcaaccttcaatttaagggggaaaaacatctatattccagcacatgacaatgcaatacgctcttcatgggtgccatttgatgctgcacccgacactataggaacaagaagcaaatgcaagtaaatgataaagtgaagtgacatacatggtgattaaagcaacacagattctctaggaactaaaggaaacctgggttttggcacaaaaggtagctcttgtccactaagtgcacaatcaatcgcacgacttaaatccctacaaataagataccaaataagcacaggggagggtgaactggaaattttgttcaagatgttagaaaacataccttccggtaactggcacgttgttactcggtcttgaatcgtcaaactgcccatggtagaaaagctcaaatggccttcgtccatcctggcaccgggaaaccaaaatgattagatagaataatagtagattacgctcgtagtgtgcaaatttgtgaggttagtgtaattcagtacaacttgcaagatgagaaccgacataacttgggcagcatatggaccagcacaatagtccacattagctaattagagtgtttcagtcctgaataggaaacccaagtcacaaggctgcagggggtaggctaggctgctagatttcttttccagaaaaatgcttcctgattttattttcccattgaagtccctgagttgctgcatgatgtatttcaatggtgatctgctcactgtcaggagctacaaatgcagtaaacaatttgtatcataaaaacagaacaacaatcaaatgatacctcgttgtacccttgctcagttggtgtcccagtcagtgctgagacactctaattagctaacatggattgtctagccgtggttagcatgcaacttgcaagttattgcagcagttcaagtattttgcatggcgttgcattaaatttctttcaggaacaacgtgttagcatcctagacattggacatagcagcatcatgaattcatgattctaggcataagcatagatgatgttacctttttgaacaagtaaaactctggcgtgcagacggctcgaaaagctttagcaacttcttgagactgcaggttgcagtaggacaaatgagttaaatagagaaagcatggccgctgtgtctggacaaatagccatacaattgaagggaataatgtggtcaaacctcatcatatagatacgggaaagagtatttatacaattttgcttcctcagctatgtaatcaggaccatcctacaaaatcagatgaacttgtgttaaaatggaaaaatctgacaagtatcacatagatcacatggaacagaagaacataaaacaactagtttccatatccatggatcactgataggaaggaattgttgcctaatcctatactacagtaactcaagaagtatttttctcatacaccaagagaaactcatgacatcttatcggatagcctataagcttgtcagcttacatataatataaccagcagctaaatggctatctaattatctatagccattgtattttataccctgcaggacaaatcctaaaattcgatgcttctccagcatacatatctgtgttaaggtacaacttaaaacgaaaattccaccaaacaggcagagatgggaaatgttttctttgccagacttggttgggcgtgtggctaaaagcaatagttactcagacgacggttgatttcctaaaaaaattagatagggtaacaatttgaattaaatctgctatttaaaagttttaaacaatttttagtagcttctatattactatagagtatgtggtttaaatttcatgatcatctgtatctttataatttttttgtattttatttcgtttcaatataatttcaggacttccacaactgctactacattcaaataaaatattttataacaaaatccattaagctctcaacaagagaacttctggttacttaagattcataagcatgcagaagaccaaaataaaaggtatacagttcattggttgtaactcaacctgtgggtgtgtcacaattgagttcgaggatatggcaacagcagcaagccctttctgcattgtatcgagatgtcaatacaaacacacaagttaaagggaaaagctcactacccattctagagtccatacctccatgtagaatgaggtgagcttcgcaatatcttttttgagatgctttacgaatggacagtgattacatacaaacataacctgaaaggaggaaaataatcatataagatgtagataatctatgcagtggctgatcgattgctcaattgcctacatcccctcctttctcttcttaaatacagactacgagtttcccaacaaaacaaaatcaatatgtcaagagctgatagctacttcttgaagagataaagatacatgctgacataaatatcattcagcacttattaagacttgcaatttggcaaagaaattcagagggaactcaaggactaatttgacaaaatggagataataaactggtaatgttcttccatcaaagtcataagccacatcttgaatttttgatctgtttcattcataaagaggctgtaatacctacaagacctaacagtttttccacataaatgactagatagacggctcataactaatccaagcacaaagccactactattgaccaggtgtgggacaatccaaacagttgtaagtgtaagcgtatagctaatgggaaaatgagaaagcatattagcatttcaatatttcattgagtttcatggggaaatgggagtggcaaaatcgacgaaatgtagttaagcatatagcatggataaactcatttctattcagttctccagtttagagtgaaattaactgaacctggtttttttctttcctaaaaaataaataaatgcagaattgaattcaagcacgaagcaacctagaaccaatcactgaccagcagcgcggggttgccttcgaagtcatccaatgtccagagcttccccgtcagtggctccgggagctgcacgccaagaaaaaacctcgaaatcaatcaacgcccacgcccaaatcccgtccgatgaaaccttccccgagacaaacttaaaactccggcggagggaagcacctcgaactggggcgcgcggaacccgacggagacgcccgtggactccgtccttgccgcgcgcacctggaggagcggacgacgacgacgccgccttgccgcggcggcggcggcggcgagagatccatgcgggcggcggtggcgggcggcggcgacggcgagcaggggccgcgacgaggacgccgcggcggcggaggaggaggagcggacgaacggttgcgctccggcggcggcggtggcgagtgacatggcgcgggtggggctgtgtggctgagagatgcaccgtgttggctctcgttttcttttcttttcttttcttttctttttaaatatggaaaaagggatttggtttttggtttttggcggagtaaattctagaaaaatctcagttgcactgtcacgttgagaagattgctgaggtggaatatttagtaattaggagtgaggaatacctaaataaacaagatttaattggatcatgccatttttgctagttttgaaaaatatcgttgttattccttaattcgtaaccataccaatataatactctcaaatttagatccatgccatgctctacaattaacatacattttgaatcgttttaggtgtactatattttttatagactaaaatacctatgccgattctcttttaccttatgccggagtgctgagcacaacggcacgatgggccgcaacgtcggggatggttagtccagcagtgacgtgcgacccgatagcggtggagaaatcggcggtagcgatgatggggtggtatgctacgggcgcagtacaaggacagatggtccagcggcagctgcgacgctgcccatggcggtgccatctgttgcgagctcaacacgaggagatctagtggtgacggcggcaaggtctaggtgttctgtagatctagcagcggcgatgttgggtctggcgtccgctaggtctagcgggcagcaatgagctgagctgcgtcatgcggtccaacaacggcgacgttgggtctggcgtatctagaggtgggcaatgagctgagttacgacgtgcggttttggtggcgatgacaagcttagctgcgacgttgcccgtgctgatgacgaaggagacgagctggccagctcgggcggtcgtcgtggatggcaacggcaaccaccccaccaccatttctttatttttattcttcatattttacttttctaaaattgttatacttttttttcatgtgtatgtataaattttttttaccgaaatttaaccggtgcttgagttctaggaggggtacttaggtcaatacggaaatatagtacacataaaacgattaagaatgtatatcaagtgcacaacatggcatggatctaatttcaaaagtgttgcagtggcatggttgtaaataaagaagtagtaatgttatttttcaacactagcaaactgtataatttaattaacccaaaactatgaaacgttagacttgggccctgatcgagagtgagggacgaggaataatccctccggcacgaaaaacagagcaggccattagcgcgtgattaattaagtattagctaatcttttttttaaaaaaatggatcaatatgaatttttaagcaacttttatatataattttttttaaaaaatacaccgtttaacagtttgggaagcatgcgcgtgaaaaacgaggtgacaggagcggtcgcccgcgggaacgagcgcacccttaaaaaggccagcgatagctgttatgtaaaaggagataatttattattagcatattagctgctacaaacatggaaaataagtttatttgatttattatgaaacttttatatacaaatttataaagaaaacatattaatttgtagttcgggaagcatggaagatgatcaagttgccaagtggcccttaggtttgttacaattaaaatgagtttttttttttgcactggttaggttttccttgtcgttgtatgtatggcaatttgttatctatcgtacaaatgctacaccaatactccctttgttttatattataagtcgctttgttttatattataagtcgcttgatattttttcctaatcaaatttatttaagtttgattaagcttataaagatatataatagtatttttaatataaaacaaatatattatcaaaatatattcaatgttagatttaacgaaactaatttgatattttagatgttactaattttttttttaaattttgttaaacttaaccaagtttgattagttaagccacgtcattaagaaattgttagccattggattaaatcctaattatataattgtagccgtttgatcatccaattcacagcaaatcagcaatgttggaacgtacgcaagcaccaagcagtacctgggcccagcttcttcgttgagccatattgcgcagcccatcagagagagacaaggcctcaaccttatccatgaacgcggccgatagctcgctgctcgctgcccctcccacgcctccctcgcgcggacagtataggtgagcatttttttccatagctcaattttgatcgctggataggccaatggagggggaaacaaaacccaagtttttggttttttcagcatctgtctaggactcttcctatgctacagttgacaacaactccgtttttcagatggtgtgttgaatgggaattgttcgcttctgctaaacatccaattattttttacccccatttttgccattaaacttctttgtgtggctgatgccatggacgcttgttctcccttatcccagaataaaaccttctttggaatgaatggaggaattttcagtgtttgttctgtgagaatcgaactaatgtcgatgaaaatcctatgaaattttacactattttctcatgaattaattcaatctttgtaaaaaaaatcctcccgaaattcatcaaatccaaaggctgcatgtgttgctgaattattaataaaaacctgatggagatgattggctttcttcccgatattgagaccctgaccctagaaattatgttgcaagggcatgcctttggatcatgtgtattttatctgctcaagatgtgtgtacaagaataagtaggctggagttggcaataagtggtgacccggaggtaaatttgtttttcctaatatgaggtttccccaaggatgacgaaaccattctgcattttttgttcataagtttaatggtcaaattatactctagcaatttatctctaactcacatttctacttctcttaatctttcatttcggcctgaccgccatttcaacctagtctttacatattatcctcatttcaggctaagattattgattgcccatttgattgcatctgtggagaactgaagatatccagctgaattttcttgtggacataacaatcaaaagcatgagaggaatcgaacaaagattgaatttgtgtttttgagaagcctacttaggtcagccacatcactccgacggatcacattggctttccatggtatgattatgagtcctgacaatggggagccattccagaacttcctggttgaactatccagcctgatgaaattcaaggaaatttaccgcgctgagagatccgcattcagaccaaactgggagtaagcgtgatcattcagaaacagcgtgctacagatcaacaccaaaattcctaaattgcatgtccttgccaaaattgtaatagacaatgtgtaatgcttgtattatatttttctgccttctaatatattcgacaatactcttgccgctttcatataaaaaaaccaccaaaattccgaataactgaaggcatggtctatcgtgttgcatgcataccagaattattcctgaaccgctgagagcatgccgtactgtgttgcagatcgatagcagtattgcgagcgcaaaataaaggccgtaaaacttgtttaattcgtgttttacttagagagatatttttttagataataaaatagaatatcctgac

SEQ ID NO: 10309 - DNA, 15319 bp, Oryza sativa
ccccctccacgtgtcagcccatgtgagcagggttaggtgggcgcgcctaacacccacctaaccgcatttaaggtgagccagatggccgcgcctcgtcgcatttaatgtggcatgcaggcgtggctgacaggccgcacgtcgcccgaatgatgggtccgacggggttagtgcacctgactgctgactgcttgttagacggcttgcagcttgcgctgccccatcacatcggtatgttgagggttgtttgccccttgcctaggcctgagtccacgttccgctccggtccgatccgggtttccgttccctagtgggacagggtgcccagaagtcttcatccattaatgaggagtgacacatgcgtcccccgtgtcgtccggcttgaattgatgagggcacatgccgcaccaatgggcgtaaggacttccaagtcagaggaacaagacatgcattaaatgtaaagaatgttttccttcttccctaggtagcttttagggcctctgtggtaaccccttgaggtataaaaggaggtccaggcctagtgaagaaggggggttttttgaaggcattcggcttgcgtgaacacttgtattccccacagaatcaaccacatgcaggagtagggtgttacgcttctcagtggcccgaacctataaaaatcccttttgtctcgttgctctagaggggcccgaccccctccacatctctcttccactaagcctcaattctcacccgctacccccgatcgaactaaagggggccccatagtcccactacacgacacgacacgacccacgacacgatcatttggcccgcccaagcacggcacggtgcgactggtgttgagctcatgccggcccgacccaacagttggatcgtgcctgggccgatgccttgtcatggtgggtcgccccggcatgacggtcaaagaaaaatagttgaggggtccaaaatagacttacagccatataaggtacggcccaaagaaaaaaggatacaaaatagacttattgtagccatataagacgcaacgcaaagctatgagggaggaaaaatagacttattatatggagaaacacgatgttgggcctctccagggccatgggtgcagcccgtgagaaggctcggcatgtaggtcgggtcgggcgggccatttggccatctatatcatagagtgcaagggaggggatgatcgaggcaatctgggacgttagatttggtgatcaaacggctacgattgcgcatgtctgcctaatgcgtctactgtgtcaaaaatcaagaccaccattacgaataggggtgaaaatggggtgagtatttcccgacgtaccgcccgcctgacccgaggctcgcgggaggaatatgggagaaaaaatgggatatccgatactatccgagtttaaatctgaatttgttgggaaaatgtgggttaggatacgggaagacatgtatccgcccgtatgtccctattatataacatgtatgaaaatttattataaatccacctaaaaacatgataaaagattagttaatcactatttacgtgctcatatgtatattgtataattttttttcttgacgtatcttttttaatactttaattaccttattttatttaatatctatgaattagagatacaaatagatatccattcccgaatccgattcgaagcaaataatataggataggatatgggatgagtgatatattatccggcactacccgtatccgactccgaatttaaaagaaaatatgggttagggtatgggaatggcataatccgaccatacttgctcgttttcacccctaattatgattttttttaagtagaagaagatttacaaaactacttggtcaaaaatatatttacagtactatatctttttgttttcaagttttacggatctttaacgttctttggaagctttatttatatatctagataatactccgtacattgctgcgggacatttttatatgacctagagttgtaaacttgtagtaatagatatagcccgaaagttgtttcatgtagtctaatgttacatgataattaatttgaaaccctgatgtttgtaacagtaaattgtgaagatgttcacctgaaataatggaagttcttaattaattatcagcttctttgttttctgaatcacattcaccagtttgttatattcttaactcatgattgaatggttagcctgattaggttgcaagcaacttctgagctccagccatagctagctataagccagctacaaacatattttaaggagataaataagaagagagaagagtagagggctacagatttgtagctagctgtagcacgaacttcaagacgcagtgtgtgtatgacaggtgggaccatgtattaatagtgtagtatgtaactattgtatggatgagctattagattggctatagatgaattagagctagtagtgggctatactattaaacttgctcttacaacaaatgaacctgccatctacagtaacaaactcggttagtcgagcaacaatatgtaggctgcacatgtgaagttaacggtgtgtaattaacagtgtacatattttcaaatataaaaaaaatacgtacaacacactttgaacaatagattaagtaaaattctatgggaacatttggaagggccagttttacctcgtagtgctgtattgcactttattgagtaaacaaatagctgaaaaatttccctagtaaagcttatacatttctagacttttttaaactaaacaaaaacgtgatatttgcaggatgaattcagaaagagaaaaaaacaatccgtaaaatagaagctacggagaacgaatactaacacacttaactgatggatctaatatgagttttgagcagagagtagtgaaatacctgccctatactgcagatgacgatcagttgcacttctattttgtgtattgatcaaatcacttcatgcaattacatcctttcactacatctgaatcacctgataatactatggtaaggtagtgaatcacttgatgatactatggcaagaaaaatgagaaagaaaggagaaagattagagcaccttcggaatcaccttctattatgaaaaggaaaactggattctcataaaggcaaaaaccatgacatttaaaggtagaagacctggggataataaagtaaactacctcatcatcagagaataaaggtggccggttgggtagaagcttgcttcatcacttcagtttagggaaaattaaatctatgcaatatggtcattggctgggaaagaggacagaataatctgagccagctgcgggcctaataccaagatcaaagatgaataatgtaagagagagagagagagagagagagagagaatagaagtatagctgcctacccgcaggataatggtggcaggtgagagaatcttgaccaattgttagcgccaatacattgagcgagcacatgttcttattgtacaacaaatcaatgacttaactgcgggggactccctgcaatgtttgattcagaaaatcaacctagtactaatcagctggattgaacatacgttagatcgagagtacaactgaataaaattcagttaaatggtataaggtattcatcaccgttagctatttaaaataaccattgaacttaactctgacaaagagaatagggtaaattgatcattcgcttagagacaactgaataaatttcggaggaaggtttaaggaaaagcggtgcacacctttttttttttccttttttcagattgaagatctacaggagcagcataacacattcagaaggaaggctgtagataccacatcaccaaataactttctgtacatatcaaatatccaaagggataaaaataaagctacttactacggttatcaatgcagaacattgtacatgtggaaactcagatgaagcagagttggtgccttggtggagaaggacagagaacctgattgaagcattccccagtaataagcgaaggccaaggatgaattcaccatgacgttatgggagcagtaaattgatgtctttgatgacaaccatgaagtctgctctcgaagcagcggtttcatttctcatgacattccgaggaggcgaaaaggctaggaggcggcagccggcaggtgggcttgaactaaaggcagagggagcgccggatagggggagggacacgacacgggagaggaagtgacgggcgccgtcacctaaggcgctgcggtatagggaactggagggtttgcctctggttagggatggatacccgttgagttgggccataacatgggcttctttcggcccaataaacaaccggggaactctgggaggctgcttcatggcttcccttccgaatgattcagatcgtacggttcatagcaaatggggcgatgtgaagcaccaggaagcagagatttcctagtagtggggatgatttgtataggtatataggataaacgctcttcaaaaggtgcttttttaattttttttatgtcacgtcaaacgaccaaccaccggtcacaccatgctaagagacaggtataattcttgaggcagcctacttgccaccctcccaaataatgttatcatagattaggtggacttgaaatgatttggtactcacaaactcatccaaatgtataaatttggatgtcattaagcaagacctcttcatgttcctatgtgttcgatcctctcatgtgtttgatctgttaaattaggatggaacgacgccgacttcattgagcgtcatcttttcatatttacatacatgtatttgatcttataaattgggatgaatttgtgaagcgccaaataattttaggccccctagtcaggcaaaaaagatcctctaagagggtcgcaactcacaagtgggccggctgcaaaattgctaatgcccacgcatcagccggcgttaacattggtgaagtttaccacataagaaaaaatgtcctttggaaggtgttttcaagaaagaaaacactccaaaaacgttatggatatactcaatccgtttattgatagatgactaacttttgaaaacacaatcgggaactgactatccaattgtcgggtgatttctaacaaaaattcacctagattttttctactattatatttacatccaacagactacgaaagaaaatagcaaaattgaatcgggaaatactctatactccagcaacaactgggcccattcgctcggcccggcccacctcctcgcacgccatgcccacgccacgggcgcgcacgcgcagctgaagagagagcacccgcgcgcccacgcggcggcgcgtgcccggcacgcggcggcgcgcgcccccgcggcgaccggaggatctccgctcgaactccctctctctctctctctccaactaaccgcacgtcaccggaggccgccacgtacatgtgttatacattatatatatcagtcgtggtcgagtaggaggtttcttgcagagatcggggttcggcgccggcggcgagttgttgagaggcaaggcaaactcaggcgactgagctaaagaagccgcactagtatgggggtgacgaaggcggaggcggttgccggcgacggcgggaaggtggtggacgacatcgaggcgctcgccgatctcagaaaggttaattctctctgcaaatactcctggttgctcatacttaaatctacctatgaatgagggatcgcatcgatgtcgcagttggagttggacggacaggagtgagaaattattatctctgatctgattcctgttggtatgcactcttgctgtttgtgaaaatgccccagaggatgcatccacaggacacggcgccttcaatatttataagttgattcaatgatgggtttctttcatgtttctttgctgaaaaatcgtgtttagtagagtagtcttctatgtctctattcaaaagaaaagtggcattaagttataggagaaaataaaagggagaagtcgttttgttaattaggagcttctcctttcgataactatgacttaatagttcatttttattatggaacaaagatgagatacaaaacaatagattgtgatcacctcagtttttttgtttgatatcaagtctgacaaactaaggcattacggttctctgctcttgtttgacaaacgaagtctattgtacaatagaagtctgttgtttaatgtctctacttttggtcatctcttgtatggtttagcctagatctcagtttatcttactataggtcgccgatagtacaatatgatttgtttctccgccgtacctaatccaaaatcatatagcttgacattatctgcttcgcatagatgttcgttataagcttcaaattacaaatttcatattgaaagtttagcctcttcttgttggactataatagcgagtccatgtgaacatcatttcttacattaatatacatttcttcacatttgtggctagttattttacttgccctaccattgtcgcatttatttatatttccataactcattttccaatgcttagttgaatgtatcattcactcattcttgtattgtttgtacgtctttgagactttgactgaaaatagtcttagttttgtacctattttatattttgctttatgttttaattattttctttgacatgatgtgcatgcatatttattactaattggtcatgtaacacaggagccagcatggaaaaggtttttgtcccacattggaccaggctttatggtctgtttggcttacctcgatcctggaaatagtaatattctctctctaaatttattttctcacactcatatggtttctcacgcttgacgaattgaaacagtggagactgatctacaagctggtgccaatcacaaatatgaggtacattctctagccttttctatatgacttttcctgccatttatcacagttgtcatgtcttttgttacagcgagaagaaagaaacaattaactgatatgcttcttgatgtgctctttcatatgtttcttagcttctttgggtgattttgattggcctgatctttgcactgattatacaatcattatcggctaatcttggagtggtgacaggtaataaatagacactttcagcacacaattgatttaacatttcagttggaagtagcaagtaatgaatgtcaattgatacagggcgccatcttgctgagctgtgcaagactgaatatccagtatgggtgaaaacctgcttatggctgctagcagaactagctgtgattgcttccgatattccagaaggttggaaatagaatgatagatctaaataaaaaaaagttaatgtttaactgtcacctttgagtttcagttgattaagtttataaactctctcactgatataagtgtacgagcaacacttgcactgattgtatacagtctcttatccactaaacattatgatatgtagcactttttctgagaagaaagcaacaacatctaatctaatatttggtgttttttacacatgtaccttttgtgcagttataggtacaggatttgctttcaaccttttgttccacataccagtgtggaccggggttctcattgctggctctagcacgcttcttcttcttggactgcaaagatatggggtaaccaactatttatgactggatatatgatagatgtctgtataaaatgttttaatgaatgtctaaacatcattgtattgtatttgatcattactgtttggtcattgtaaatggtggtcattacaaatgggtttgttgttgaattgacttgtttgcatttttccttcatctatataactaggtaaggaaactggaggttgtggtcgcgctattggtgtttgtcatggcagggtgcttcttcgtggagatgagcatagtcaagcctccggttaatgaggtccttcaaggattattcatccccaggctcagtgggcccggtgccacaggagactccattgcccttcttggggctcttgtaatgccgtaagcagtcaaacatgcatatatacccccagttgttaatgtgtgcaatgtcttttttgcgtcttaagattcttctagggtagctgtaaacatgcataaggttttcaactctccagtaattacaaatctccacaatggtagttttagtctttttttagattttgacaaaatgcactcttgttaatcataagtgagcattatcagttattaattacaggcacaatctattcttgcactctgccctggtgctgtcgaggaatacacccgcatcagcaaaaggaatgaaggtgatcagatgtccgtgttcttgcattaaaaaagaaatggtactcctagttggctgatacatattccttcattcttttgtactccaggatgtctgtaggttcttcctctttgagagtgggatagctcttttcgtggctctgcttgtcaacattgcaatcatctctgtctccggcactgtatgtaatgcaaccaacctttcaccagaagatgctgtaaaatgcagcgaccttacattggactcctcatccttcctcctcagggtactgcatatatgtgcaaagttcatcaccatttatatttagttgtgttattttcttcacaaaaataaattagtcatgttatcattgaccatataatggtcatttacagaattattatttatttttttttcagaatgtgctaggaaagtcaagtgcgacagtgtacggtgtagcactcttggcttctggacagagctcgaccattactggcacttatgctgggcaatatgttatgcaggtatattttacctgaactctaaccttgtttacaaattaaccaagtactatctgtgaactattttcttaatgaccagttcaagtggtatagtattaaccacgcagtaaactagaagatctccaaaatggtgaaagaaatgaaaaaaagtttgcaatctatcaagcttgaatgtatagtaacagttttttttttccatgtatctacaggggttcctagacatcaaaatgaaacagtggcttcggaacctgatgacacgcagcattgccattgtgcctagcttaatcgtctccatcattggagggtctagtggcgccggtcgtctcatcgtcattgcatcggtacaatcttttactacaaatgaaaatatcagtttgcccataagaacactcattaaaaaaaactgccatacaatcaaccatcttctaattttctcaataattagtaagttatttgctaatcgaaatgcttctttcttcaaaaaatggacggtatgtaatttgttgtacctcattccttctgatcatactgttaaaaagaatcaaaacctaatgcttgttttggtttggctgttacgtttcatacagatgattctatcctttgagctaccatttgctctgatccctcttctcaagttcagcagcagcagcaacaagatgggtgaaaacaagaactccatctatgtaagcactcccccatcaatcaatcaatccttctttctagcttgtccacacatagaaaacaaaaacaaaaaaaatcctggaaaactaataatgcattggtaattaaaacctgcagattgttggattctcctgggtgctggggttcgtcatcatcgggataaacatctacttcctcagcacaaagctggtcggctggatcctccacaacgcgctcccgacattcgccaacgtgctcatcggcatcgtgctgttcccgctcatgctgctctacgtcgtcgccgtgatctacctgacgttcaggaaggacaccgtcaagttcgtgtctcgtcgtgagctgcaggccggcgacgacaccgagaaagcacaggtagccacctgcgtcgccgacgagcacagcaaagagccacccgtgtagtacccttccagaccggttaccggtgttggctggtttttattggatagatgtttaggtccaattttttttatataaaaaatccaatagatgtttaggtccaaatttttgaattcaaaaaccggttagcagtgataaccggctgaaattttggcccatgggagtagattgttgctttttttcttagtgattagttattggcagattggcagaatgttgtagctaggcaatctaattgtatggttagatatttagtcataaatccaagagtgagttttcttggatgcgaggacaaggacaatctaattgtatggttagatatttagtcataaatccaagagtgagttttcttggatgcgaggacaaggacaaatataaatgtaaataaatgcagttaaagtaacaccttgctcaaatataaatgtaaataaatgcagttaaagtaacaccttgctccttgtggacatctatctcttgttgatgccagtgttgtggatgacggaatatggatgtcggacggagatggttccgctaaacgaataatcggagtacgggcgaataatcggaatttgacggaaatttaacgttttggacaaatatatgtacataactcataatagcttattatttttgatagataaatgcatataactacatatatacctactattcttaaataaaaataaggataacatggcattaactcggcatatagtaaaatatatgtctgaacatatagtgataggtttggctcgtaacgcataaaggaaataccaaaagcatgtaacactatataagtgacactaaaacgacgttctgtagctatatattgctaggttacacaactaatgggcagtatcatgggctggctggcagggccttctggccttgtcacatgatttggcccgtttattcggctgattagtcggaaacggctgattaattgctaatgacggtgattatacgtccttaaacgattaatgatcagcgttttgctcattcgtgacggaggggtcggcgccaccgtattaacgcccgaatatacggccgtaccaaccgttatccataacactggttgatgctgaattcatttgggctactgttatgcccaggtcttgctacgtctattgatttccatgtttccttgagatttagatttggttacaagttaaaataatctctagagtttgagtgaagtttgagtgaaccatctcttagacttccatgtttcttgagatttagatttggttacaagttaaaataatctctaatctctagcgtttgagtgaaccttctctttttcttatttttcttgtggctcattaacttttctttaagctttcccgcaaaaaataacgtcttaggtactcttaaatcctgaataggaagctgtgagcaggtataaccaccttgtatcttgagaaatcggacttctcttctcaccttatctccgtttacattttttaattaaaattttgtagagctcttttttgataaaatctattttgtgcgcatgctcgatttggacttaccgaacgacacatctgtgcccacaagaaaaacccacacagcacggagccatgttcgtgatgctattttgggaaaggcgtgaatggaagagaaggaaatgagtaggcgtgcattaggactaatgcgctactgcacaaagcgtcttttttttttcctccatattggtcatttgcttttatttaggttcaacgttagagcttttcttccgtagccccgactcgagctgtttaatttggcttctctttagatcttttgtttttccatttcttcgctctacagatcgccttaaattagtcagaataatggcaagtaatatcaatagttttccccatcgctctcgcgtgggcggctcggggacgaaacctagccgccagcgccgccaaccccctcacccttccttgccacctcgccgccgcaagagcccgccactggaaaccaagggaccagccgggaaggtggtggtgggggacacaaccccgatgaaactccttctcgacacgaggtggagtggcgcgtgtcgggtgtggggaccagtggttagagtggttggcgtgatggagccagccacctcggaggcggatctgcctcccccctcagccccccccacacaccccgcaaccagatcgggagaggacggcgaagttcgcggcgacggcagcacagtggagtcgcggggcggcccgagaaagtgcggtcgtggccggcgaagggggatgcacgacgcggccggtggcaaggccgacgcgttcggtggcagcgtaggctagcgtgggcgatgatagggaggatgtcgcggtctaagaccgcgagaggccggcgtggcagacggcatgaaggctgtcgtggcttgtgaccgtgagaggccggcgtgttcggcggcagtgaccctttcacgtcaacggcaggggtcactgcgctgtgggagagggagctagcaagctgcggaggcgtcatggctgtggaggagaccggtggcagggccagctagcgatggggcactggtgcagctgaggttgagttggtagacattgtgtaggtggcagtgcttgggggtggcgggggcaagtgtggtagggaggcttgcagacgaaaacctagcttgggacttcccaagccagcaatggcagcgttttcggatatcgcgttccccctttcggggtgttgtcgagcggccacccttccatccttgataggaccctccaggtgaaaaccgagtctagctggatgggcaacgatgactgaagatgcacttaaaccccctagtgggttttggtaattaatgacaaggtggttaaaggggactaacgtgtttatcaagtttattcacaggagtttagtcccaaagcaagttgtgatggctaagaatgcaaggagaccccccaatttgaatgctcctaagtgcgaaaatcaccgaaggtgattagactaggtttttcactttcgaaattgagtttaggaaaaaccgtactattaaaaggggtttcaagtgtggttctagggtatacaaagtgctcttagtcatatccatgtgtcaaaatatttttggaatcatttttgaaaaatgatttttctccccgggacagagagggctacccggaggttctggccagaacttccgggcgccatttcaacagcaaattttcctaagtgctgcccggaagttcctggcactttttgcccggaacctcctggcaggcttccagtttaaacttgtgagtaacggctagatgacgtcatctagccgttatatatatggatttcgtccccaggccaccctttggctattccacttcagctctttcatgttctagggttttctagccactcccaagcttcctttacttcctccactcaaatctagagcctatcttgtgagattgagagattagattagagtgtaagagtattttggagatggcttgaagattaggtttgtttgagcactttggataccttgtgggctgtcacttgggcttattactcttggagatcttctcatagacggttaggtgtcgcccgtgagcttccaaagatcttgtggatgtcccgggaaagtttgtgaaggttttcttcacctccgcaaggaaacgaggtaagtgagtaaagattcttgtgctgagttttcagaggttgtcctaggtagagcaacttacacttgtggtcttttctagaaggaattgtgagttggatcttggtggtcactcaattctagaaaatgacctagaagtgttgagttgaaggttgtggacttcttctgggatctttgcataagtgaggcaaggggttaatcgagacccggctctttgagcacctcaacggagagtaggatccgtgtgatccgaacttcaggaaaaaatcgcctttgtctctcttgtgcatgatctgtgtttgaatctgctggtatcttgtgatttacatcttgtgcaaccttgtgcctgattgtctctagctaggacctgttttgcttccccaaattttgattttctctgttgctaggaagttcctggctcaagaactccggaagttccgggctgctcatctctgccaggaagttccggtgttcttcaccaggaggttccgggccctgttaatttaactgctgtgattattgaaaaaatttcagaaaaacctattcacccccccccctctaggctacatctctgcgcgttcaatgacgtctaagacgtcatggccttcctgaagacattgtctaggaggtcatgttccttgcattcaccaccttttctttgtttggtcatcggcggtttttggttgtcttcatcaggttgggtgagggactagtggatctccttctctcttgacctcttcctctcctcaacctctctacgtgtggataactgaaagctttttgacgtctttctatattgagtcggtgtttagcagagcatttgtaacctcccggttggccaagtggtgattgatcacgcttagcggcggtcggcttggtgctattgtcctctctagggtgtgctacgaggagttgccagctcttggtggtggtgtgtttgttttcatttgtttttcttggttacgacctcgtagggttgtaatattgtaactttttcttgctatactaatatgaattttgcattgtctagcgtgaatcattaaaaagagaatctaagaaatgccattgataagcatccaatttcaagaaataccatcaacaagttcaagttccatgaaataccatcttacaagcaattttatcctagaaatgccatcatcattaggattccgtccatcccgcgccattaaatacattgtaacttgtaagtgcaagttttattattgaaagaatagcgtatgtgactacgaggagtccatggaattgtcatcaactataagagctttcataaagaatatagacagagttatccataaaataaaggggttgtttggttttcataaactccctgcctcccagcgcacgcaagcgacgtggatgcctccgcgtgcgaacatgctactcgaagcgctctcagctaggggtggaaacgagccgagcctcgtgaaagcttggtgcaagggaagcttggcttggcttgctcgctacaaacaacgagctaaaactgtagctcggctcggctcggctcggctcgttaatgggctcgagctggcttgcgagcctggcatcaagtaaatctcaagtaggtctaacagaaatcgagaaacattttaccacatagaatttataatactgtgatagttttctttaatatgtcatcacaacacataaatagataatgtggcaatcaaacttaccatttccaacaaataaatagttagaaaaggtgcaaaatttttgtatataaccctatgcactaagccaaacgagcttgcgagcggctcgtgaaccagctcgggcttgactcgtttttgaaacaagctaggaaggaggcttgggctcggctcat

SEQ ID NO: 10310 - DNA, 3873 bp, Oryza sativa
ttagggaatggatttgcctcgtcgaggcgaaggtagtggcgcgagggcttggtcggaaatgctccgacgagggagatcggccgatggccggcatttggaagagagagagaagagagaagctcggggctcggcttggtgtggggaaaagagaagggctcgccggctatttataggcggcgaggggcggtggatgatggcggttctggaggcggttttagaggagaagaagaagaggagcacgttagcggcgacgtgaggaagaggaagacggcatcgttctcgttctatgattgggcatcgatgtcggtttgcttcagaggctgacgtcggcggcgtgagatggcggtgacgtcggcggcgatgccttggcgacgacggcaggacgttggcggcggcgtgtgaaaccacggcgatggtagcggcatgcgcgggtatgccgtgcgtgcccacgacgcacggtgacggcgcccacaggaggagatggagcggctgcttctgttgggccaaactgggccagtgggccaaaaaggaagaaaaagaagactttggcccagattagaaataaatgtttttctaaattttgacaagggtttgggtgattagaatttaaatttggagaagatttggaaggaatttgaatagggaagtttgaaaggaaattatgtaggagatattttctagtttgagtgcaatattttgagggagaggatataatggaatttatttgttgcactcaaatgagaagaagagaatatatatattggcatgaatagtatgattcctaaaatagaggatataattgagaatatgggaggagatggatggatgaagataaataggatttttagcctcgaaatatatggcatgggtttcaaagaattgtttgaggctaaaaggaaatttggatgacaaagatataatctattttcttagcacaagagcaattattttaatatttataatattgcttattcttgtgccgaataggagatcaagccacagagattaaattagtggctagattaaaaggaggaatttagatatttggatcgggaatcaaagataggtttaagatcaaaggatgggttaacaattaattcaatagaatcagaatttcggtggtttaggttcaagggtaatatgggaagatttattggaccataattcataataataaaaatggttttcaaactaaatttgaataaaagagctttagtcgaaagaaggtttaataaatagaattccaacaggaaataccaaatatgtttttaaatgaaaaacacaaaagagattaaataccagagaggttttatgcgagttagttttaggaggtcccactaattatattttcctaggtttagaaggttattaagaacataagaattaacatgatgcaagattagaaaatagctaattttcagtatgttacattcgaattcggagaatatttgaataagaaggtttgaaaggaaattatatccaaatataatttccagaagagagattttctggtttatttgagtgcaatattttggagtgggagtttgtttgatgcactcaaaataggaattcaaaatattcaacaccataaataatatggctctagatttgaatatttttgagtatgtggagcgaatatggagggagtagaataaatagaattttagcccaaaatatatggcatggattctagagaagtatatgaggctaaaaggaaatttggatcgagaatcaaggataggtttaagatcaaaggacccaattaattccaagaaaattggaattactttggtttaggttcaagggttgtgttggtggatttcttggaccacaattcataaaagtaaaaaggatttttaaactaaatttgaataaaggaaattttggttgaaagaaggtttaagatgcaaaaatcaaagagaatacctcaatttaacaagatcaatttttagaataaaagccacgaaagattttaaataccaaaaagggattttatgcatgttagttttaggaggtccctctaattataatttcttaggtttaggaaggttattaagaacataagaatcgacatgatgcatatttagaaaatagcaaattttcagtatgttacagacgtcgtccggtcgggcaatgattatcctgggcgaggcatgcccgacgctgcgttatccggagcggccagtcttcttcctcttgttcgtcatggtgggattgactccccctttttgtctttcttcctcgatgttcaggacttctacgagatccagatggcgcacctcaccctgaacgccgtgctgacacttgccatcttcgcacatctgtgcgagatgttcatcggggtgaggccgtgcctccgcctcttccgttggttcttaaccatgcaactggtgtcccccgcgacggaagccgacggctgctacttctagccgcgcgccaacacgcaacagcactatttcgggcagacgctacgcaagaagtgggacgactggaagcacgattggttctacaccgtcctccctgacaacgtccacctttggctccctacagcaccgcccgttcagacgtcgagctggcggtcattgtcggtgttgggagacacgtatgacgcagtgatcgactacctcgccggtctgcagtataaggggctgactggtgccatggtcttcagcgactacactcgctgccggattgcgcctctccgggagcgggtccggggtgcatggtcatacaccggctccgacgactccatccggactcatccggggcagacctgggactagaactatgccaacctcaagctagtggtccagtgggtgctcagcctcagggatgtcgagccgtcgctaatcccccacaacatccttcctccatcctggccatcatgcaagcgataggcgcaggcggggaccgcagcggaggtgatggcgctggcggcagccacgttttgggggaccgctacctatccgcccgaggcggccatggaggaatgtccacgggcgggggttcgggcagcagccgcccctctgacccgaaggggaagaggaagcaaagggactcctctccctccccgtcccggccctgcgggggcggcgcagagtgcgccgttggcaggcgcccaatgggcaccgaaccggcgcagccctcaatgaccgcatagctagtggctgggaggaggaagaaatggccgtgcaagacggcggagaccaagccgtgccggggggagtttatcaagtccccggaatggagctcaagcgccaccccctgaggttcggtcttaacgccacatctcgtggttcctcaacctatgcccttcgcttatcttttccatcttgcttgtttttctcttttcttttttttctttttagcgagatccacccttgcggcgcccctgccgacgatccctcctagcggcccaagtcacacaggtcggagaaggctgaggccgaggcgcaaacaaccaagaccggggcgcggggaaccagggtcggtgaggagatggagtggccggacaacggcgcggagtcccaggcctcgggagggggcctggagccaaacgccgcgcccgaggccgagcccgaataggccccaggagggggccaggatccaggcaccgcgcctgaggtagaacccaaggcgaggccctcaggaggagagtaggccctggggaccgacgcgcccccatacaactgctggcagggcgtccccgaccgcgcacagggcggaggccacctggggggcccctgccaccagcgccaccggacacacgcccagtgctggtgggggcgacgcccaaggcgcggaggacggcgtgttccgctcgcccgctggggatggcgtggccttgtgagcgagacgcggtggcccgcatgc

SEQ ID NO: 10311 - DNA, 6408 bp, Oryza sativa
gagcaccttggcggcggtgagcgccctgagcagcggggcggagtgcgggtgggcgtgcgtgaacgcggcgaggaggtgggtggcgccgcagaggacgatgaaggcgcagaagtggagcacggcgcacttgacctcggacaggtcggcgcaggtggcgaagtagaagagctcgagcgggatggagaggaaggacgccgcgatgagcaggtcgctcacgcgctggcactgcatcagcgcctccaccccgccgtcctcccgcatgtcgcacgcgccgccgccgccgcagcgccgccgcccgctccccagctccgccgccgacgccaagaactgccgcgccgtcaccatcgccatcgcaaccgagagaggaggaggaggggagtgaggagggcgatggatattggatgggagggcggcgcgtggaggtggtggagaatcgtgcgagcgtgagcgggtgacaagtgtaggcaatgcagcgcctcgtgctgtgtcgagtggtgggagagacaagtgtaagggatacccttgccgctgggcacgcgggcaagggaaggcagaggccggtggactggacagttttgaaaaaaacaaaattggcgcaaaagattttgaaatggtgtttggtttgcctcgtgagatcgtgtcatccgtgtctccgcctctcaggcagcggcgaagccacatgagtattaggggtggaaacgagccgagccggctcgcagtgggtcgtaataaattagatttggcttatcttagctcagttaagaaaacaagctaaaacttaagctcggctcgactcgtttcctggctcgaactaaactcgagccgacttgcatgccttcctattgaaacacctcttcaaatatattttgtaattattaaaaaaaaataagaacaaatcatcaacatataaaatttaagtttatatattcaattcttcaaaatcttaatgataaattttaagttgacaaataataactccataaaaagtaaaataatggatataaacatatgatggcctagctcgtgagccagctcggctcggctcatttaagcaacgagctgaaaaggaggcttggacttggctcgtttggcttacgagccgagccaagccaaccaggctcgagccaagctcgagctttttttccacccctagccacagaacaatgagctaaattaataagggtttaatttttttcataattacataacattttttttaaatatataatgagagttatggggttaacatagggcttcaaccttagctgccctatgcctattaacattcttggtcatagaaagcaaaaccaatggagagtatctacgtgttatttacgagtagtttggaataaattattaactgaactattatagtggactagatgtttgcagatcagatggtttcagactatatccgaacccatggtcctatttggtttcattgctagattgactcgtccactagattgacgagtttctttttataaaataccagacaacattagagcggctacgactattagccagctataaacatattttaatgagataaaagataagaagagaagcgggctacagatctgtagccagctgcagcacggactccaagacaaaatgtgtgtatgacgggtgtgtcgaggagtgatcctctctagcgggagatcgtgagatccccttttgtgagttcggccgagggaaagggttcgcctctcgagatcgtatatccgccctcagggtttctagatcgcgtgccggcgacaagattatacaggttcgggccgctatggagcgtaacaccctactcctgtgtgtgggatttatggttgagtgttacaaaggttcctcaactccgaagagcgctcttggtcttctccttctagagctcaggcctactgagtgtcgtcccttttctcggtgggcaaggtcctccttttatagttcaaggggataccacatgcgccggttctacctactctttcacgggagggggacccactttacctcgaccgggccacgatccgtgccttcgcccggaagctaagcagcagtctgtccttgagcgggacccagcgccaccccccgcttgacacgggggacaaccctgtcattccctcataaatgagtgaagacttgtggcggtcctcctcacgtggagggaactccgaataatactctgatgggacgggacatacctgcctccactccgccggagacagagacggacgtgggggcgcggccgcctgtcgaatcggacgtgaccggcgataggccggtcacagtctggtcacacccgattgacgtgggtcagtcggacggcaccgcacgtctgcccttagcgtattaaatgcggtgagggacagttggggcgccgcgcgcattgatggcggttcagcctgggtctcctccccgctcgctccccccgccacatggcagttgggcgagggcctcagggcaaggcagcgcgagggcccgaggggcgtgacgtggcaccccgaggccccctggctgcttctgagactcgcgaggcgcggggggagggccaggctggagagccacatggctggatgggaaggtaactttccctcacttggcatacccccgggcccatatctccgacaaggtgggaccatatattaatagtagctactattgtatactagtaatcgtgcacatgcaaggcacgttttgacagtatatattagcaaacgaagaagaatctatgcaatcatttctatgcaatgcactccatataaattcttctagcaattaagacaatttcacatagactatactaacatgacaatttggatggttctctataaaaaccactattttgaatcactacttgcttaccaacgaatgtaaaagtatttagtgggacaaacacaatttatactgtgatgctgctaccttttgaaatcaaacaattaatgatcgaactctgaacaattcatggggatagcagtaatttcataaaactgaaggcaatatcatctagctgcagcaatattctaactttaacaccaatcttttcacctttttggaatatgacaagtactgtatcaagaagcaatggatattattaaacctacatataacatgagacttaatgcatacacctgaatagtgaatactaaccaaataattaaattccaaatcgcattgatttgttgtgtgggctaaatcatccatatgttcagaccgatcgatttcatgaggttggtacaggatcaataaagaacatgttgcgctgttaaaattattttgaaataacttaagaattgagtcaccaacataaagtgagcattggcagtcatcaactgctgttgttgctagctgagaaaattgccacccattgaacacttgctggatgaaaagaaagtgaggtttggacgaactcatcagaaacacattataaactttcaatgattttagatcctgtgagttgattaccaacatgcgaggaccgtactgctgaggaatagagagcttgagatcctcaatccaaacagggtcaagttggctttgatcactgtcgccactaagattcctggcattccaacggtccagttcagaggaagaagcctgaaaccagatatagctagctaggtttgtcatttcatctgagcaatgcatatttgtatcaactatggctagcgattattgttgggagaaccaaaaacatacatacatacatacatacatacatacatacatacatacatacatacatatatatatacatatatacatatatatatatatatacatatatatatatattcttggacaacctctcggccgtcagctttaagcttaccacaccacactgcgtggtcggtatgcgaacatatcgtaattaaaacacacaagtattaattcagaactgcaaaaattttcatacaacacactggataaagactgagcagtaatcagataaagccacaaaagaagggtgctgggtccactctctctatctctctctctctcagatttggggataaaaagaaacaaagagaatagtaagagagtatcatcctctaaagaaaaccctcaaaaagtagaataataaatgtggcccttttttaatgcagcactccatataaattcttcacgtaaaaaattgagtttcatagacttgttgaacacaacaaaccttcaattagcaaccagctgatcattagagcatgattaagaatcaagatatgtgtgcagcgtttcagggtaaatatttccaatccacgtaacattgcattgcaactgatggttacataataaattttgtagaactgaaaaaaccaggtcataatctaatacaatcaccttaaggaggtgcagactgcagcctaatcactcctttattttttatgagcactatgctcaataagttttaggacctaggataggaaaaactccccttgctgattcatttgcatccattgccatttgccaacaacagcatatcataatccaagcatttatttgccaataatttaagaactcggcaaagaaagtaagaatcaaattaagcaagaaaggaaatatcgttgactacttggctcatagcacaacaaagtttcagttaataattagtgcatgaagaaaaataaaagaaaaatcaagtgcctgtgcttaccaccatggtgagtgagaccaacaaacagaagggcgcggccacgacggtaattacgaaagccaacagagcaactcggtcatcagaagcaatcggcagaccaccaatcacatgaaggatggaagaagcaaattccatatgtttgtagtcagatttctgaaattttctgttaagttcagtgcagtaaacattttagatactcaaaccttatatatacagatacatatttagttgtttatatattgcttaatatcttaattttacaattcatctgcacctgtggtcagtacgtgtacaaacccagctggtttgcacatgcatctgtagattactatataattcatatagaaaagaaatggattagggaccaacatacctgtcattggctcgagcagtctaaacttcaacagcttttcaggacttctcctagcacaggaattgcttcaacctcagtccctttgattgctctactgatgtttgtatacaagaagaaggacaggataagaaacatcataagtcgtgaccagacccataatagactagagcacatatatgaacaaaatgaagaaggtgtaatatatgttagattgcgattgtgtatatttgtttccctcccttccttatcccctccgatattgtttctataaattggttgcggtagatatggaagtcttgggcctatatgtactctgtcatatcgataatgcaatctatcgtgatgagccaatcacactttcatggtatcatattagtttctttcctctgcttccgcatcttctccaccccagccggccggcgcctcccaccgccgccatggcttctccctcatctctcacagctgactccgtcctcgaagataccatcaagttcatcaccgacgccgtccgctcctccttcaatcccggtcctggcctccaagtcgacgacggcctgaccgatgctgtcaccggcaacgccgccgaccgcgccgcgaacgctgcccggacagccctcgctcttgtgctgctcggcctcttccagtcggcgccggctactgacgacgtcgtctcctccgcggtgccactatcgacgcccttgacggctgcgcccccgacgaccgtcgtcctcgcgtccgcgtcggcaccgccaccggtccctcctccgacttctgcggccgtactcccgcccgagctcctagcgctcctcgcccgactcggcatcaccaccacgtcggccgcccctactcaagacgccgtcgctccaccaccaccaccgccggcactcgacgccgaagccgtcgccactctccacagccaagccgtcgccgtcctcaacgtgaaggccctcgtccccgtcaccctcgatctcaactccgacaactactcccgctggcgaggcctcttcctcgttgcgctcggcaaatacgccctacaggaccatgtcttctccgacgtccctcgcgccgatcaggccgactagacacagatggactgtgtcgtcctcggctggctgtacggttccatctcccatactcttatgcaggaggtgctctctcccacggcgaccgcgtgctctgtgtggcgtgacctcgagctacaattcctcggcaacggcgaatgatgcgccgtcaacctcaccgccgaactccatcatctgcaacaaggtgatctctccatcggcgactactgccagtgcctcaaggtcctcgccgacaacctcgccgacgtcggctagcccgtcaaggaccgctccctcgtcctcaccctcatcgacggcttgaacgacagggtgcagga

SEQ ID NO: 10312 - DNA, 9801 bp, Oryza sativa
taagctgacacgtggtgaacaaaaatgaccgacgtgactggtctgataccggtcatgtcgtcagcagacagccacgattccacgttgcacctgctcccggcgaaagtggaggtagttgtgggccgtctcatcagaaggtgactcggacggcaactatacaaatctccgtccatttatgaaagggggggtaagtccccacaaaaaagagagaaatggtgcatgtggtatccccttaagatataaaaggaggaccttgcccactgagaggggggactggacttttccagattagaaacccataacaagggagaggttggctgatactttgtagctccttcatacacagatctcccaaaacacaggagtagggtattacgcttctcagcggcccgaacctgtatacatcgcccgtgtcttgtgtgtttcctgtctcgcgagccttccacatacagagagcttagaatctctccctgagtccccggccaaaccggcaaaggggggcctgcgcggtctcccggtgaggagccccacgctccgtcattaacgaagtacaaaaataaggaaaggattaccgataactccggaattcctccgacttctattttactctctccctaattctaagtatataccatataacatataaagatcctaaagtatacttagggcctattgtagttcagctctacatcttgttgtgtgttaaaatgaacgatgagaggagtatttataggtggaggtgccttgggaggatagagtttcttccaagcatccaatgagcatcttcatcctcctagtgccaagtgtccagcttatgactattttcaccggtgaaaacggccataaccgtcaacggggagcgatttgctaccaaacgcaacctgggtcgaggcagcggcctctgtcatggttcggccgaactccggctcagttggccccggttttcagcctggacatttattttggaccccttattctattggtatggatgtttggcccatttagaggtgtttaatttggttttgggtctaaaactccataagttcggatacgagtttgattctcctcttccttcatgtatatttcttctcaacttaggtagtttgtcacttgtatatgaatatacaccaatactcatgaaaattgttagaaataaacattaccactatgttgtatgttttatatttatagtcttatgtaggtattgacagcgttaatttggtacttaacggccatcaaaataatcacctatataaatttactaactaaaaggggcatctatataagatagccatagctcgcgagacaactcattcatcataacgttatatcaagtgatccaccaccacttagaacaaagctttattattttcctctcagtactcatgcatgctttctgtcgttccatcaattaatatagccatataattatcactcaagcataggattgcgaggcatcagtaatgcctgaaattgggcgctgttgagatagtgtcttctactgaaattgggcgcctgtgagatagtgtctgctaggaacattttcgtgcagattcatccaattacatctaaaatatgttatgtggcttcattgtaggccaaggatgcatgtagcaaactgagaatgaagccagaaccaagcttagagattttggctaagtggctaacagcaaggccatcttttatgctaggcatcctttggaagcaaactaagggctcattcgaaatgtagggttgaaaaaaatataaaacataggatttgaaaatacaagaatttcggacatctttgaaatgcaagattgagaaaacataggaataagaaaaacataagaatataatgttatgattattgaattcttatgggattataaaacacagaaaagtctctaaactatcgtttgattagcacatagaaaaaacgcaggaattttagacacatgaaaaggaaaacatggggtgaggcctcatacttattttcctccaaaattgctgtagcataggaatttcaaaggaattggtagaaaacaattatttgttttaaaggactctataggattatttctcataggataaaatcctctaaaattcatgtggtttttcctttgaaacaaagggggccttcataggaatggatgtctagatgaaccatgggaaaaacacgggaaacaacggtacgtgaaaagtttattagagagttaactatagtcttatccctaaaaaagcattaaataataaaaaggagaagcctgatgatgcttaagccttgcgtacgttagtgtggcatcagggcttcatttgcctcgatcctccgcaatgagaaagaaaacaaagaggtcagactggacatttttcccctgcagttttcctacaaaattagcaccataagaaagtttccaccatttttccaaagggataatcctccattccgaatggacaaacagtaccatttcctattggaattagaatcctctgtttttcttccatgaatccccgatccaaacaagccctaaacatcatgatgtataaaagctaagggcccctttaaatcatagaaataaaaaaacgaaggaataggaaaaacatatgattatgagagaaatacaagtataaaacagatgattgcaaaacacaggaaaaaatcataagaatgattgtttgattgagccgcatgaaaaacacaggaatttgaggagagataaagactcaaaggattcttaacatgaggcaaaacctcatgttaaatttcctccaaaacttacatgggaagagacattccgtaagaatttcatagctaggattccataggatttattcctttgattcaaagggctatataaaaaaaattcctataggaatgaaaccctttaaaatttctatgaatttcctttgaatcgaagggggccaagaatgttaacagcttattagtttcctgatgcatataatttgtcaaaaaatattggcggacgatagaaatcgcaatatctcaatgctatgcatgacataatgaaaacatatttcattatattggacatagcaactactagagcgatttaataatccagatcaaatgtggaaagctcctattatgttgttcatcagtagagcttctccttttccactgttacaaatggattttcttaagcttcccctcattacaattgcctgcttagtgctaagtagttacaacatataggatatgcaacttggtatttaaccaatagaaataacgtgagatgaacacaaacactttattataaaccttgtaaccatcatcattttatctgtctcatggatatatactggggaaaaactcatgcgcttatgtgtgaagcatgatttaatactattacatggatatccaaaatgaatgtaggactgttgaatagatgtagtacaaatgagcacatcaaaagttagaaattaaattgcagggaaaatgaaagcatgcacggaaatatagcatggtgcatgatgtactttgttttcaaccataaataaacagctgccatagctattgatatcatatcagcacatacatttttttgatcttttgcgattgagaacagaaactttgaatcaatgaacgcaaaattttgaaggaaaaattaagtaaatgtgacggaagctttttctttttttctttttacccaaacacagcatggagagcctcctactgtaattttccattataaagagaaagttatgtacaacaggcaaaaaataatttttgagggaaaaataattacaaggagaatgaagaatgtacaacattggttatgctaaaagtcctagctatgatgtctaagtggttttttttcttttttttttttttgctctgaacacatgcacacgcaaagcaaaatcctctttgaaatgggaaaaagctttgatgtggcaatgccatgccacaggatagcaacatacaatgtggcacctcttaccacataaatagtgttgtaatgaagctttgcggtggtaatgtcaaagaatattggcatggtcaaaaggttcaggttaaaaaaaaagtttgacattgttcgttgttaaaaaaaatgcttttttaaaaaaattaaataacaaaagattcagctctaattcacctatggggcgatacagtacatacactgcaacccgtgcaactatgcaatatatttattccctatgtttatctcttggctttgcaggacggaacacgttcttctgggtttaagccatgaactggtcttgccttttatttttaatccgcattgaatttatcttgttagagatgacacaccagagccatggcctagtccctgtggcctccaccctgactagccacttgtcaacagtaggttttaccaaacttgcaatacctcacattacatttaaggaatattggcattattaatacacaacaatttaattttttgtccatcaaacatcatttttttttaccagagagagtaaccaagtattcaaatcgcattagatgccttctcttctgcgaattcagaaacagctatctcatcttataagttcagatttcagaatgaactccaggataattgagccaccagcgaatcctcggcccctccaagcaacaatcgcccagcttcattccccctgctccagctttggggagcaggggagacagggcgggacactggaacagaaaatgaaattgcattagtccatgctgagcaaaagatgaacaaggaacgtcctcttggtgtcctagaacccctggcagggccatgaatgctcacatggaagaatcgcccatttttcgcttgcgattgcgtggcagaataactcacggtctctgaatgcacaaggtgaaaatggttccatgtgtttctggtatcccagtaggccagtatacttctgatcaatgctttgtgtggagatctctggtttctataaaccccaggatgatgatggctcttgtgagttgtgaccaccaatttgtccaatggttgtccttgctcccagctgcacatgaagagcatgagaaagtagtcaattagttgagaacccagtactgtagtactacgaataattgagctctgtgcgatacttccaagttccagcatgtattttaccagtatttatggttcaaggggcaataattatattattattactattgaatgaaaatatcgacaacaataggactgcttatttcagttgggaatatcaaaatcaactggaacactgagcattcactttactagcagataaggtgtaagttgcaaatactcctactagatagtaaagagaaggaccagttatgcgatcgatttcctcacaatagtttgtccactgatacaacatcgggtattcttaaagtagtaaaagttttgtacgggaagcataatagatggcatcaaattgcatgtcagataaatgtgatgcagataaggcttccacagaggagaatctaatgtatgcaaaaaatgcaaataaataatattcttttggaccaaactagactccaagttatgctgtagtacctaggtttttgatatgcctaaacctatgatttccttgtgtttcagtaatgtgatgctatcgacctggagatctttaaaatcataaaaaaaaaagtactagatatgtgaaatcatccaactcaggagtcaggaagcacaaaattaccgctggcacgaatttgaaggactgattagttttaatcctcggacagcagcctgaaagcaaattaaaataacttatcatgagtcatgattggagtgacaaaggtaaaaaggaaagaagggctggagagtcagaatgacctggtgatcaaaacttcgatgatcttcctgaatgatggaaaacagaaaagttacaatataagccaatcagatcttctagtctctataaactaaagcaacaatatcttgagattagccttgaaaaaagaagtcctgaactgatgtttcaaaatttgttcacacccttccttacaaaagttcaaagaatgcaaaagcatgtcacagtcttacagaatgtgaattaaaatgtcaggaaagcctcatcggacaacatgaagattcaaaattagatcggttagacttctactagtacttcataaattaattggtcacttagtcatctcttagcattaggtgtcctttttgttaaagaataaccttgacactgtaaacattagggtaataaaaaggtaaagataggaaaaatgatgaaatggagcacacggcattaaacgaattttacaggaaaaagttcaattccctaaatcagggaaattcctgagaaatagagtccagagtgtccatcagctttctatgtcatattatcttcatctattttgtgattttccatatcaatatcatctctttgggtaatgctgcttaacctcagacataaataaacaacaaatattctctttgctaatgacaactttcagtagcatatataaaaaattcaatcaatttatcactccaatgttgtcttatattcacatggaaattattataagattttgcacttaacattcgtgtccctgctctttttttattctccacaacaaatatctcctaaatgtattacagaagagaatcactactgtaaatccaggtaatttgttgtcttaatttaattcaatcataaatagtgttcaagtcgacaatgagtactcaagcataaaatttgctgaataatccagccaaaactaaagataaatttccacagtgaaaatatgagaaatcagacaacacaaagtacccatatatcattaagaaaaaatgtatgttcctatagctctaatgacccaggagacagtcagacagtatgtctgtactgaggaagaagcggaacacaccacaatcaaatgtgaagttcatcctggtatgagttgtcactgtaaaactacatcttgacatgagcacagcaacttctgcctgcaatgcaaattctcagtggaggttttgtttcttgaaaaagaaatttcttctttaaatggatggtagttcactattaattttacattcatgcttgtaacaaaataagagcagaaaaattttaccttgtaaacaagcttggtgaaaaaaaatttaccatatcataaattcataatagatggaagaggattgaacatatacgactattgatctagatgaaggtcacagactggcagctatgtaatcagcatggtccagaactataaactgccagtagggcatttattaactggttgttgctgtcatgatgacatgtggtgtaaaggccaatgcaccttgaaatagccaggcaatagatggaacatgattcagcgattttgaaccgtatagcgccaacaagagaataacaaaaactcaaattttaacaaaataaatcgaagtggctaatggatttctatcaagtatcaacccaatcccatcctagtttcctagctgcaagttgcttgcagctatgttcctcagccaaagtcaagattgctagaagctaaaattgaagtaagatcagaaaactatgtaaaggcctaaaaccagttgcacttaccagtgtactaatattgaaaagtgttcttctttcaaataagatgtttgagaataatgtacaacacataaaactgggaaagaaatttctatacttactatttgtaacaaatatgccatgctagtcaaagaaacagataagtcgtgtgctcccaatttgtgatttcagtagtttgaagacaggatctcaatatgattcaccagattaatcaaaatgcaatgggttggggtgatcacccaaaaagaccgtatggagcacttctgctgctagctaaagcagcttcctcaaatatgcattgatagtaaagaagactcaactgcccagagaataagtgacgtctacttatatctgagatagtacgcagctatttgctcctggtgagtggtgacagaaccagagcttggttcatgccaattgcagcaaaactctctgccttctatttaccaaaagtgatgctctccagtttgatccagaaagaagattattagcaaacctgatacagttgtagaacaataggaagatcccctttacccatgttactgcagattattcacaacacctgatgaactgaattagactttttcagttacacttggaaaacggctgtaaaagagcactccagcgattaacttctcccataatcacagtgaagcaatgtcagcaaaaactagctgtatcttacacagttgttgccctatcaagcattgaatagccccagtacctagccacaaaaaggtcctgccacaaggactcaaggacataaggtcctagggtcccaactctcaacctttacacatgagctgcacaagacagacaagcaggcaagatcttcaatagttaagcggtgtgcaatttctttaagcaatcaaagggggtgtcctctatgattcatgcattcaatcaaatcatcaactgctgatctctctctctctctctctctctctctctctctctgctatacaacttaccagtccatcctgttcaaatggtaatctagtatttattttgcacatgtaggacgagcaacactcaactaagcacttctgatgctgcagtgttctacattatcttacccaatgtgcttgctctgtatgtctcatgagggccattaaaccgtcaactgtttcatatatctctttcctcctcttatgccttgtatctttagccaaaaactcatgaacctcactgcctacctggattgagctacttccaggcactttctcaattccccaattacgcatgcttgtgcgtgcatcgatcacaccatcccaccttccttccaaagcactacaattagaaaccaggacttgataactagaattaaatggttctagttcagttatcttcttactgacatattctataagctctgcattaccatgtgcaacacaagaacaaagcaacgtgacccatatgacaacactaggttcaagaggcatgctttcaataaataaaatcgcctcctgtaagttacctgctcgaccaagtaaatccaccatgcacccatagtgctccattcttggttgaatgttatatcgctcaaccatttcattaaatatactccaaccttcttgcaacaaacctccatgagcgcaagcagcgagtgcagcaataaaaactgtgtcatccagttgaactccttctctgcacatattattgtagaccaaaagagcgtctctacaaagaccattaaaagcaaagccagaaatcattgttgtccatgtaatgatacatcttgtttccattttataaaaaattgactctgcccttcctacatccccacactttgcaaacatgtctatgagagcatttcctagtgcaacagtgagatggatgttgcttttaccaatgaaagaactgatccagttgcagtattcaacactgcccaattgagcacatgccgagacaacactcactaatgtcgcctcatcaggtctgaaccgtccttcaagcatcatcagctgaaatgtgcgcaatgcctcatcgtatcgcgagttgtgattgtatccagttatcattgcattccatgaaaccaggttcttcacaggcatatgatcgaacaactcattcactgtatctagatccccaatcttggcataagcagaaaccatagcagtccacgaaaccacatccttttggtccatccgatcaaacacggaacgtgcagcctccacatcaccactcatcgcataacccgaaatcatcaaattccaagaaacggcattcctagaaggcatcctgtcaaacacagcccgcgctgtcaccatgtcacccatccttgccaacccggcaacaaca

SEQ ID NO: 10313 - DNA, 16471 bp, Oryza sativa
aaccccttactcatttattaatttaaacaaccatttagtcaaaaggtatttattttgtatttctaaattatggacacccaaactaccctgatctttgggttggcaaataatatcccatcttgtaagtctgtactttttcttatgatcatccccttgccaaaagaatgttgatctataataatcaattttttgaagaaccccttttggaatctaaaaaaagatatcataaacatagctaaactagaaagaacagaattaatcaaaaccagtctacccctaacagacatatgttttcccttccaactactaagtttcttctcaattctttgttcaataactttccaatctttgttactaagctttctaaaatgcattagaataccaagatatctaactggaaaagtacctaacttacaaccaaagatagtagaatattattcataaaagtcctttgcctggccaaaacaaaataattcacttttattaaaatttattttcaagccagacaacttttcaaacacagataaaatcaatttcagattcttggcttgttataaatgtggaattaccccattaatggtaccaacatccacacttttgtagcagtgaccaagacctaagtcagtgcgttgccctgaaaattacatgcatatatgaaacagatggtgatttatcaaaaatcatatcattcctactcaaccatagagcgcaacatataacagaagctcctatgagaataagtttcctatttttcttgtccacccccagaagccaatcatcaaaaatatgagatatgcaattaggagggtaaagaccaaaagagaactatacagctctccaaataaactttgcaaaatggcattccataaaaagatgttgaatagtttcattcttcatacagaaacaacatttcaaacttccattccagttcctccttgccaaattatctttagttaatactacccctttaagcaagtaccacacaaagatcttaatcttcagaggcatcttagacttccaaataatcttatttctctcaatataaccattgtttattaaagccagatacattgaccggacagaaaattggccattctgatgatagttccatctaaaacaatcactctgttgattcaactcaatatgtacaatagaagcccacaattcataccactttgctagattctgaccaactaaagccctcataaaagaaacatttagcggaacaggtctcgtaacattagcaactgaagaacttttccttcgaacaatagcatagagagatggatacctacctttaaacactaagttatctagccatttatcttcccagaatctaacttgttccctattattcagaatccaggaacccatgtttaagaaagtattcttaactttcataagacctaacaaaaaataagaatcaccttgtttcctatcaacttgggtaatagactgattataaagatactttgtttttaataagtcttgccaaaccccttactcatttattaatttaaacaaccatttagtcaaaaggtatttattttgtatttctaaattatggacacccaaaccaccctgatctttgggttggcaaataatatcccatcttgtaagtctgtactttttcttatgatcatccccttgccaaaagaatgttgatatataataatcaattttttgaagaaccccttttagaatctaaaaaaagatatcataaacatagctaaactagaaagaacagaattaatcaaaaccagtctacccccaatagacatatgttttcccttccaactactaagtttcttctcaattctttgttcaataactttccaatctttgttactaagctttctaaaatgcattggaataccaagatatctaactggaaaagtacctaacttacaaccaaagatagtagaatattgttcataaaagtcctttgcctggccaaaacaaaataattcacttttattaaaatttattttcaagctagacaacttttcaaacacagataaaatcaatttcagattcttggcttgttgtaaatcgtgctccgaaaagatgatggtatcatcagcatattgcaaaatagataaaccatcatccaccaaatgtggaattaccccattaatggtaccaacatctttagccctcttaattagtagagctagcatatcagccactatgttaaagagaataggagacaaaggatccccttgcttgaggcctttgtaagtttgaaaattattcccaatttgatcatttactttaatatcaacatgaccaccctgaacaaaagaaactatccattgacaccatttaggagaaaagcccttcattctcaacgtttgttgaacaaaagaccatttaaccttatcataggctttctcaaaatcaatcttaaatattaccccacttttatttttacgatgcatttcatgaatagtttcatcgagaataacaaccccttccataatatttctctcaggaataaaagcagtttgagtaggactaattactttttgagcaacgccaattattctatttgtagcaaccttggtaaaaaattttaaaactaacgttaagtaagcatataggcctatactgttcaattttcatggcctccacacacttagagagatataccttcccattttgtttgatttggaacatcgcacaagtggttaattattcctcgacgctacattatactccctccgttatttttttttcgccggagaggccagaggaggccatccgaatatattaaaaagaataaagttacaagaaaaagcgatagaaaactatcgaggttgaaagtgcacgaccaaaaaccacatgctaaccacacaagcacaacccactgagagaggaacctagcactaaaacgacccccgctatgcatggccgatcgccactgggcatacgacaacaccacaagatgagactctgaagacgatgctgccacggaggtcacaacatcaaggacaccgccatcatccatctatgggagatatggttttcacccagagcaactcgccaagggagagaggtatcctcgacaaggccccaaggggggttacgatgccagaaggtgtagccgctgccagcccgatgaaccatcacgcaaggctttcgcctagaaccctgcaaccctgcatgaaattcgtcacccatgaactcagaaaccaccacacaggcagtggcaacatgaggcctccaccccatgtcaccggtgccccatcaccggctgacttccacacttgttgttccctgctgccaccctagaagctggcccatgcctccttcatcccaccacctgctggcctcctcgtcatttttgccaaaaggagaacccggacttgacagcgtcgcgtgggtggccaaagcttccctcgttaaccaactgccgcctcgatccaacctagaaactcccccacgaagaagggagaggagctccaagaagggcaagggtgcccatcagcaacaaggaagatgacccaccaccgccagctccctttgcactaccatcattacctgctccaggcacatttgcgccggtgtcaccaccacccttctcggcttcctggtcgccgcgccgacgcctgcgccaccttccgagcacacggccgtcgcgccaacgccggcaccactaccgccgtacccagccgttatttaatatacgacgctgttgaattttttaagatatgtttgaccattagtcttcttaaaaatatttaattaattattatttattttattgtgacttgatttatcatcaatgtttttaagcatgacttaaatatttttatatttacacaatatttttaaataaaatgaatggtcaaatatttgtcaaaaattcaaagacgtcgtatattaaaagacggaggtagtacttgtttatcgacatgatgagtcgagctatgttatttctgccttcgtttgataaccttatcaaaggtgagaaaatgcagagcatggatttagcttctcatgttcagttagtttcttgcattcttttcatcaaattttgtgagcgcttacttttaaaccttggccaaatattttttttaccgaaaatagcgggagaggcttataccgtactatatatattatataattatataaggaggatatttactatgcggatgtttacacagagattatgggtaaccaaactttggtttgccgattttcagtatgctagttaatttggtcgaaaattgagcaccccctgtatattatgctgcaccaaagaaagaatgcttactctgcacagtctatatattcctctttgcagcatatctacctactttcgaaaaaaaaaaacctaggtcagtcaacgagaagttttacagcgaatatatataggtggaacaaaactatttccaatttgattaacattgaaccttgtatgacagattaaacatatgttaatgcgtcgtcaaaagtgctgttttgataaaaaaaatcctgaattattcaatgattttctaaaccaatccagagcaagttaggttccaaaggtgagatcatgcacccaaactactcatgtgacaaagcaagaatatgataaaacaaaggataggataggaatacatgtgtaaaatagaggattgaaaacacagaaacttcatagaaattggaattcggataggtggtaggaaaatcacatgattttttttattattgcataataaccatcaaacacccaacaatcaaaatttacaatgatcgaagaactaggcttatttcgttgcttccaccgttcatgaggtgatttgcctgtgtgagccagccaaaaaatgagctttgagtggataatagctttcctgtgtttttcttctaaaatcacatggaaaggaatttcatattttgttttttagaaaattccttgtataccctaaaattttagctaatcctttctattcctttgaattttgcttgcttctttatatacccaaaatttgatttttagcccttccatacccctcccatcagttgagcgttagttgaccgtctaatttctataaatatgaccattttaccctttgaatgaacatagaaatttataaattacaccattgaaaatgtaaaagtttgtcgcatgacactattattgttatgagtttgctctttgatacattatttatgacaaaatttatttttagataatgaaataaaaatatgtatttattttattttttttaaaaagtcataaaaatgaggagcaatcatgcaaagataggacaacccacgatattttttttataaatgctcccgataaaaaaaatattttcctattaaatttcaaataaaaattttaatttattacatttgtttcattttagaaatttatgtcaaaattttctgaactatttagtctcattagttatataaaatgtacatgctgtgcactcaaacaaaattttcaatcgtttttgaagcttatattcaaacataaatcaccaaggacattaaagacatttgccaccaaacttaacagtgaccgcttggccatgccgccaaaaaatacgatctaaaatcgagaaaagagcaagtattcatccacttttcttactaaaactaactttcttttatcttaaatctaattctacttacttttttctaatctttttcaaaaaatctattcatgctttttttttgatccagttatgattatagactctaccaagagtctgacgaattttttgcttcatccaaatgtgtaaaagatcgtagtcgcacttaaaagccgagtactctaccattaatgaaggaaaatgtaacggcaggggtgtataagggatcaaattgaaatttcagggggtatagaagtgatcggataatttcagagatataaaattgattgagtgattttttaagagtatacaaggaatttactctatttttttcccatttggtcattcctacgaaccaaaggtatctactgtgaccattcctgtaggattcaaattcctaagtttttcctccattccgaagtggtcctcgaaagctaggaatttggcaagtatcttgaaccatctttccaaagacaacaaaccaaattttggctagccaatgcttagtttggttccataaatcaagcacctgtaacactacaaagtcttaataaacgcatatgactaaataaacgcataattcttcagttcttccagcacttatttgtctggtgctgcatatccacttcgaagaaaattaggtcaatcagcaccaaattacagcgcgtatagatggagcaaaaccatgtcttatattgtattaatgttgactgttattccagtgaggaacaatccataaacctttaggctgagtttgaaagggagtttggattttgctactccctcgtttatcatgagaaccttcccgaactatcaacggtatgttttttataaatacttttttaattaatatagaagtttctttaaaaaatcaaatagactaatttttaaatttataataattaatactctattaattatgtgctataataacttatcttgttttactgccactaaaaatcaaagacaaactttactttaaaactcagccttagtcttatatgaaagaaaccaatggcacatcggcctattatattgtcaaaagtgatgtattattacgtataaataagaaaggcgaaaaaaaaaattcttcgaccgatttctaaaccaacagcagtggtaaattggattccaaacgtggatcatgcatgactgaaatgcaattccatagatagatgatttgaactctcttttccagaaacaactaaaccatgcagtaagctgcagctgaaaatcttaggatgaaccacacatatgaagccatatgcatgcatgcaggacaatgattatatatatatggctagtagtgtttctctggtgccacttgcagtgatgctctaatgagcaagaactagagcctttttctacatgcagcgttgcagagctaaatctggaagccccaacttgaccaccatgcttggtactttgagcaaatagaatccatgtacttctccaaagagtctaccattgatgctagtcacaaagctagcttgcttccattgatgctagtcacaaagctttgtttcaagtggatccatcaacttgggccttacattacatcttgtctgtgtacgaatgatggagattgatcaccctgaaaagcaaaatattaatatatgagtgtctagtcttatctaatactttctgtgtatgcatatcatcgcatggttatatcctctgctcccttcattggatgactacacattatatatattacatttggggaaactatatgcacatgatatgtaacatgcttcaaagcatatgccaccctattgatgcatatttgtgcataaagagaaaaaaatgctagaaataattttttcacataggtcacgcatatgatcccggtactagctaaccaaactatagttaaatacaagttttatataagtaagattgtagttacagtgtagttacaatatagttacaatgtaggtacacttcaattatactacagttacatttgaaagtttttcataaaaagacttgcggtacgatttagatttactcatagttttccatgatgcatttctgattattttttagttgtaaaccttccgtgggacatcttccatataatggatacatccttgatttgtgtgcataggtggaacaaccaattatgcaagtgggtcatccaaattcaaagagaaagctgaataaagacgatatatgtccagttaattggcttgggagtttaatgttaggggtcctgcacttaacagtgtagtgtggattcatggaattccctagaattctatcacatcatcaccaatcaacgtctagaacagaggattcatggaaaatttcttgctgatgacaaatttggaatatatagaagctactgaaatcatcagattttcaatgatataatgcttccactcgaaatttgacactaccctaccaattctagtattgcaaaacataagcgcacttatttagtagcataagattgcattctcatatttagtttgctaccaatgtggagccaaattatgatattatagtgtagaatgttctaaattgataccaaatctactataggcaataccaatagcctttaatccaaagaattataagtatcatacaagctaaaaaaaataaatagtacggtacattttggtagcaaaccaaaatggccctaagtcaacatttagttgttaagtctagagaatttgatcaaattttcactcaattatgcatgcgaaccctaatattctcctccattcctgtatattctaaccctatatagacattttagtattttttatataaatatccatagggaccacccctattattttttgtcaaaaaaattagatgggagatcgaaggttgtcaatattttttatttaacactatgaagaagatataccagtatggtcgataagtagatcaaatatatatttatatatacatgatatgtttaagattagtatctgcatgtttaggcaacacaaattgatccaattatttattgatatgaatgtggttacgaataatatcttcataatatattttgttaatgtatacacatctagttgttcttgtactcccttcggtcataagtatttcatgttagatactactatacgtaaataatgatgtctcgagatactctcaactaaaggctctaggaatgaccacaactaacctaattttcatgataactaaataatgtaagcaaaggctaaaaagaacctatataaacaaacatttacctgaggaagagtattgatcatattgatattcataggaataagatatttttctgggtatctactgttgggatacgcgtaggctacaatagtataaatcaaaattttctatcgcgtaaaccagaaaccatgcaagtattagatcatatattgttaccactcgacgcgctgcgcagcggaaaaaggcgctaagaagtcgaaggaattctcgcgaagtagcgcgcgtcgatgtagaggaagtagttgatcgcaccggctcgaccttctcctcttcgtgtgttctcctcgctgtactcccacgccgatcagcaccgcaaaccagcggcgcctctaccagtatccacatgtacagggacagaacgccacgcgcagatgtgctagcacccacgcgtggctagagttttgctcggggagggaagtgacggctagagtttctcacgtgatgcaattactccgccggtcacacccctcacgaatatataggatccatcacttgggcctccaaggcccgtaggactcctattcggatccctattcgaattaagctcatattggatctccatccaatccccttattctggtccattaagcatgcgaccctgtaggttcatgtacactcggctgtaacccgaaaactccttttcggttcacgcgtcaacagcggcccctagcagaacgtattgacccaccgggcatacataaagatcatatcgactgaacctctactgtatacttgtaagaacccctttgcctcacgatatcgattaagctcaatgctagatatgtgtcatcctcaaatagctcaatcattcactcgaacttgttgatagattatataacttgtgattgactcctcaatcacctttggtatggccatacactttcataatctacaacatcaaggggcccagagatatctctccataggaggggcaaatcccatcttgattattcatatctcactacatgttttgattcatagcatacccgaaaactacttttataactacccaattacggagtagcgtttagcagtccctaagtaagctactacacatgttgggaaccatgataatctcaggtctaaggattcaacaccaacactaaatgagatcactgatgacacaacacatatggctcttgcagtgtcttatgttgcatgttcactaacatgtgtccacattattaatttggtatctctataccatgatccatgggacatgatcatcaattaatacatgtgctgatcatctaattatatttgttccacgtatgatatttgaacaggaatcctttagaaatagtaacaaacaacataaagagtctcatcaaaaaatcacatattcattaaccaataatgttttatctatttcgaggaacaatgtcggagaaatatataaacatagtatgtgatacaatcatctctatgattacctctagggcatatcactaacatctaccaacatcaagaaatttaatcaagcaatatatcatgatgctcatgtatatcagaagtactaaattatgttactgtaaccaagcaacgtaaaatatgttatttagttaattatgaaactttgttaatagcagtccggctattacacattactctattagcattgctactcaaatagtattatttcataatgatcaattatactgagcaactcattgaggcttagttaatttatgcgcattcagcatcatatcattataaaaacaaatgaaaacccacaaaacatatataagaagtagaacatttactaccacgaaggaatgaaccatatcttcagggctcaccacacacgtccatcatccatatgtagtgcccgatataatttttcaacaaagacaaatctaccggtcatatattagctaagttttgcaggatttaattaaatttctgcttgcaaaagcatctggatttaatgatatggttttcatttttcagttttgagtgggccggccgagtggcgtgtcgtcacttattagaatgaatttgaactccaaggattgataccagaaaagcgaaattaattaacgtggagaagcatatcatcgaacttttacagtatgaagttatcatcagatctctaatatggaaaaggaaaaggattgtacccctctgtttggtaattgtggttccaactttcgtaagaacaattatgtaatccttgattatggtacttaattaagaagatactaataggtatcatagtccatattatagaaatttactctgaggtaccacacaaacgtttaatttctagctaatgcaaatttgtgaaacctctcaatactttcttaagtatcataaaaacaccctaatttggtacattcaggtaacatactctctctattttaaatgtcgttgactttttaagatacatttgaccatttgtcttattcaatatatatatatatataattattatttattttattgtgatttgatttattatcaaatgttctttaagcatgattcaaatatttttatatttacataaaaaattaaataatacaaatgatcaaacgttgataaaaaaatcaacggtatcataaattaaaaaacggaggtaataatacttataaaagatgtggtccatctaaattattttacactaaaaagtgatgacacctatcaataccatgttcctatttgtgtgttcatttctactctacatgacttcagccggataaattagcagctatcagtgatttcggattggggtgtaattgagattttgaaaagccggtattttcagtaaaaaaaaaaagcacacctgtatgatttgacgtttaatactacattgctttagtttgtggagtacgtcctataaagaaaaccgtagaagatttcccaggaaagaaatggaatcgaagcttaggttaatttagtttagctaagcttgctcgtacaacttgatccattacttaagcaccaaacagtgatctacctctgcatatataaaccatggcagccctggcatttccagctgcagtgcagatcaacacatctctcatctcacttaattagcgagttatcttaacaactaaattaggtcaccattagcattagcaagctagacatataatccaaatattgttgctgtgtgatcgatgggcagcgtgtcgtgcggcagatcagcggcgccggcggcgctcgttgcacttgtggtggtgtcgtcggcgttgctgtcactgtcagctcgctgccagtgccacgccgcgcgatcttcccctctcgcggccgccatgtcgccgccgccgtcggccgtgacaacggcggcggcggcggcacgcggcggcggccgcgtgctgcaggaaggaggaggggaaggaggaggagatggaggtgaggcgggggtgggaggagacggcttgttgccgaccaacccaggcaacagcccggccaccgggcacgcacgcaagcctcccgcgtgatcatacgcatgatgtggaatatttgccaaagtgtgaagcaaacaaacgtacgacacgctgcgtgcgcgcgcgcgcgttaattagatagctagctagtttggacggaataatctcgatcgatcttgtgtgtgtgttgttcttgttggtttcgcagtatattttgtttgtgtttaatttgcgtctcgtggtttgtaagagttattctgacttcgtggtcgctagctagctagctatatatttatatcgttgtttgtgctcaagagcatagttatgatatgtaaaaaagatatatatatcgcatgtacatctatattgcaataaaaagacggtggttaattagtatattgtattgggaaaataccgcataggtgtctatatttttctccggtgatctttgaggtggcgggcatgggaggtggcgcgctgcaggggtgcaaccggtggtggcaggctacaactgctacaccccacctagcctattggatcccatggagaggagagaaggaagggagaagaagatgagccaccttcaagtaatcatgtccctggctacgctctttggaggctgccgcttcatcgggcatcgagccagccactcatcttctggtgaaagtggtgggtacaggtgattggccgccgctctagccgatctgtctcctaatccggctggccactaccatcgtagtagtgagcttccctttgagtatcggcatcggtaacgcctgtgggtgccacacatattcctagaggggtagtttccacgattcttcactcatacttgccatgaggtggacactcagagcgaaaaatgtcacaaccagaaaatcacatttcccaatcactactgtattaatccgcgtcctagaaaaaaatcatggtatacctcaacgaatttgatgcgaaagacacatctttattatgttgataatatttatattattataaaggccgtcagacctaacaaacaaaaataaacaacaacagaaaaacaaacctatatttccatcatcacatgcgctcaactagggtataagacaagactctacctaggacttcttctccaaagtttcacttactaaagaggaaaagattgaacaaaaatgaatataatcatcgtactcagcaagtcacaccgggagatgcatgattaatgcaaggtggtataatgaatagtattacagggttgagttttgcaacaaacaatcatttcaaatcattttaggaataaaagtcaattttagaaacatgttcctataatccaattaattatcaaggtcacgacccatgcgaacctacattaaaccacaggccaaaaacagattaaaccggccaagcagccttgtaccagattctaaatcgtcctaagccataccaggccaaccattccaagttttagttagctaactagattatccaaattttaactactaacttgagtacattactagggatgcccataatcgaggtacaactattcaaataggttttactatgattagaggtgtatatctttacccataagacacgccttcctcacatgtcaccacgtgcctcataccaccacggtacatggacggaaaaggtggcattgttctttactcatcctagccctgaacaaggggactgacacaaccccattctacagccaaggaccttgtgacaggtagaggttataattgcgtcccaaagcatcagctcacccatattgggagtgactactcgagtgatcttcctttgccacaaatataatctaggttatcgagctagctacttgagtagctttcctttgtctctaagacaatatccatcacaccagacttcgtctgcttctattcgtgtcccgatgcccaatactagactgagctacaaagtacgccttacccacactagacatgtggtagtacagtaatattttacaacagaagctcgagattaatcctcatagcggtcgaggtatggttttgggagttttgaaaggggaagagagtgtcatgtgaaggatatacctcctaagttccagagttaccataagtgatctgaaatagctcccgaaagtcacataataaaacatctacgtgttgctaattaagcatgctaagcataaacctaaaaggtctaataagcgccacatatatagttcttactaaccggttcttgttacatagggttgtcaagaaatagttaagcaataacaaccaatagggccataacaaggaataataggcctagctaagttaaacagttattcatcgaaatttaatacaacaaagtgcaataatttaaattaaaataacttctgtaaactgggattcgatatgctcaaggagagcatgacttaccttgctctaagaaaagggtcttctgaacctttaacaacaaactcaacccacactacgggatcctccagaatgacagcaactacacgaagcacacaaacaaaactaaaaccctattcaagaagcaataacaatacctagaaagcacaaacatggattctttatgttataaaaaaagttaagagaattgaactagttgattcagagatcatatgaccaagatcatctaaagtttaatgttgttatgacaatttacgaattattgtgattaattttagatctgtagaacatgtctaagacatcgacccaagaagaaaggaagagttgagttgttgacatttggaccttacatgtcaatctctagaccacagtagacaaagtgcatagaagcagtccgcggatctacggaaggggaacctatgtgtcaaccggaacaaatgaccgacaaatagatcccactagatgccacatgggctgcacatatgggcaaccacatggcgctcacatgagcatgtggaaacactgtcatcacatgtgcacatcactgcggcacgagcgaaagctgacaccgacgcacgaccacgtcccatcgacaaacaacagtataaggaaacaccaaaatgagagaaggcctgacgaggggatgatgagctcacgaacaggactggcacagtgaggagacaacgacgatgactgacaacgaatggacgaggacgatgtagacgaggagatgactttagtgacgacctagcggcgtaggcaaggcagtgctagagcatggcttgatgacgcgatgccgaaggttgtgatgatgaggtttggcagcgcgtcgacgaggcgggaatagcgactagaggcactccagcttgatagtgaaagacggcgatgaggacgatgttactgtggcagccttcgggcgattggagagcgaggttgaagtggagttcagcactgcgaagccgaaggcggtggcggttcagccgggcaacgctctggcgagaagaaacaaccggccagagttgcattgcgagatagaggaggaaggcggcgataatgaatgggttccggcgtgctttgggcgaagccgaggggtggccggggaaggagatggtgacgtcgggcagcactccaacaaggtagagtgaggaggatgtcgtggagagacgatgtagccaggagggaggtggcaaaacagaatgatgggagggagagagggctctgttttataggcaaaggagggagatccggtgatggaaagtgcggattggcagtggcaatcatgccgagcagccatcaatgccagcaaggaaaggcgcggccatttcgggcgtttcgatacacacaattattggggggaaacttagggaaaaaaataagaggaatgaaaggggggttaaaagtccccagtcaatttggaagcatgggatttaattcgggtggattttggggagcaacatgcagggtttatgttagttttatctttctagaaactctaaaaattgttctgattacataataattatttcttgtgctctgagtaacgttttagaccatggagattttagggggaaaaaaatactccaaggcacatttgaattctacttgtacgtatttcattgtttgtgatttcttttttggcttttaatacattctattattccatttcagaaattatttttaattgggataatttatcacgacatgacaaaaatcttattgtggatgtccacaatactgatggtgatatttcaaatgtcacgacctgttctgatggcatcgaaggtttcctatcggcgagttgtctagtactccgtatgaaatagtgtctccgtcagattggggaagcgggaaaggggaaacgatgatccgcatctgaatt

SEQ ID NO: 10314 - DNA, 17486 bp, Oryza sativa
  unsure (1)..(17486): unsure at all n locations
tttaaattcaaattcaaactgttcaaaaaatgttatatagaaaaatgaccaaaataaaagttatagatcttaatgagttatacaactttgttgttgatgactttttcagttgaaatcatttagtattctaaaatgttgtttgaagttatcatattttcgaattcaaatttaaactgttcagaaaatgttatatagaaaaataaccaaaataaaagttatagatcttgatgagttatacaactttgttattgacaattttgccatttgaaatcatttactacccgaaaaattatttgaatttcttatattttaaaattcaaattttatatagttcaatcaaacccagatggagaaatgaccaaaataaaattagtagatctcaatgagggatgctggggtgtggcatcttggcccaggacttaataggattaatagaatactcataccaacaagttaccacttcttatttctaaagaactctgaggttaagcgtgcttggcctggagcaatttagggatgagtgacttgcacaagcctggagcaagcacatgagtgaggacaaagtgtacaacaaaaaagacttgcctggcctaggagaggcgggacgttacatgggatttcttttttttttttgtggattatactcatccgtgacgtgctaatgagagtcatccgtgacgggcttttttgttggcccgattgaaatgtgtgtcatccgtgacggtcgaatgccccattgagatatttcaccacatcagtgacctttgcttgacggggcccctacccgatagagatggggcttgccgcccattacaaatgactgaacccgtgctagtggtcataaccatatcataaatatcaattacttagatgagcatggttccctatgatagatggttgttcacaagtgacaagtggtagcaaagaataaaaggtatacacgattaatcataggaagattctatttgttgagagttaatgttttcaattttcattttgagtcaaactaaattatatttaaactttcgatgcaggtttgacttacaaacaggggaggataagggaggagacgcgcaaacctgaccacacggcgaaagggtgacagagccaggctaggcaagggtcgggtgaacacttggtttggccaacccagccaggaattggttctggctgctgaattttgtgcacagccgtgggccagcgttcatcataccatcatgtcaagttgatcttgttgcgcgtcgggagttccgaaaagactcccccacatttgtcttgtaccttttctttattcaacaaaaacataaaaaacaaaatgggcttccatcgggatgaaacaccggccaaccaaactttattcaataatcctaggcgcatgaagttcctaaatttattttttttatctttatcttgataatttttttcatggcaacaatgagcatggtgggtatcttagcagggtggagatatgatgcacaaggtggttgagattcttaccggatagttcttaccaagcttagaactaaatcgaatgcaacaaagttttgcatttgttctgcttggttccatgtgcatctttgttttctcggagaccaaggagcgtggtatgagtgttgtagttattttacactgctccttagttgtctttttatttactgcaaaaggttagtggacaacaaatacccgagggattacaaagaattggaaagattttatcataccctcaagatcagttgttcacatccatgctaaaaaggaattgaattcaaaacttcagaagtgtggatctcacaaatttgccataattttattttgtcatcatttttttcgagagacactttattttattcttgaaaacaaatatatatatttttcatttttttattgttcaccaaattttcatttaagcaaaactcttgcagggctgaggtaaatttgcctgaacaaggtaaaggagcattcaacaatatacgcactgtgcaccttgagaggtgatctatttctcttttgcatgttagcaattgctttattcctggccctgtcctacctctagtgtgactcgtgcatgagaactcacctcggttgacggaactcgtcatgaaaagcttgtagacctccccccacacacacacttggacttttgtgtcataagacgtcaaaaaccaagtgtgagatgttggggtctcttgtgttgcatcgccaaggatcaccaacgtgctcggttgatgtagctcttgcattcttaggcatcgtatgaccctcgttcttaatctcaacctgtgattgttagtgaccaagaataccggaatgtgcatactattctaaaactggtccttgccttcattgaaaaaaaaacttgccatgataatccggggtaactcctggcagtgctttgtttatggtcacaagctcagccatagagacatcttgctgcaaagttagtgccacaaacacatacgagatttgcaatagttatgataaatataagcatccacaaccacacttctaatcatgttagaaatgatggccaaaaggcggttgtggtcctcgcacaagaaagcgatactaaactaataggaccctggggattccttatgtgagcatgaatcttggggaattttgaaagagaagctttcatgctcaaagtgccgttctcatcctccagagttgatgtctcaagcttatccataacccaaaggttctccttctcaagagatgcatcgtgcaagaacgaggttgtttcttgacaactgtcaagaacaacatattgagggccagagagataaggttttggctcgattggaggtcatgatggtggttttatggaatgtaattcaaagatctcaaccgactcttctttttcttggataaaatccagagcgtcttgtttagaagatgatttgagcagctaaaatggaagaacaaccattatgtcctccccgatatcttcttcaggaagggtatcagtcaaggcttttcttgactgcgagaatggaacaaagaaattgaccctcctaaagagaatttgaggctacctaatcgaggagtattgatgagaagtttctcgattggatgtcttattagaacatcaaaatcttggatttcaaaaacatgaataatccaagattgcctccttgccatcatgaatgacaggcacgtcttgtacaatacctaattcttcaataagactcccgttagggtgctcgaagaatttgtttgtcggtgtaattgccttgtcactcagaatagtgaatacaaaggattttgagacaatattggcacagactgatggactgtaaaggataccaacattattcccttctaagtgatagggaatggttcgaggagcgatatttattagaattacttcggaagaaagctctgcctcctttagccattcgtcactcatgattgatgtcagctcccgaactgtttcctttagatatccatattctattggatcgagagttggctagagaataggtggccgtaatattcgagaagatcgtccctgaatttgggagcacatcccggatcatgaatttcttcaatatctggagatagttcccgggaggattcctcagttagatctgatgatgttgacggttcaggttcctccgtacctgacacagatgcctctggagggggttcaaatcactgcccgaaggtatttttggatattctatcgagaatttcctttccttcgacgggggttttgtgcatgaatgacctccagcagttatgttgaggtaaagtgcagactccttatccaaacccgtatggaaatgttgcagtaatgcaaaatcgggtatggcaaggttgggactagactgtaccagagtaacaaatctggcccaagctgcacctattgatttcttattattctaccgaaagctgaggacttcgatccggaggaaagtaatacgactaacaggaaagaatgtgaggcacaaaatctgtctcgcaattcattccagctaccactcacactcccaacggtgtaaatgtaccattgttttgctctctcttgaagagagaacggaaacaatttccatttaatagtctcccgtggcatgccttggatcaagaggcacgaacacagatgctcaaactctcgcaggtgatgataggagatttcctggtctagactagagaaagatttctccctaaccgtaatgatgaattcgggacgaatttcatagccaggtgttaaataggctccgatgaaggaggtggctcgtaaaatttgccccgtggagcagatagttgaaagatatattgtggctccatgggcgagaagagttttacaagaacatttctctgggtagcaggggtgaaggtagaagaaagaaaagtaaaaaggatatgaggatgaacaaggtgcagagataaacaacaaccgttctccggcaacggctctagaaatgcttgttggtatttcttaacgtcgcagatagaatttgcaagcgcacggaagataccgatgtagcacttgacccgagagtattccaaggtatcgatttctgcagggaacgtgtgtgttaactctttaccaggttcatctaaggacacgaagcaaagataggcaaagggtagagaggatttactagtgggagacaatgtctatggaaagcttaatttaatcctaacgcgatacttcgggcactggccagcccgctgctcccagatatggctctaccgcgtactcggacagggaggacttcagtgtaattgagggttgtcaccaactctacacccacctcaaacctactatgggatatgaagcaatcactggaaattaactacctagacaccgcgtctatgatattaataactattctagtgccggccaaacactaatgcaatcattataaattaatggactatagtgaacaatgatcctgcatgctaattaggaactaaccaataattaattctcacaaagtaaatcttaattactcagaatgatatttctattaaaccagagtaattaactgtcggtgacatgggatcaggagtatcatgactagaggtttgaggcagacacaatcgcacacgtggcctggtacccccgagggacgtcgggcccgagggtgatgcgttcgccctcctcttagtccccccgagggggtcgggccgcacccccctcggccccgagtgccgaggcgccccgacccctcgtgggtttttgctccgcgtgtatgggttaggtgagcacagtggggctcacctaaccacatttattgcggtttggctgagcgtgtcacgccgcatgtaacgcagtgcagtgcacttgtttatccggtctgtgaccagtcacagaccggtcagatcgcgggttaggtggcgacaggcgatctgacgcacgcctcgccccatcccgtcaggacgagggcttctaggcgctcgtccccagctggagctagcgtgttacctcccagagatggcacgttagtcctggtcagatatatgccaggcttcatcctaaaccattacaggcaagatgttgtgtgaagaagggcgagcatgtagattgctaagctgacacgtggtggacaagaatgaccgacgtgactggtctgataccggtcatgtcgtcagcagacagccacgattccacgtcgcacctgctcccggcgaaagtggaggtagttgtgggccgtctcatcagaaggtgactcggacggcaactatacaaacctccgtccatttatgaaaaggggggggggtaagtccccacaaaaaagagagaaattgtgcatgtggtatccccttaagatataaaaggaggaccttgcccactgagaggggggactggacttttccagattagaaacccagaacaagggagaggctggctgatactttgtagctccttcatacacagatctcccaaaacacaggagtagggtattacgcttctcagcggcccgaacctgtatacatcgcccgtgtcttgtgtgtttcctgtctcgcgagccttccacatacagagagcttagaatctctccctgagtccccggccgaaccggcaaaggggggcctgcgcggtctcccggtgaggagccccacgctccgtcatctggcgcgccaggtagggggctctgcgagggattttctgagctctcgcactctttcgtgtgcgccaagtttttcctgttcagcccaatggccgagccagcaaaggcgcacgacctctccccgagtatgagcggtgacgacggggagccaaacccacgccgtcgagctcgtactccaccgccccctccacgccaaagtcctaggcgggagaaggcgctcgagagggccgaaggatccgcgacttcgacacccacaggaggtggagaagggcggcgagatggggagcgtcgcctcctcgtctacggcgacggcagcacgccctagggcgcgctccaagctgcgggcgcgctcctacatcacccgcccgtcgcccatgacccggagtctccagcccaacgttggctggacgatgtggccaaattggtcatgactgcacggcagcgcctagatgctggtgggcggtcctccgccaccaaggcctctggtgctgctaccaccggctccgcatcgtcaagacggagggcgcggcgagcggcagccgctgttcgccattcggccgccactccttcgtcaacgcctccgacccgggaagatctgcgtggggaaccggatgctcgcatcagtatcgagcgccggcgtaatggccgacgtgctccccacgcaacggagggcgcctcctcgtccggagtgtcacctcaccacggacgcggggatcagccctccgtgcccccggttggtggtgtcggctgtagagcctttgtgacgagccttcggaatgtccgttggcccccaaggttccggcccaccatcgccgaaaaatatgacgggagcgtcaaccccgccgagtttctccaggtctacacgaccgggatcgaggccgccgggggtgacgacagggtcatggcgaatttctttcccatggccctgaaaggacaagcgcggggttggctaatgaacttgccacccgcgtctgttcactcttgggaggatttgtgccaacagttcaccatgaacttccaaggcacatatccgcgtccaggtgaggaagcggacttgcacgcagtacagcgaagggatgatgagtcacttcgctcgtacattcagcggttctgtcaagtccgcaacaccataccatgcatccctgcgcacgtggtgatttacgcgttcagggggggtgtgcggcacaaccgcatgcttgaaaagatcgcctccaaggagccccagactaccgcggagctttttcagctcgcggaccgagtggctcgtaaggaggaggcatggacctggaacccctccggttccggtgtggcagcttcggccgcccccggatccgccgctcagatagggcggcgtgacaggaggaggaagaagaggtcagcccataccgacgacgagggtcatgtcctcgccgtcgagggcgcttcgcgggccacccgaaaggggaggcctgcgggaggcaaaaagaacgaggccggcgctcccaacagggagcgcccaaccggcaagtggtgcaccgtccacaacacttcccttcacgacctcgcggactgccgtgcagtcaaaagtttggctgagcggacgaggaagtgggaggaggagaggaggcaggagcgccgagagggcaaatccccggcggttccttccggtaatcggcgaagtgaggccaagcagaaggcccccgccgaggacatcgatgacggcgatgatgacctaggtttccaagagcctggggccaccattgccactgtcgatgggggagcgtgtgctcacgtttctcgccggagcttcaaggccatgaagcgagagcttctggccgcggcccctactcatgaggcgacgtgtcgggcgcggtggtcggaggttgccctcaccctagaagcttgcccgcaggtacaccgaccacccaccgtgcgttgcccggggagggcagattgcgatggtggtttctcccaccgtttgcaacgtgaagttggggcgtgtcctcattgatgggggagcagccctcaacatcctttcccctgcggcctttgacgccatcaaggccccggggatggtgctccggccgtcccagccaattatcggtgtgacgccggggcacacgtggccgttaggtcacatcgacctaccggtcaccttcggtggatccgccaacttccgcacggagcgggtgaacttcgatgtggcggacctcagtctgccctacaacgcggtcctggggaggcccgcgttggtgaagttcatggcggcggtccactacgcctacctacagatgaagatgccgggccacggtggccccatctctgtccatggcgacctcaaagtcgcgctcgcttgtctggagcagcgcgcggaccacctcgccgctgcatccaagcccgagggtggcgacgagaggcttggcgcttccgccctcgccaccccgaggcaacggatgatcacaggcgacgaggtcccggtcaaggaggttgccctgggcgacggcccgtccaagaccacacggatcggtggtcttctggacggcaaataggaagacgcgctcgtctccttcctgcgggcaaacgctgacgtcttcgcatggagaccggcggatatgcccggggtccccagggaggtgattgagcaccgtctcgccgtgcggccgggcgcaaggccggtctggcagaaagtgcggcggcaggccccggaacgtcaagccttcatccgcgaggaggtggcacgacttctggaagccggattcatccgtgaggtcatccatccggagtggctggcgaacccggtggtcgttcccaaggcgaacggcaagcttcggatgtgcatcgactacaccgaccttaacaaggcatgtcctaaggatccttacccccttcctcgcatagatcagattgtcgactccactgcggggtgcgaccttttgtgttttctagatgcatactctggttaccatcagattcgcatggctagggaggatgaggaaaaaactgcgttcattacccccataggaacctattgttatacgacaatgccctttgggttaaagaatgcaggtcctacttttcaacgtactactcgaatttctttgggtaaccaattaggacgtaatgttgaggcttatgtcgatgacttggttgtaaagacgcgcaaccaggaaatgttactctcagatctagcggaaacttttgagagtctccgctccgcccgcataaaactaaaccccgataagtgtgtgttcggtgtacctgcgggcaagcttctagggttcttggtctctgcccgaggcattgaggccaaccctgagaagatacgggctatagagcggatgcgccccccagcaaacttagggatgtgcaatgcgtcaccggttgcatggccgccctaagtcggttcatatcgaggctgggagagaaggcgttacccttatttaagcttctcaaacgctccggaccgtttacctggacggaggaagccgaaaatgccctcacccagttgaaggcgtatctaagctctcccccagttctggtcgccccggagccagacgagcccttgttactctacttagcggcgaccccgcaagtagttagtgcggcattggttgtggagcgcgatgagaacaattctcatttcacgcttccccaccctgtgccgacttggcccgggagagagcagggaggagaggctcccgagccgaacggtggcccaaggcccccgacgaccggagttggccctctgcccgcttgtcagacggtgctaggagcccccgacccccaggaaggccctgaggccactgtgggaaggccgcacctatcgcccttcgaccccgaggctaaccctgtgctgacccgacccgggaaagagcagggagaagaggtccccgagccgaacggaggcctaaggcccctgacgaccggagttggccctttgcccgcttttccgacgacgccaggagcccccgacccccaggacggccccgaagccactgtgggaaggccgcccctgttatcctccgaccccgaggtcatcagcacagaagataagtgcgcctcgcgaggctgcttggacgaagagtgccccagggatgcggcccctagcgaagaggatcggccccaccgaaaggtgcagcggcccgtctactttgttagtgaggccctccgggacgccaaaacccgataccctcaggcccagaagatgctttacgctattctgatggcctcgaggaaactgcgctattatttccaggcgcatcgggtcacagtagttacgtcttaccccctcggtcaaatcttgcataatcgagagggtacaggacgggtggtgaaatgggcaatcgaactttctgagttcgatttgcactttgaaccacgccacgctatcaagagccaggccctcgccgattttgtggcagagtggaccccggctcccgagcccgtctcgatccccgaggccagcacggacccctcgcagctgcctcacaccgcccactgggtgatgcagttcgacggctccctgtctcttcagggcgccgatgcgggggtcacgttgacctctccgagcggagacgtcctccgatacttggtccgcctcgactttcgagcgaccaataatatggcagaatacgagggactccttgccggactaagagtggcggctggactggggatccgccgcctcctggtgttaggcgactcccagctggtcgttaaccaagtctgtaaggagtaccggtgctctgacccgcagatggacgcctacgtgcgccaagtacggcgtatggagcgccattttgacgggattgagcttcggcatgtgcccagacgggataacatgattgccgacgaactctcacggctcgcgtcctcgcgagcccagaccccaccgggcgcctttgaagaaaggcttgcccagccgtcggcgcgacccgaccccttaggggagacggatgcgcctgaccggcccccgaggcctgtcggagtccaggcctcgggacccgaggggagtgctcccaactcccttagattgattgcttggatcgccgagatccaagcatacctcacagataagactctacccgaggaccgcgaagggagtgaacgcgtccatcgcatctccaaacgctacgtgctggtagaagggaccctctatcggcgcgcggctaatggaatcctcctgaagtgcattcctcgggaacaaggcgttgtgcttcttgccgatatccatgaaggcgaatgcggagcccactccgcctcgcgcaccttggttggtaaagcttttcgccagggtttctattggccgacagctcttaatgatgcggtcgacctggtccggcgatgtagagcgtgtcaattccacgccaagcaaatccatcagccggcccaggccctgcagaccatactactttcgtggccatttgctgtctggggactcgatatcctgggaccgtttaggcgggccccgggcgggtttgagtatctgtatgtcgcgatcgacaggttcactaagtggcccgaggcttatccggtcgtcaagatcgataagcactccgcacttaaattcattaagggcatcacggcccggtttggagtgcctaaccgtattattacggataatggcacccaattcactagtgaactcttcggcgactactgcgaagacatgggcatcaagctctgcttcgcctcacctgcccaccccagaagcaatggccaagtggagcgcgccaatgcggaaatcctcaaaggccttaaaaccaagaccttcaacatactcaagaagcacggcgattcatggatcgaggagttgccagcggtgctctgggcaaaccgaactacaccaagccgagcaaccagggaaacgcctttcttcctcgtctacggcgcggaagcggttctcccatccgagctcaccctgaggtctcctcgggctaccatgtattgcgaggctgatcaaaatcagcttcgcagagatgacctcgactacttggaagagcgaaggcggcgcgcggccctccgagccgcgcgctaccagcagagcctgcggcgctaccatcagcgccacgtccgggcccgatcactctgcgtcgacgacctcgtcctacgccgcgtccaaatgcgtgctggattgagcaagctttcaccaatgtgggagggtccgtatcgagtggtcggcgtcccccggccgggctccatacggctggccacgggcgacggcactgagctgcctaacccgtggaacatcgaacaccttcgtcgcttctacccctgagggggggggtcgggtgtcaggtttcgggctcgggccaaccccgcacccccctcgggcgtgcagggttggccgggggctacaacatatgcatattcttatttctcttatatctgaatttctataaaagcagtttcaatttcctaaaggctgtatctgtgctgttttttccttttgaagaatcttgacttgaaataggtcactcgtgctcaatcctgccctcgggggctcgggtcggctaaaatcgccaaacggggcccagaaccgagccgtgccccgaggcgtggtgaactccgggggggaatcggcaaaaacccacaatcgggtcacccataaccctcggtcaccacgttcccggcctggccagtctcgacatgtggatctccccaggcactagccccgacccgcgccttttgaggaccagaacctgggcacaagcccttattcaagctaagacacaaaaggaccacgacacagatcatcctcatctcatactcacagcaagatgaaattaacacaaaaatttcttcatttttgattacagattaagttgatctatacaaaaaagaggcccgaaggccttagaagaaagaaaagaagaaaaaactgaagaatggcgggggtctgggggctcaatccgatgcgcccggatcgccggcctcgacgtcactgtcgtctgcaccaccggcattgccctcctcgtcggagttgggggcgaacgcaagccgaggggccgagccctcgaagctgtcgacgatatggtcggcggcatcctggacctgcgcgcgcgcgcggtcctcggtcccaggagggaactcatccagcgccatccatggagagaaattggggtctctggcctggtaactcgccaggacgagctccaccgctccttgggcgaggtccctcgaggatgacttaattgtcttctcgagctcctcggggagccgttggagagccccggccatcttcgagaggcgctgggcgaggcctccctggttggcggcgtactttacggtccgccctctccagaggcccacttgccgaccggcgcaatctaggcgggagacggcgtcccaaagcatgccgggccctacctcgcctgccaagcggagggcttcgacctccccggcggacgagtccagcgcgccctgcagatcggcgatggtgcgttcggcagctgcgaggcgggcggctaagtcgctttcgcccgtggccgccccgccgctgcgcgccctcgcgtccagctccttcgcccgcgcctcgagctcagcggcccgttggttcagtacggccctctcggtgcgggcaccttccagattgcggcgcgcctgctcctcctgcgctgcctcgcggagggacaggttgaccgccagctgttgcgccgcggcctcggccccctcgagagctcgctcccgttcggtgagcgcgtcctcgcggaggcggagcgtgaactcttcttcagcgcaggtagcctcgtgcgccgccagcgttgcttcccggatggtgacggcggcctcgcggtccgccagatccctctccacgacgcaggcgcgctcttccagcgccatggcgcgcgcctcaagggcctcttcgcgccgccgggacgccgcttcggtctccaccgcccgctgttctcgggcagcggcagcgtcaagcaccccctgggcggcgtcgagcttcttccctagctccgcctcccagctcccgtattgaaggcggagggtgtcctgcgcctcgttcatcacggtggtggcaatgagggcagccccccgctcctcctccacttccttggcgatctccgccagcaccttcttacgagtttcaagctccgagacgtgccggcggtgagccttacggcccacctccaccatggcctccaccgagcgtcgccctcttcgacacgcgcccacgcggcgtcgagctccgcccgctctgcctgcaggacctccacctgggcacttaacccatccaacaccgtggtgtttgcggcggccaaggcctgcagaaggggctctgcgttcagtagggcgatagaaggcgtggggaagagccgccttggagaggatgccacgcggctcgggccgccgatggaagtgccggactcggggatgtcccccggacccggttggtcctgagcgtcgcccgagggagtaggcccaagcgacgcgcccgcggcctcgtcgccagctgccccggaagttgtcgcctgagtgtcgcctgagggagtgggcccaagcgacgcgcccgcggcctcgtcgcgagctgcctcggaagtcgccatcgtctcgtcctggcgaaatccggcctcctcccgagcggcttccccggcctggcgggcccgggcggcctcctcccaagcggcttccccggcctggcgggcccgggcggcctcctcccgagcggtttcctcggcctggtgagcccgggcggcctcctcggcttcccgtaggagatccgcggcctctcgccggtcagattcccgcctgagggcctctgcggccgccggatcctcggcctcagactggccggacttggaatggcgggagggacgcgacgggatctcgctgaaacgaaagaaaaaaccagaagacgaacaagatgggtgagtgaaaactcgcgttgagagaatgaatacagccacgatgggagagagacgaacctgcgagggggtcggttaaacgaccactttggaggggaaatgaggtttccccgagatggttctgtctcccccatcttacggggccgcttcttcttgcgctccccctcgggctgcgatgttggcgcagccccctccgggcgcctgttactggcacgcgccgccgcgccccctcggggaggagatgggggaggtgttcctccctgcttcctcttcccccgggcgtcggcagggcggctgctccccgggcccctgtcgcgggacccagaagcacgaccccctctcggggtagattgttcccccctgcggctcccgcctgcgccgtcgtggccctttggagctcgctcctctgaggccccgaccgccatcataatggtcaggatggaggcgcggtctggatcgctgcagagggggaggattccttggggaatgagggccgcctctacggagttgagattcagcacccgttggaccaatatcttgaagtcctcaggagcccagtcccatctcactccctggtgggtcctcgtgaagtcttcggacccggtgtactcccaggcgccccgagcgcgtcgctggagcggcgcaatccgacgacggaggtagtcgccgtacaccatggcccctgtgagcccctgggatcgcaggcccgccaggcggtcgaggacggcgtcatagccatcccccagatctaccggcgcccgccagctggaggcctgcaccgggggctggctcggaagtcggaggcgcgcttcgtcggcgaggggagtgtagaaccagtcactcttccagtcgtcccacttcttgcggagggcgcaggggatgtagcggttcagcaccggcccccgtggctggaagtagcagccaccgactaccgatggcggcgacaccgactgcacggtgaagaaccaccggaacagccgaagagatgggcgcaccccaatgaacatctcgcacagatgcgcgaagatggccaatgtcatcaccgcgttgggggtgaggtgcgccatctggagatcgtagaactccagaacatccatgaagaaagaagaaaatggtggaaccagccttgccattgcaaaggggagaaagaagacggaccgccccgggtagtctggcgccgggcgtccctcgcccagcgtgactatctcctggccggtggcagattccggcatgaagcggcgcgacagcctagcctgcctctcgctcacgatccgggaaggcggcagcacgctaccatcgagcagagcggaaccccgtgccatggcgccggaggaagagaagattaagagcgagcgcgtgtggcgaaggtagggcacaggaaagaaggagttagggcgcaagcggcgaagacaaggggaataatggcgaaaggaaggaaacagatcccttcctcagtgcctttatactcttgccaacgctgtgcccggctcctcgcttctcgcgcccactatttcgccccctcgtttctcgcgcccacgcttccactaatcccattcgcccgcttgcggcgcatgaggtgggtatgcggttgtggcagtcgagatagatcatatcgtgcgcgcattaattacgctcgccgaccgaagcgacgttaccatatctttagacgaaacgaatcgccatgtccagattcgtgtgctactcaagtaatgtggcagtcttgaagagaccgctcattgttgacagcagagttaccattgccgatgtgcgtggtttgtgaccgttggttttctgcccaattgtggagaccggtcccacctgtcaccaggtcttaagagtggcgtcacgcccgaccgtttcccttaaagagggcgatcgccctggcataacgccgggggctactgtcggtgacatgggatcaggagtatcatgactagaggtttgaggcagacacaatcgcacacgtggcctggtacccccgagggacgtcgggcccgagggtgatgcgttcgccctcctcttagtccccccgagggggantgtatgtactgtatcgccccataggtgaattagagctgaatcttttgttatttaatttttttaaaaaagcattttttttaacaacgaacaatgtcaaactttttttttaacctgaaccttttgaccatgccaatattctttgacattaccaccgcaaagcttcatacaacactatttatgtggtaagaggtgccacattgtatgttgctatcctgtggcatggcattgccacatcaaagctttttcccatttcaaagaggattttgctttgcgtgtgcatgtgttcagagcaaaaaaaaaaaaaagaaaaaaaaccacttagacatcatagctaggacttttagcataaccaatgttgtacattcttcattctccttgtaattatttttccctcaaaaattattttttgcctgttgtacataactttctctttataatggaaaattacagtaggaggctctccatgctgtgtttgggtaaaaagaaaaaaagaaaaagcttccgtcacatttac

SEQ ID NO: 10315 - DNA, 18430 bp, Oryza sativa
aatcagtcctatgctaatcacgttaagtgcggctaattaagaacttgacaccgcaacgctgtacgcgggcgttcggcgcggctctttcatcctacttatatatcctagggtgtagggttttggtcggcaccgcctctcctcctcctcctccttcttcctcgcgccgcgtctcgtccccctcaccgccgctccactgccccgccgccccgcactaccgacgatggcggcgccaccgaaatggcccgcccgcgtggtgcgggagacgtttctttcgagtcgaaggcgcacacccggtgttccccgagcaccatcctcgccgcaaaggattcccctctacttttcgccgacgccgagatgaatcagttcatgccggtgctcctcgacaccgctgcacaaggctcgcagctcggatgcccgggacacgcctgcaaatctctccgctgtatccccgtcgccgtcgatgataggcacctcaccttcaccgaggttctggggaactggtcctttggggactacttcaaggaggaggcaattggatttgcgtgggagctcttgactaaggtaacagttcccccccgcccccccacccccctgtcttagtctcttctccatctatcttgtgttcatgtgtggatacgactgggctatgcaaatcgtgggatttggatttgtgatccactagtgtcttgggtggcttgcgattaatttttgggctgcagatttacctgatgtgcaggagaattggggtatctagttcttccgcaactgaagggatttagggacgttgtatacagtggaataatgactagtttttgtttttttagggcgattttttttaattcggttttctacgattgattgaaacataaaaatggtggccaatgccattgttttgggatgaacgtttgattttttttgaagatgaaaaatgtggctatctgcaattaggagaaacgccgtttatatgtcacttaagttgatgtgttgcttctcgggtgaaacagttgaaggtgcaatctattaagttattaaaatgcattcattggactcttgatctggtctgggacctatatgttgcattcatggaatcatgatctggtcagcgacctatatgttgtgtttgctgattcagggcatatgttgtgtttgctgattcagggcttcagactgtaactcctgaatcattctctgatatgcaggtctacgaattggaggttgatagaatttttgtgacatatttcggaggtgatgagaaatcgggcttagcccctgatctggagtcaaaacacatatggcttaaatatctaccatcagataaagttctacctcttgtcaacaaggtattgtgcatgtgctggcttactgatgagagcttttggcaacagggcattttgttgtattagtttcattttatatgttcgtttctctcagattattttgctcatacaattcgattttactattgttgcattacttacaaacgaacaattatataaacctcaacagggtaacttctaccaaaatggtgacactggtccttgtggaccgtgcagtcaaatatattttgatcagattggtcatcatgatgttgcttcattattgaacaatgatgaccctggttgtattgagatatggaatcttgttttttttcaggttagtatacttcttttaatctgttttgtgcagatggctaaagttttttcatatacatataatcagttagtttgttttatttgtacatgatgactatccatatttattccttctacacggtgctgtgctattgctaattgcttttcttcgggtactggttgataagcttttatatgtaatcagtgattttatttttatttgtacatgatgtttttccttatgcatacttacatttgctgtttgcattttaattctagttcaataaggaagcaggtggcatattgatgccatcatcagccaaacatgtaggcactggactgaacttcgaacaattaacttctatacttcagaagaaaaagagcaaatttgacaccgacatattaatgccgacaattgactccatccgccaagtatgatgcccatatgcacacttgatgtttttattctgtataatagttagccatagtttcctattgattttgtatactgtatatgatatattaatatttattaatgaataatttgcacatctaaatgcagtgtactggcaatgaaattcaaccatactctggtaaatttggtcctgatgatattaatgaagttgatttggcataccggatagttgcagatcacataagaacaagtagttttgctattgccgatggttctcagcctggtaagtatatactgtttgatggtgataaatgatatgaaacacatgcaaatgcttagggttttcttgttgtgacacatgcaaatgcgattatgagatgtatttgccttgttaatgaaataaggagctttgtcaccttgcattctatatggtatgatgatcttcaaagtttatctgtcatcagaacatcctctagattcttggtccacctggtttactagggacggtaatgaactgaaaagattatgtggtgcatactgcactaccattacctgttttatttgtcatatgtttgttatcctttcagtcttcattttgtagtgaaaaatggttcttgcctgtctgtaatattatatcctttttaggaattgagatagcaaggaatatgcttaggcgggctatttacttcggtcatcaaaacttgaaggccaagcaacgatttcttacaatgtaagaacgatcacttgtctatgctatttgccacgtcttttggtccatatgcttgcgtaactttattcttgcacagaatgccacaaaacaatgtttcctctggacacaaaagctagtccttttggttttgtggatttaaacattatgaaccttggaaatcaaatatcagtttaaatggtacagttgctaacatggatgtgcatatataagtctctaaaagtactagtacataattttactaagttgaatagcttattccgtgcactactaaatttactgcacgaacacatggaatttttatatactacattgcatggtaatatccatgtcaatctgcatgggtggtttggatgtaaatagaatttttatcatgcaccctgcatcaagcacatagtttccatctttttttgttattgtttgcaccagcagtaacactccacagctcaagttgtaggatgctattatcttgtatgtattgagatggatacttggtactacatacggagttcagcactgatgcatatcatagtcctagaagtattaggttatagtattgcatatatgagatggtaacttgttaccgcatatgctatgtgtctttagtggaactgcaaaaatagcacatgagatggaagtattttaccatgggaggcagaataatatgactacacctgtgattatggaagaagagcattactgcagatatctgttactcctgtcccaaaatataaggtattaggactggatgggacacatcctagtactacgaataacttatattttgggatggagggagtatgataaaaggtttaacatgaaacaaactagttttatagtgaatttaggggctgatgtggtggacgttatcaactattactttgttttagtctgagtctttttccaacaaatatttggtttgtcattggcagatttaacatggaatctgaccgaactgtttgattctattcacattagcaaaggcctatgatatgattgctttaggttcatgtgtgccttttcatttgatagtttaatttattttagctgatacttggctttgatatggaaaatttttttcctcccagaccgttgccaccacccatgtacaagtattgttatttggagtaggctaaattgcttgcaatgtgggtcaataactctgcttagactgtagggaaaaaatacatgtcctatatgatgactgcctgggatttataatacttaaattgatctttttttttccttgaacagccttgtaagtgcatttatcgaatcaatgagtggagactttcctgagcttttacacaatgaaaagaagataaaagatataattgcagaggaagaaatcacttttgcaaaggtaatagtggtttccagatgatttactgagctgaagaatcagtttttccaagtaaagtttcaagtgtttttgttgattaaaatttttcactcaaaaagagtgggcacacttcactgctcttaccatgcattaataacaaatcattttgactacatttggcgaagggccctttgacatttcaatttgctgggtttttagtgccatttgatactgctatatagttatgttatttctagattggtgttttactatactgctagaagagggtgatgtagaataattgtgttgcatcgagcaactgtatcaaaatgggaatatatctagaataatagtcgcaatcttaggtattagattggataaaagtggctttcttatatcaacaagaagcttatctgacccttttatgcctcctgtttttgacaattcaagtttcttttgttttttttactcataattcaaatggcagctatgattccagttcccattctcattatgaggttgttcctactgcatgtattaacattacaatatacacatgcaatattgcagaaaagtacagtagcttgcaatatagttgattgtcaccaaaattcatattctgccttctctttctgtttaactcattcttaaggacaagaagaaatttaaaaagaaagacagcaaaaggcggaagaaggagaagaataacactgaacaaaatgttgtggtgaccagacctccgaaggtgtcctacaagactaggacaattgatttctttggtcgtcccactcacattattcaccagcatgagaatgggccatgcggtcttatcgtgatctgtaagagtatacagcttccctttttttttttgttctatgtttagcttaatttacattagtttcatgtgcctgtgcaggcaatgttcttctcctaaggagtgagattggattgttcctaaacaaaactgaagtgatggaggatgatcttcttagtcgtatcatttctcgccttaaaagatgcagaaagatgcaggtttgcaacttttatataactgtaatttctcacaataaatacaaatgtaactcaggcttccctttttcttttgcagtttgagttgcatgagggttttcagtactcagaattccaacataaagttttatctgtagcaaaaaacctctggagagaagtatgcataaatgtgacttttaaaaggtgataatgatataaaatgtgctgattggttgtgtttgtgcttgcgtgtgttctgatgtttgaaatgttgacattgcagtactgatggctttgtgttctcacctgaatatgcactttttgattatcttgaaatccctgtattccatgggtggcttgtggatcaggtaagagaacctaattgttatgttctttttttgtgcataaatgtaagaccaccgagaacactgaatgtgtagttattgcagttgcacttcaatgcagcatcatgcttaatgtggtgtctttgctttgctgcacggtacctttctcgcattatcagacgcagtaatggaacacctcagcccatttgaagcctgtagatgtaggaggtgttggcccatgtggcccagaagtgttgttgtggtggtgttttagtaccaactcggaagtttaggtgagtgggggcctgcttatatgaagcgagttaacccttttacatgaagtgaggatgaaagtgtaagcagagtattaaaattaaactggctgttttgctggatatgtttgtttccaaacctagccaggcaaatgcaaaagtgtgggccttcgttcctgctctggagaagtggagatacagcttctcatcatatgtgcacatatcagtcacctcgcctccctcagattacctcacttctacctctacatacatacaacaggatgatggatgagcatgagcagtgggcaaggaatgggaggacactgttatagggtttagtttagggctttacctcacttctacctctacatacatacaacaggatgatggatgagcatgagcagtgggcaaggaataggagggcactgctatagggtttagtttagggctttgttcctgggtcattctcatcaggcccgattgctagggtttagtttagggctttgttcctgagtcattctcatcaggcccgattgctatcgctaggctaggtgcaggcaaccaaacacaaccatagcatatacataactatttctcagattttggttttcaattgttacattgattatcaggattcagagttggcgtcagctattgctacaagttcttatgatgaacttaatctagaagttggagagtatatatcgcaaaaagaagccatggggattaaagggcgtggtgatcgtgaagaagatgaacaactgctgagagccattaaactttccatgggggacaacagcgttactgatcaaacacggggacaacagcattagtttcgtttttgaattacatattatttgaacataactttgccaatcttaacataaatattattctttaccctaaacattaatattattctttactcaatgttttcttagtggagcagatctcagattttcttcagggccctcaactgactgcccatgggtataaagtttaatttacatgttttgaaatagaatactttggaactaacagaaaaagaacatgttgaagtacaattttttattgttgcagcttgtcatgcttgcataaagaccttgaagaaaagaaaccttgtgtacttttctggaataatcattggagcacagtaattaaggtgagaaaacaaggttaacagtctttgattattttagtactaattttgtttatctgcctttattatattttgacctttgcagtttgaagaagaattatatattttagcttccgattcaagtttcttatcaagtgaatccggtgctgtttggcaaaagttggaagatgtatgtccttatttactactaatttttgtttgattgaaatgcatgtcttaatgtcaaagtcatggtacattaggtgaatgggggtggttcatttgtggatagctccttcacaccaattaaatatgccggtgaaggagcaagcttctgcagtgatcaggctcgtctaattcaggtataacttctctactttgtacgatgtaatgctgttattcaaacctggtaccttgttttgtttcttgtacttcactccaataatctgtcgtagtcattcacctgtaacttcatagtttatcctaatagttggtcttaaggaattttatttctcttagcctatagcttcttactgctcttgcattatcttcattcttggaactgataagcagataatagttgtggtcaactttaaaaaagctccagaggcatgagagcatggttgagacaatctttgctagtggagagtacaaaaataccacatttagtgatgtgggctttgggcatgttctaattctaaacaatacaatttcttgaacaagattgtcagtcagcggcggacccaggattccgtcatgcctgggctaaacccttaacaaccgaactagcactaccttatatctacaatgtgttatagcagaagcatatcataaatgcatcactaagatggcactttactcaatgtttcaaagctaacatattacaaaaactcatggctaaacagaaaaaaatatgtctgaaaaaatatctatactactataaaagacactagtggggtggttgttctgccaccaccactacttttgtactttctgcaaattagtccttgatattttctgatattatacaatagtctaatatttgtttgaatcaagtgaatattatgtattcaaataagcaaacatgtctaacatattattatatattttcttttacccatagcaaagcatgagtgttttgctagttgatctacaaaagaacgaacaacaaagaaaccaaaacaacttgctgaaatcaatatgctgaagttgtgttcaggaaaagcacaaaaattgcactaacctttctagttcaattgtacagctaccatatactgatatactagaatgacaaatacaagtatatactgaattgctgtaattacattgtgaacagcaattagattgatttgaatagctataatattccatgtagacgttttggtaggatccatggagtgctgcaatacagtagcatgatgtggcaggaggctacataaatatttccacaataagagtgttcaatacaaatgctatccacattgagtttgttctccctctggtcataagatacattctgtattgtttgtaggaagtaaatctgtattcttgttcttaaatgcaatgatagccagtgatcttggttaagcaaaataattgggttgttgcaattacaagaatctttttatattgaaacatgacatataatctgttaagacaattatgtctttgttacagaaatgtctaatgcctgtttttgccatgtctcacagagtaaccaagaatctgctgatccccaatggtggccccagggacttggtggaaagaatgaatggggtaattttttgcctttttcttgtgtcgattcttcttgtatcgaaatatgaatcttttttcttcctattcggcaaagattactatttcttctttatttgggtctgtctcttgaatctcttttgcaattattgttcacatcagttatccaactctagtggtaggctggcatgactttgttctgcaaaacttgaagttttgtagcaagtttatagatgtggcatccaattttttctttatgtacagctcatgtcgttttcttgttttcttcaaagtctagcttgtcttataatttatgttcaaacatatggattgaatgatcactgatgaatttttgtagttaataggaccattcgtaccccaacttgtgtgtgaataataactgcagtagtgtagcatatttgaataggattagatattctcctatcttaattcgttgtgtccacttcaaagtagctctttagtgaaaaaatggtttattcttgtatttcacatactattttctgatgcttcagatcatactggaagaaatgctcctgctggaaaggaaaatacggtcaatccagacattccaattccatggtatctgtactttacattgaaatggatcatcattgtgcggcgttatttttgtttattaaatcttgtttaatttgattcctgtttagtgctagttgtatcaggaagaaattccattgcactgaatcattagtctatgaaatccttttatatttttatacccatttataattattcatactggagacgaacatcattggagcaagattgtctgtttgttgaattcttctctttttcaactatattatttaggctctgtttacggaagcttctgggattctcgtagaatggactatggagtttgtaggctaacgtttagtcttctatcttacatattaaatacgttaagaaagatgcttgccatatagttctttcagggacttaccatataattcccagtccatcgccagccccatctccaagaatatttggaactggagcactgccaaacagacctttagttgataatattgtgtttctgcattaccttcctattatgtgttcagttcttgtctgaaaaccatacaactgtgtcaagtgaggatgtgggttcagctacgatgcatttttcttctgcatgtaggacttccaatagattcaataaattgataactgctatgattttaaatatgtttacaccttgttttgtttgaactttgggtggtccgttgtatatatctaactttaataaatttatgctccattttcttccaactcatgtctcaaaggcgttgcatatgtcagacattgacatggttccacttttttggtagcttaatagtggtatgcatctcagcgtatataaataaccattgtgcttctaaaccaccaagctcattaaatcaaagtgttccttgcagttaaactttttcctacattacaactacctattgtcatcaataccacttgcattcagattgttcttaatttctctttggcaactcaactgcagtcatgaggacttgtcagctgttgaagtggtaactgaggagcagttgccacctgctgaaataacagatgttattttacctcaaaaggtacatagctcctcaagcactcctgaagttgcaagatcagatcaactaaaggacgcagcggcttcacaaacccctaaatgttcaattcaagctgtgccatattcaacacctatatcttcaccacaaccactaggccgtcaggtacttgaaatatctgaatctcaggcacaattgcaagatcatcatatacttcagacactagctgatttgcctgtggcttgctacgggattttggaaaataacatttggcattcatttttattttttaaagcctaaaactgttgacctatcaagtcatatttcgccatcagtttttggatgtctactgggctagttaaagcagaggcacacaactctttccatttgaatctcagggagcacaaatgcgtcactaacattattgtggggcccacacaagtgaaaggagtggtggtggtagattcattgccaccaccactaccaacattttaaagtagtatagatctgaatcccagtacattgtagtacttcttaatccattcctactcaaacagtttgatttcattgaaagttgttggcccaaagcaacgaatatcagcccattctaccgtagttgtgacaacacactgaaatgttagcatgcatcattcatgggtagaaagcttttattttcatttaaatgtctgccatgtggatatagctatatattactctaatagcaatggaatttacccctatcttgaaagcttttctttgtttgcatgtgatgtgccatagattgtctgattcttgttggaaaatgcattgtgcaccagactttattgaagttcctaaaataagttttagatactggttttacgtctcgcagaaacattttattagaacttagtgatgaaattatgatatacagttcaaagtttaaattgtttaaacttatcacaaggatttgcaaattaactcaaatgattttctccccttcatttacacccaatcggaaaagatgagtcatgtatttgttagcaatagcatctacttggtaagggcaaacatagaagaacaagaaaaggagaaggtacatcaaaactctagagcaccttatatttaggagagagttaagaaggctcaaatggcctacatgtatatggataggaagtacctcttacaaaggatgaagaccaattgagtaaaaggaatttgttcttttttatttcagataatagcagaagaagaacgggctcaattgttgttcggttcatttggttgctgtgaccttaagtattggccttcttacccgacggtggtctgtaactctgatgtaatggccaagtcagtgcctactgtttccaacaagagggggttttcttcatttgttgacaaacccctctatatttcgaaagcttcatcagagcaccgtgcccaacaaagtgcttttacaaatcgttttctcgaatttctcagagggtcagacttctaactttaattttgtgtagtctatgttaaagactgttgcatttaattcatttttccaacaatgactacaggtttagattggggaataccgaagagccttattacaaaggaacagctgcttctatggtttttcttgatcttccaatgatggacgtaaagtttgatcatatcaagatatttgataatgaacttgcacttatgatatgccatgactttgagaggtatttttctgttctatttcttcttttgtttcaaggatgcttttgccttcttaattggtttgtacattttgttgcagaagtaggctagatctgaactatgcagcaaaatcatttatcatggattttagaagtcagttggaagggatgttcatgaagaagtttgaaagcttcgacaacattatagttcgtatagatggcttaccgaaaattgacaggttcacttaattgatttgtacactattttactttgactttgtgttatacctgtttatgcaactattatgtttgttacatttgcagattaatgtcacttgaggcttttgtgaaattgcctggaaatcattttgttgaaccaagaactttattcgctactgggagttcattaactgttgcaagtggtacaagagttggaagaatcatagcaacaggtgcgcttcaagaaatattgaaggcacatgctagtcgcaacagctggaatggcagttttaaaagaaagaacattttagtaagaaatggttgctattctgaaatctctatgcctttccatgctgagttcagcagggactctatgctcaatgattatatagcatattttgatgaagtgatctccctatttgaattaaaaggagtaggatgtcctgccttttttccttggatgcggaagtccttgttaagattcatgccagctccttctccatccttctgcgatgaattcaggcattttcaatgctttgcaatggcgcaatttgctttgaagcgtcctgtcgttaggattgggttcctttcaaatctttacaggctccggagatgtgcaaatcgacaagttagaaaaactctacttgccattcttaggagcttatcattaagatcagactggagggttattgttctattgcacagccatcccattctggtaaaagtgtacctattcaacaaaaaaaaggataaggaaggaaatggtggtggaaagacaaaggaaggaaatggtgagaattctaaggatcagaaaggtggtgaaaaaacaaatgatgcagattacaagatggcaaagttgacgaagtatgataattcagctaaccatcttgttatttacactcgccacgtgattgaacacgggatggatccagcacaacttgaggtaatacattctatcttttatttgtttttttttcttaacttgaacttgaatcctaacagaacattaaatttcttagagcgatgatgaagtcttggaagatgaaatgtatcaactagacgatgaatcaattgagatgctttcagagctagatttgctgtattcacattacctggagttgaatgacatgttggaagagttgttctacagtggtatgatgacgaaagaactttggcaagtgtaagtattttgttctcctaaaatctatcaatctaatccaaattaaaacataaaggagaactaactgtgagttcttttgtaggttcgaggagatattggatgtacacaacatggtggagcctctgtagtgactagatacacttttaatcactgatgtacgtctttattcatgaatgatgtatgtttttgcttatgaaacaaaatcatgagactcgtgtttatagtgtggtttttcttttgcaacagtggaagatataactgaagatcgacagatgtccgttctggaatccatgccctcagctactagtggcaaagaacctgagtagtcaaacgaacagtaatcggctgaaagtttcctgtagatagtgtttagctggctctggtgtcttgtttagttgtttgtgactggttgtctgtctggttcctggtaagaggcaagaggacatataccaagagcttcgaacttggttcatgatggttttcatctgatttaggcagcttacacattgatggttgtgtccatcagtatattttgtactctctatcccaatttaactatcacctaagcaaagttcttccatcccagtttaatcatcacctaagaaaaatctaaaaagcgtagatactgaagactgttaaccttcatcattttaatccatattggttaaggtgttttgttgtttcgtgtttgtggattgtgtcacgttttaaatatattgcatgatgttgcactaataaaaaatattcttgcttggttgtatgtagcgcatttaacaatgctcatttactcttgcacaaacaaacaaaaacacttgttagatgatagatcattttagatgatcattttaggaagaccataaaagttttaggggatgattaaaagggaatagagggaatattatcaattaacaacaacgagaaccctgatggctgacggtgctgttatccttgtgttgttatccttgtcatggctctaagatgtttagcttttgacttaccctctatatcaatctttacttttctgttgtgaagttcttggattttgagcaaacggtataacatggctgggagcgtatattgcttttgagtagcgtcggttcttgcgctcaatcttctactcctatcccattttaagcacagttgtgaatttatgtgtccaacgtttgaacatccatcttatttaatttttttatgattagtatttttgttgtttttaaattataaaaaataaataatactttatgcttaacttattttttaaattttttaaataaaattttcaaataaaatggatagtaaaatattaaacacggaaaattattactgcactttgaaataggagtatttacttttaggttgcatcggatcgggcacgtgctgaaaaattgggcaccctccccatgcctgctactgttgcgctcaccctaccgttgtgctatgctgttgcactggctttgcatctctggtgttatcttttcagttgataaattgtagtgcagttgataactaaaaaaaaatatagcccttaattgaaagggaacaaaattatagccttaattatagccttaaggcctcaaaattatctacaaatccttctaaccaaaggaagcctcaaaattgtcatgtggtaatgacaaagctggtttggtctcggagcccatatttttttttaccagtagtaaagatgatgcatacaagggagggcgaaataaagcagtggtacgatgttgttgaatacgaatagtaaatatagcgtacatcagaacttaggctgcttcgtccttaaaagaccatggtaactgcttgccaaattatcactactagctccccatttctataaaatggcttcagcttgcagtaaaagttcactagtacacaataaatcgtatcctacaattatctctctaggcgcagataaaccccaagccagtttccatactgcaaacgacaaatgaactcctaaaccgccaccaacaatgttaccagcatcctgaatctcaacaccaactggcttccatctatccatctgtacactgatgctctttcttccaatgtttcttcttctttatatgggcccccacgcctttcacatgcgcctcacttcaactgctgcactttcagtttgtccatgtgccacctctcctgtgcctgaacaacaacaaaagagttcgtcaaaattgcctagaactggaattggttacatttttttttataaagaggaagtacccatactactactatcatctagtagcaggggaaaaaaaacaaaacaaaaatcgatagcaagaactagtcattagctgctagtaggttggttactttgttttgatcaaatatatcttactactctgtcgagcagcagaaccatgctgttttgaacactgacagtctctaaaatatataactttgaccgttaatttcaattcaacgtgtgttaaatcaactatcatggacaagacatatctatacatattatatccaatctaaatattttagaagagattgattataaatttaaatgtttgattagagatggcaccaaaatgacacctttacccctctttttgcactggagggagtgagcaagaccaagctacaaaaaataacctttgtctgaaagggtaactttgagatactgtgttcttcaacggtgcttttggccaggaacaaaggttgaaacgcattttcttgggtgcttatcttcttgcactatgctttgaggcaagcttggcatccaatcaatcaacaagcatttgttctaaatgtgttgttatattcttaatttgtcaaaactcaaccagcatcattaaagaaattgagtgctcaggaattgtgagtatagtcctagacggttttgctgtactttcactcaaagacaaaaaggaatttaaattgagcacagcacaatttgaaattctatttctattggttgccaatcatacagcttagacaatgaaacaagccgtattagtaccccttgtgttcacattgccgtaatcaaatctgagatccagactgcaatatgttcctaactggtggaactagtgaggtatcataaggcccttcttctaaactaaacagcgacaaatacaatgatggcaagcaagtagtgcatttatacatatatcagaagtatataccagcacatagaagttacctgtagtgactttcttcagatatgtggacatctcactggcgatgtaggtgggcataccgaaatagtattttcggacatcaagctcagcaactccttgtatcttcttattccttacatcaacagtaaccacggcctccaatttgtccgtgcttccggctatggaaaagaagtagacatgatcatcatccatgcttatggtggggaataccattgctacgctccgcaatgcagctttgctgtggccacatccactcagcttagacagcagcttcaggtggcttgggtcacggacattgatgctgaggtctttgacattgaggtgacaatcacggcgccagtgctcccatgaagccaccggaattggcatggttcaaatggtggccttccagccacgacggagaacaactgagctggtgtaccttggctttcgccgaacccattcctggtaagattcagttggctggacagtggtgtgggtctctcctgtcccaacgatctccagctctatgtacttgatggagtctctgcaaagactgacggtgacatcacggatgtagttggggtcagtctgcttgaggaggcgatcccagttgccgctcgctggcaggggcaggggcatgtcgcggagcacggggtggtcgtcgagcacgtcgcagaagatgatgccacgccagaggtctacccagccgaccgtaccgcgctcgccgccaatcacgatcgtcttccttgtctcctggtaaaacctgtactccgcagccgctttgggcaaaggcacaagcttgtctctcagctgatcctccagcgtcaagagcttggagacccactcaccctgctgctgcttgccgccatggtagaggtggaggtggaaatccttgtttacggagaggaaagtgccggcgaaggcgagggcggcgacggcgtactcgccgtcgccgtggctgacgatggcgacctcggagtcgttgaagcgcatggagcgcggcgggggcgggatgaggtggagcagaggagggtcggccgcgcggtagacgaagtaatcccatgtcccgctggagagggcggtgaggggatcgaaggggacgacgaggaggaggaggtcggcgtgggaggcgatgaccttgggcgtggcgcggaggaagtcgaggcccgggcagtggacgcagaggtgggagaggagcggcgggcgtgcggtgcggaaggtgaccttgatggggaggcctgtgctggttgtggactcggcggtggtggcgttggggaggtcgccgatgtagcaccatatgtcgatgagaacccagtgcggcggcggggaggcgccgtcggaatcggcaagtggagggggaatcaacgacgaagacatgaccaaggaggaggggattggatcgcaaatttggggctaagagaagaggaacacactctctctctttttataatatcctttttctttagttgagaggtccagcctaccacagcacgggcccggcccattaaacatcgctccgttcacttcatcttttgtgcaaaattgctaattcgccgagacgagggccgcgcgtgggccttttttttattcggtatttttttttgttttttccttccctttttattggtttttttatgcgtacgggatatatacgtgcaaacacaaacttttcatatgtgtataaaatttttttatacatgatgtatttttcaattttttttgactttttaatacgaactgtcgacgaaatgggaatgggtgtacccatttcaccgtcaaaacaataaagcaccttttaacgagggaactaatagaaggacatggtcgtgggccccaactatagggtttgagaatgcggctcgaggttagccgcggatcgggccagacccgagaccccgatctaagaatggccaaatggctagccaagttaaattttaacaagtataaagaaaaaatgcccttcaatagcctctccatcatgt

SEQ ID NO: 10316 - DNA, 30490 bp, Oryza sativa
cgagctcggtacccccagaagcttgtttgattgctaaatcctccatgagttggctatggcatcgtagactagcccatgttggaatgcggaatttggcaactcttctaaagggggaacaatcctcgggctcattaatgtcacatttgagaaagatcgtgtgtgtagtgcttgccaagccaggaaacaagttgggaatccacatcctatcaagaacatcatgactacaacacgccctcttgagcttctacatatggatttattcgggcccgtggcctacataagtattggaggtaacaactatggttctgtcattattgatgatttttcccgcttcacttgggtgtattttctccatgacaagagtaaggcttaagatgtcttcaagcacttcgccaagcaagcccaaaacctctatgatctcaccatcaagagggtgcgaagcgacaatggaggagaattcaagaacactcaagtgaaggaattccttgacgaagtgggaatcaagcatgagttctccgccccatatgatcctcctcaaaatggcattgttgagaggaagaaccaaactcttattgaagccgcaagatcaatgcttgatgagtacaagacttcggatatcttttgggtggaggccgtgagtaccacatgtcatgccatcaaccgcttgtacctccacaagatcttaaagaaaacttcatatgagctcttgagtggtaagaaacctaatgtttcatattttcgtgtctttgggagcaaatgctttattttgagtaagaggcctcgctcatctaagttctcacctaaggtggatgagggattcttacttggctatgaatcaaatgcacatgcctatcgtgtcttcaacaaaacctccggtattgttgaagtcactagggatgtgacatttgatgaatctaatggctcccaaggagagcaagttgttgtacatgttgtaggtgatgtggattcaagtcaagctataggtactaaggctattggagacatacgaccagtcaagacgcaggatgaccaagaagacagggatcaaccttcgtcatcgacatccaatagccctacattgagtcaagtgtcagtcgacccggaagttccgggaccagatggtcggaacctccgaacctctccaagccaggaagttccgggtccatctgccaggaagttccgggcagaggacagtcaaggcgtgcctacggcacaagtggatggaattgatgctgagggcactgtagagcatcctgatcaggctcaggtcccctcggtgcaccatccaagaatacatcacactgtccaaagagatcatcccgtcgacaacatacttggtgacataagaaaggaggtaactactcgttctcgtgtcgctaacttttgtcaacactatttgtttgtctcttctttggaaccaaccagggttgaagatgcacttggtgatctggattgggtgatggctatgcaagtggagttgaataacttcactcgcaaccaagtatggacattggtggagagacccgaccaaaatgtcatcggcaccaagtggatcttccgcaacaagccagatgaacatggagtggttgtaaggaacaaagcccggttagttgcgcaagggttcacccaaatcgagggtctcgattttggtgaaaccttcacacccgttgctcaccttgagtcaatccgaatccttttagcctatgccgctcaccatgatttcaggttattccaaatggatgtcaagagtgcctttctcaatggacctatctcggagttggtctatgtggagcaaccaccggggttcgaagatccaaggttgccaaaccatgtgtacaagctccacaaggcgctctacgggctcaaacaagcccctagagcttggtatgaatgtctccgagattttcttttgaaaaatggttttgaaattgggaaggcggatactactctcttcactaaaaaatctaagagtgatttattcatttgccaaatttatgtcgatgacataatatttggttctactaatgcctctttttgtgaagaatttagtagtatcatgactaaaaggttcgagatgtctatgatgggcgagttgacctttttcctcgggctacaagtgaagcaagtacaagagggcactttcatctctcaaaccaagtacgtgaaggacattctcaagaagtttgggatggaagatgccatacccatcaagactcctatgcctaccaatggccacctagacctcgacgataatggtaaatgtgtggaccaaaaggtatatcgctccatgataggatccttgctttacttatgtacatctcgtcccgatatcatgcttagtgtttgcatgtgtgctcgctttcaagcggagcctaaagagtgctatttgattgccgtcaagagaattctaagatatttagtccatactcctaatcttggcttgtggtatcctaagggttgtgactttgagcttttgggctattccgattcggattacgccgggtgtaaggttgatagaaaaagcacaaccgggacttgccaatttcttgggcggtcccttgtttcttggtcctccaagaagcaaaattctattgctttatccaccgccgaagtcgaatatgtcgccaccggttcttgttgtgtccaactcctttggatgaaacaaaccctaaaagactttggctacaacttcaccaagatcccactcctatgtgacaatgagagtgccatcaaaatagccaataatcccgttcaacattctcgaaccaaacacatagatattcgccaccactttttgagagatcatgagaccaaaggagacatttgccttacacatgtgagaaccgagagcatattggccgacattttcaccaagcctttagatgagaaaagattttgcgagcttaggagtgagctcaatatcttagattctcgcaacattaggtgatgggtggttggctaatttatagccaaacatatgtcactaaaatgtaaattaaaaaaaataaaaaaaaattaagcttttgtgtcttgagatcacttcttgtgtagaagatggtcttgataccaggaatgaagctaaaacattccccttttatccaaaaactcccttttgtgaaaatttttgcaaaatcctttgtgtgccttttattgcgaaattttggtttttatttccttcttgtgatgtattgtgaccatagttatgtaatgttgtttgttggctggtcatatacatcataagtctcttcatgtccatagttcctaatttcccttcgttaaattctcttctcctccttgtttttgggcctgactgcccttgttctgtcaggccggaagttccgggcctccctgtccggaacctccgggtgtcggggagtatatatactcagggggagttagaaatcccggtctctctcctcacttcttctccctccccgacgccagccctagccgccgctacagtaccccttgtggcgattttcaattccatccgtgaaaatttgattcctctctgtggaatcaatcacattggtggctaggaggttcttcccgtgatcgatctgcgatttcctctctcaaggtagcacttttgatcttctcttttggttcatcatgtttttgccccaatctctaaatctgtgaacctagggagaaaaccacttggatagtcttgtttctgctaccttgtagatcaccgatctataggatttgttcacatgcactggctatttttgagaccactgttcttcatttttgccggccggaagttgcacctggaacctccgggcgctgtccagccagcctgccattcttgattctctcaaattttgcctaactactgcactccaatttgttgattcctgttgcagtaagcactatgcctcgtgagaagagacagaaagcctctcaggatgtgtccggtgatgagagtcctcctattcattttcctcgtggtcgtttgggaaaagaaaaagtggttgaaggtggcagtagcagtggcactcgtacctctcccaggtttaccaggcaatccagcaatcgcccagttcagattcgtgatgttgacagtggtcaaggtagtgatgctccttcttcaagaggtcgtgggagaggtggtggtcgcacttctggggctggaagggcctctcatgatttccttgttggatctcgtgtgaatcccgttcggctctacaagactattggttttgacaccactcctatgcatcacattggaagacccaagtccaactaccttcatcagcttgccaagtgcagaagggaccgtttgattgatccaaagacacagcctggggagtcacaggatcctcgtttcagaactttaactcaattggattggtacaactcagtgattatggctagagacaatccagtggttgagatgaagtggattgattggacttacatgaggaagaagaacaatgaagtgttcaaccaagcaatgcaagtttgccacaacaagaatcttggagatattcttgccttggagtatgattggaatgaggaggtcattgcacagttctatgcgacagcattctttgatactactaggaagggaacttcttatgtaaagtggatgactgagggtgttaggcacaagatttccatagcacagtttgctgagatattgggcttagaggatgaggatctcaataggcctaacatacatagtgaagcacttcttcccatgatcaagactaaattcatgtatactaggggatgctcctaggacttgtatgggaactactcatggtttgcatccaaactacaaggtgctgtactccatctttcgttggtctttgcttccaaaggttggagatgccattgctttgccttccaaacatgttcatcttctcagtcgcatgcgctacaatcagcctcctttcagtgtgatgcagttgatttggtatgagattgccaacaccattcttgagcctaagcgaggttgcatctatgctccattcattatgaagatgattgagacagtcaccggggtgttctacattaaagatgggcgccacaatcctttcctcttctccagtggcacctagatccatcccttctacctcagctggtccttcttctagtgccccaccgcaatcctcgagctcttctcccatcaagaaggcacttcaggcaatcttctgtatgtgtgctaagactgcaaagaaagtgaagaagatagaaaggcgtcagaaggaagatagaagagaggctgggaaagaagtgtcagatgattctgaagatgaggtctatgtggatccttttgaggcttatgaggcagcccgcaatgttgccggtgaaggtccatccacctatttcaatgaagagtcttcccaatcagatgatgatgatgatgaggatgacactgaggcagctgctgaggatgctcctactgatgttgacaccgctgcacagtccgatgagtctcatctcttcggcgataccgagattgttccttcagatggagatggagatgagtgatcctcttcttctcttcatggtttcttgctttttggtgccttgatgctaaagggggagaaattgtgaattgaagggggtcatttaaatcatttttgctgccttgactgctgtctggtcatttggccagaagttccgggtcctgtgatctggaagttctggccaagcagattccctccctattatctatctctctatggacatgtaatcgtattctattatggttggatgtaatgactgttagatgttttattatcctttatgtcagtaagttagactatatgaatgttgcattttgatgtgatgtagtgttcttttcatctttttgagtgtttgcaatgtcatctagttcttcttctagcatatcactcatcatttaagcactcacatctgcttcttatttgattggggatagtgtgaagttacctttgagctttccttcgtttttatgcatattgtattcttctctcatttccttatatgcatatctttagggggagcttcacacttctctcatcatttcaatttaaattctattatctttttgtgtgctttaaccatgttgtcatcaatcaccaaaaagggggagattgaagatgcacttaaaccccctagtgggttttggtgattaatgacaaggtggttaaaggggactaacgtgtttatcaagtttattcacaggagtttagtcccaaagcaagttgtgatggctaagaatgcaaggagacccccaaatttgaatgctcctaagtgcgaaaaacaccgaaggtgattagactaggtttttcactttcgaaattgagtttaggaaaaaacatactattaagaggggtttcaagtgtggttctagggtatacaaagtgctcttagtcatatccatgtgtcaaaatatttttggaatcatttttgaaaaatgatttttgtccccgggacagagagggctacccggaggttctggccggaacttccgggcgccatttcaacagcaaattttcctaagtgctgcccagaagttcctggcacttttgcccggaacctcctggcaggcttccagtttaaacttgtgagtaacggctagatgacgtcatctagccgttatatatatggatttcgtccccaggccaccctttggctattccacttcagctctttcatgttctagggttttctagccactcccaagcttcctttacttcctccactcaaatctagagcctatcttgtgagattgagagattagattagagtgtaagagtattttggagatggcttgaagattaggtttgtttgagcactttggataccttgtgggctgtcacttgggcttattactcttggagatcttctcatagacggttaggtgtcgcccgtgagcttccaaagatcttgtggatgtcccgggaaagtttgtgaaggttttcttcacctccgcaaggaaacgaggtaagtgagtaaagattcttgtgctgagttttcagaggttgtcctaggtagagcaacttacacttgtggtcttttctagaaggaattgtgagttggatcttggtggtcactcaattctagaaaatgacctagaagtgttgagttgaaggttgtggacttcttctgggatctttgcataagtgaggcaaggggttaatcgagacccggctctttgagcacctcaacggagagtaggatccgtgtgatccgaacttcaggaaaaaatcgcctttgtctctcttgtgcatgatctgtgtttgaatctgctggtatcttgtgatttacatcttgtgcaaccttgtgcctgattgtctctagctaggacctgttttgcttccccaaattttgattttctctgttgctaggaagttcctggctcaagaactccggaagttccgggctgctcatctctgccaggaagttccggtgttcttcaccaggaggttccgggccctgttaatttaactgctgtgattattgaaaaaatttcagaaaaacctattcacccccccccctctaggctacatctctgcgcgttcaatgacgtctaagacgtcatggccttcctgaagacattgtctaggaggtcatgttccttgcattcaccaccttttctttgtttggtcatcggcggtttttggttgtcttcatcaggttgggtgagggactagtggatctccttctctcttgacctcttcctctcctcaacctctctacgtgtggataactgaaagctttttgacgtctttctatattgagtcggtgtttagcagagcatttgtaacctcccggttggccaagtggtgattgatcacgcttagcggcggtcggcttggtgctattgtcctctctagggtgtgctacgaggagttgccagctcttggtggtggtgtgtttgttttcatttgtttttcttggttacgacctcgtagggttgtaatattgtaactttttcttgctatactaatatgaattttgcattgtctagcgtgaatcattaaaaagagaatctaagaaatgccattgataagcatccaatttcaagaaataccatcaacaagttcaagttccatgaaataccatcttacaagcaattttatcctagaaatgccatcatcattaggattccgtccatcccgcgccattaaatacattgtaacttgtaagtgcaagttttattattgaaagaatagcgtatgtgactacgaggagtccatggaattgtcatcaactataagagctttcataaagaatatagacagagttatccataaaataaaggggttgtttggttttcataaactccctgcctcccagcgcacgcaagcgacgtggatgcctccgcgtgcgaacatgctactcgaagcgctctcagctaggggtggaaacgagccgagcctcgtgaaagcttggtgcaagggaagcttggcttggcttgctcgctacaaacaacgagctaaaactgtagctcggctcggctcggctcggctcgttaatgggctcgagctggcttgcgagcctggcatcaagtaaatctcaagtaggtctaacagaaatcgagaaacattttaccacatagaatttataatactgtgatagttttctttaatatgtcatcacaacacataaatagataatgtggcaatcaaacttaccatttccaacaaataaatagttagaaaaggtgcaaaatttttgtatataaccctatgcactaagccaaacgagcttgcgagcggctcgtgaaccagctcgggcttgactcgtttttgaaacaagctaggaaggaggcttgggctcggctcatttggctttcgagccgagccaagccgagctataggagcccgaactttttgtccacccctactctcagctccgcaattcccagtagcttttaatataaccgattaaaacagaagagagtaagttggaacaaccattagagcatctccaacagtctctccatatctaactctcgaaatgtctatttggccaagtctccatctaatttggcaagtcaaacttatggtttactccaacagcatctccattcaccctctctattatgaatctacgacagtgggacccacatgtcagcctctacaaccctttcttcttcctcatacttccttttccccacgctctcgtctccgtgctggtggcactcctctgcgtggcggcggtgtcgccggtggaggtaggggtggcgcggttcgtgtgcaacacctgtttctcctctctctccacgccgccatccacgccggcgccctcactgctctgcatctgattcccttgcctttgttccagcggggccggggcaaccttccaacgccccacctattgcatctgcgccggcaacaccctcgacaccatcgccaggggcgtctccgctggcctcgtcccctaccaggacatcgctgcgccagcaacatctccaacccaaacaagatcgccgtcgcccaggagctctggatccctgtgcctgggtggacctccttcccgatggtgacggcgagctcgaggaaggatgcaagcaagcgacgacgcgcctccttccctatgtcggcagcaggcacgagcggaggcttcccccggtggtctcgatgcaggaaaggagttggaggcgcccaggcggggttcggcttctccaaatgctaagccactaccgccattgttgtcctcttgtcccatcgacgtggtagatcggagcagcaacgggggcgacgatgaaggccaacgatgggggcggctatagggccggcgacggagtccaagacgaagacacctcccgctccctccttccttagctcggcctaggacgaggcaacgacggacgagggcgtaggtagtggagacagtggagggcggcgatggatgccgccacagtagccggtgtccagatcatggcacgggcgatggctgctgcacgcgctcagcaatgcctcggatgaagggtgtgcatggagaaacaggcgtggctcccatggatggctagccggctttggctggccaaactagccggctttggctggctaagtttggccagcgaggaagcagtttggatggcttggccattcaaatagcaagcctgttggagtacaattttagtctaaaattgccaaattttgacttgtgggatagcaagactcttgaagatgctcttatagctctacaatttctgaataatccttgaaagctttaacaaataagcatattcacacgactgatacgaggattaagtgcatacaaaatgagaaagccttatacattattaattaagtttaattattataaattaaaaaattagattatataatattttagaagaataacttttataaagttttcatacgaaatactgtttagtggtttgaaaaatatgttaacaaaaaccaacccagaatcaggcgtgagtaatcttgagcggtttgtaacatctatataaaaggttttctcataaatcatgtgttaacaagaaaaaagagcgcatattatattagcactctctctgttaataaaaaacttaacttaaccaaggacaaatgtgacttatcttagtagtatagtaaatataaataaaaggttaccgaaatttattcgagaatgctgggaatcggtaaccggcagggggtgggggtggagcaaaatacgcgcacgtgccttcccccgggccccccacatgtctctgctcacctgccacgtgtctccaccacatactccgttgcaacaaatcacccacatattttggaaatgctctattaagggaattcgtttatttttttattccaaaaaaaatgtttcacctagtgcattcacaatgtttgcccccccccgacgcgcacatgcctcccccgggccccaccacatgtccctgcccacctgccacgtgtctctaccaataaatcacctacatattttggaaaccctctattaagggaattcgtttcattttttgttccacaagaaatgtttcacctagtacactcacaatgtttcactatatataaatctaaagttgcagtgaattgaaacattctttgcaacaaatcagccacatattatagaaaccctctattaaggaattcgtttcatttttttccacaaaaaatatttcacctagtgcacttataatattttagtatgtatggattaaatctttcactatttactgaaacattgtatttatataaggtgaaacaacgccctatttaaatgactgaaacattttcgatctacttagtgaaacaattccgatataattggtggaacaacgtgcaacatttaaaaataattcaataataaactaattttttcatcgaaatatatccatatatggtcttgttttaaatatttaattgcaacgaatttaatggtgtaatcggatcatgatttagataaataatttaagataaaaaatagtttaaagatttaattgcaacaaatttaatagtgcaatcagatctgatttagataaataatttaagataaaaaatagttcaaagtagttttggatgcatgcatgctgatgatgtcaggctgatacgtgcgtctgattttttctatctccatcgaaaatccgacgcgtagacgtctcccatttattatattatattagaatgagtcacgtttaaggtaggttgaattttgttcagagaaaagtaccagaaactcatccgtgagtagggcctacagagccacagcctacaaggcccatttataaaattctccaaccgggggcccatccatccatccatcctcgacaccaccgtctccgcttccctttccattcgcgccgccacctcgccgtcgcacccagcggcggcgccgccgtgccggaggagcggcgatgtggtgccagtcgtgcaaggaggagtacgaggaggaggacgccgggacgtgcaaggagtgctacgaggaggcgagcgagacggaggaggagctcaagcgcgagatcgacgacctccgctcccgcctccacttcctccgcctcccttccccttccctcgacgcctcctccctctcccactccgacctcctcctccacgccatccccgccgatgcgcccgcccgccccgacacccccgccgtccccgcccaccgcgtcatcctcgtgagtcattcttgcttcacttttttccaatcgattagtcccaacacgtagctttctttgttcatgccattcttgacttctcatgtgctagtgctcaattaagtttgtggactactatttgccagattgatctaggattgatgttccggtagccaactagttcatgattgattatatataaattgggggtcctgctggctacttagcggcaggtcgctgattttttgctggcttaaatcttgtaacccagagctacccctgtaaggatgaacttcgtttcattctgatgcctctggtcttcttcttctctagattgatttggattctagaatttccctagccataaccattgtttgcactgcctttgtttcgatgtagcctgatctgtgacgtacaaatttctctttccacaaagaacaaagatatgtatgcattatatactaggacatgtttaattgagatatagagtgggtaatgtgttaatgtctggcttaatattgttactttgctgtaccactgcaagtctgcaacaacatgttaaactagtctagtaactaataaaggagaagaagctgcagaactgtataagtgtgcagattcttcttcgcatgtttttagtgttttgagttccttttctttttccaatgtgttggtgctacttgctttgaatgtgtttgagttgaactcaggcatgttttgcaatgaagttttactagcagtaaaagacattatctagcaagtaaaggcttaaagctgatatccaatactccaatgtgatgaaggaggttgaatttcactattttagtgtctcaataacattgcatgttgtaaacagtatgacactgactaaaactattttgagggcatgtagtttttgaaggcatgaagcataacagagcctggacttcaactgtgatcttacacttatcactgttgatggacagagtttaagtggcttctaaaaatgtaagctgtagggtaaacaggaaaatatgcttctcggtacatgtgtattccaatggttattgactggatgtgacaaaatttgtataagactgattttgttcctaagaaagttaacttattatggtacaataataagctacaaactgtagcatgctcataaatctcaaatacagtcactttaggctgtgttcgggaggtgaggttgggaactcacctcccgtgcacacaaaacactttaggctgtgttcgggaggtgaggttgggaactcacctcctgcgcacacaaaacggagcgacgcattttcttatgattaaataagtatttgttattttttttttgaaaaatggattaatatgatttttttaagcaacttacgtataatttttttttgcaaaaaacgcaccatttagcagtttgaaaagcatgcacgcggaaaacgagggaggtgagttgggaaagttggggaaagaactcagctggagtagtacaatgagcaagcaatggcaagatatcatgttaacatggtaaaagagtcatacttgagtctttataagttattaagacttcatttatctagtttggaatgcattcgcccatcaataccttgacaatttttgttgctcttttttttttaaaaaaaaagtccgcattaattgtataggagcatgcatttgatcaagtgaagttgcatagaacctattttcttatgatataaatcaataaataacagatacgacaatatatatttttgagagtgtctatagtacttgcataccaatttatgtatctaatgcacaaatggaattaggtactcttctgcttttatgtttccttttcactttgtctttgctcttttgatattccaaaagtaatttccatgttgttagatctggaaagataactttggcaatgatgatccatatatcattcgcctgtagtgctgttatgataactttggcaatgatgatccgcatgtaatatttgtaaccttgtaaatatttcctttttttataaaattacactgctgggcaaagccctagcagttttcctggtaaaaaaaaaaagatctttgatgggagttcgaactacaggacatcacctgcctcacaggcaaacatgaatctcccgcttcttgaataggcaccccacagtagctactgctggttggacaacaaggaatattaccatgactatacaaattttggattttgctctcagtgagtggctttagagtatattcatagaggctttggaaaatatgtatttttgaactcgacgcaattccattcagattccttgatctgtcaactgtactgattcagtatttaacttttggctcatatgtaatgcatcatatctgttgtattttggcaaagatacaaatagctttattccttgttcacagactttcaattatatcatcgttcttctaatttcttagctagctattagtatgttctgtagttgatttgcttgagatatttcgcatttgtgaattagttgcatcttactgatgcacacggactagtttctgctgtagaatttattttattatccattaaactgagtttcttctctttgaaaacaggccagcagatctcctgttttcagagctatgcttgagaacgagatggaagagagccggagtggcatcatcaaaatatacgatgtgtcctacgacgtccttcgtgctttcgtccattacatgtacacagcagaagctctccttgacgagcagatggcatctgatctcctggtgttggctgagaagtacgaagtgaagaacctgaaggcctactgtgagaaattcttaacatccaaagtgagcaacgacaatgccatcacgcattatgcgtttgcgcatcgccacagcgcgaagcagctgctcgagacatccctggcagcgatcatggacaacatgtcaacgctggcagatcgggaggaatacaaggagcttgttgagaaggacccaaggcttgttgtggagatatatgaagcctatctgaacagacaagtgaacactgctgctgggaaggagacagattccagtagtaggaaggggtaattcaaaagaaaactgctatcagagatgtaattaatgttctaaccaagcttttgcatgttcatgctaggcaaagactggcacatcaaattgtcatcctgcggtgtaggcgcagaacagctatttctgtatatgcttgaattgatactgtgtgctcgctactgatagaatgagatctattgccatctttatgtaacatataggtcaactgatatgtgatgatcatcaaacacactcagtatgaacaaaaaactaagtgtaaactatttgcaacgttgaacggttaaattgattaccagggctctgtagtgatttgtgcatcgttccgagagtgcagaacattgcatgaaccggactagcttctactaaccttgatcgatttctttagtgttcattgccatccctattgctacgttcatgcacgtttcatcggcgttgagattaaaaagataaaatatgttccaactagctgaagaacatatattattcggctggttgccaaatactatgagaaagtggtcttacatttggtgaatatttgaagtctcgacatttgaaatagggccttgagctctcaaaaagccagagataagttgcatgagagagtgctaaatgacagttaaaagtggtcccactcacctacatcaattatacttttttacttgtgatgtataactcaaatagagcaaaaaacaaaactcataattaaggactattgtaattctttgcattttcctccattaaccattagattgaagttgccattgtctagcagtaacttttctgaccttcgataaatacaaaaggctaacctttttcttttctaaaagaccaaaaggctacattttctgaagagaagtactccctccattccaaattgatctacatatagtttttttgaagttattcctaaatgatctacatatttgtgttcatttattaagtctattcgttatttgtacattggagtaaatagacattgatgcatgcatccatgcatacaagtatttataacccacatgtaatatcttaatttgttattggctaggaaatagtgagaatgatgcatgcatcgagtttgttgctagagtaaatatagtatgagagatttattagtttttcttggtcttagtataccatgaaatatgtagatcaatttggaatagaggaagtagcattcaagtttctagtgaaacaagctgacaagatccttcaatcctatcatattaaccagggattgcaggtttgcacaagattgaaacaaacaattccgttgtctgcaaaggctcctttgcgtgatgagagaaggtctcatccactgaaaacatcaattacaatttaatataatgatgttgtaatgatctgggaagctgcacttatctgaaaccagagtgtgacgtgatagcctgagtaaatcgctaaagtctaccaaaagcatcaaccattaagatagccagttcaaattaagtaccaaatctggtagctccttgatcagacattcactcctatcctaatagtcagcaaacagttcagatagctgatcatctgtccattcagttacagaagccatcttatttggctgtgaatgcaacgatgcactgagagtagttgcatcactgttacttacagagctattttcttgagttggcaggacaatgcccaaagttccagtaatgaagtccttttgctgatgctcattgggttttttgattgaagcgtgctcaacaagatgtgcgacatcatccagaccaatgtttagattattggctaacccataggtctcaatattcgtacttgacataacattatctggcaataccgcatcacccctttgctttttgctattagggtgcacccgttcaccttcaagaggtcgactcagcttttcatcagaactagctgcaatagaatttcccgttctagacatgaccgagcatccacctagagtagactgggaacatcttgtgtttgggttttcaggatcattcaaagtttgctggtgatgctcttcaccattgtggtttgatatatgcctgctgctgaggcgctgcatcaatgtttgtagttcaatcccttggtgcttacctgaactggaactagttttttggaattgctgatcggcactgtagcttggtgtattcttgtttgaaggatttatatctttttccttcatccttgtatctaggtgatttcctacaccttgagtactgccattgtccattcttaacgtactatctcgaacagcatttcctgcataattattatcagaaagtacatcagcaatcctatcatccctggtacttaagatcgtgcggcagatacctgttgtttgtccgtatgtttcaactccagttttcctgatgcggttatctccttggcatgaagaatcccgtgtttcttgacactttactgttatggaatacatgtaacatattattgttcttaagagattaatatagagaaagggatatgaactggaagttaccaggatgttgactttcagaaggacttgatgaaaacacttgcttagatgggaagcagaagtcctttggcacaagctgcaaatataaaaacattcataccgccatgtccttaaatgattatgatgttaatttaaggaacattgtaatggcagttcaaaagtaccattgtgaaagttttgtgaaatggttacatgcttctaaagaactgagacttgaaatacaagtgaatccaagtaactctgctgataatgcaaaggcttattcttgattaacacaaggtctgaagcatgaaaggcctaaatatgatggttaatctgaaggacaaacatcctcccagccagaagttttgatttatataattacatgtgcaagaatgtttggaagatctaaaatggtaaaataaagtatgattttttcatcgatgaacaatgtggctatcttgaactaatggtgtattttaacttcatgaaagttttagaagcaataaaacaaacaacaggatcatggaattgtaggatacctctctaccattttcactcaaaaaactgagaaggaaaaacagaagacaatgatgattctttacacaagtaagattcacagagtgccttcttttcatcctttactgatgctctagtatcattgtattatagctgtctacttccgtaacattatgtatcagtgcatcttatattattttcactctactgtgcagtgcacgtatagtaataatggcaattattatactagatagtaatataaagaaatgcaaatagtaccatctctagattttctttggtgacattaagatagcaacccttgtgagatggacggaaaacagctacctgaaattaacaatgaaccaattactccatatactaagttagtttgccaacaaaagaaatcctttttcaccacaacaccttacatttttcagaacaatgcaagaccctacagatacaaccatgttatcctcctttgtaaatactttctggtgaactgaagcaccaaccgtaccacttggatcctatcaagaataactcaccattatttcccaatcagttagcattcaataaatattccgtactcagattgtaaagtaatatttatggctttcggtttaattacttatctgaatgtctcttaatgtagcccactctacatgtaagatgcaaacatgaagagatgcagataatgcaataagaggtgataagtaatcagaagaaaaccaaccagtacatcaatcaaagaccaaagtccctttttccaattttaacacgagctaattcccgcatgacgcgaacatgataactcggccaagtagggatgcaaagtgggtagtcccgctacccgcataaaaacccgcttgctaattcatttttcatatggcagtataaaatttagaagaaaaaatgaactagaagtgggataagcgggttaaaaaccccgcttgcccgctccgcttgcatccctacggccaaggaatccaactcattccacagtacacacataatcatgccatgatgctttgtgttcgctcaccttgagagaaaggaagagatcaccgagcctgttcggcgcgcacgacgtcaccacgccgaccacctgatcacaaccaaacgccccaagactaatcaagccatcagcaaagacacgcacaaaactagcgaaacaggtagagccaggagatgtccacactccgcacgcaccagacgtgctcgatacaatgcccggtcgccacggatggccgcgatctcctgccgcttccacgcgcgcgcctcgcctgcatacccacgccacgatgagcaaccgaaaacgcaaaaccaaacacggaatgtctgatccggtcaccgcctccactccaccctcaccgagggaacccagcgcgtggagccacggggcgagcgagaagtcggggtcggtggcatggccgcgggcggcggggccggacgaagccaggtggggcggggagcggaggccgcgcgccgcgccctgggagagcgaggcggccggcgcggggtcatcggggcgaggggggcggaggcgggagggagaggaggccgggccgcggcggaggaagccggagtcgtcgaagtccagcgcgtctgcccaggcggcgtcctcctcctcctcctccccggcggcggcggccgcggcggcgctcgccggttgggacatggaggtttgggcctatggggaattgggggttttggggcggcagcgccggatttcggtttgaatttgttttttcttagggagtatgggcttgattgtttgataccaacttatcgtcctactaaaattttgataacttcaatagtagcaaatgccaagttgttgtatttctaacaagttgttgcatttatgcgatcacttataaaattcttgtactaaattgcacgtacatgccaaggtgttatactaaacgctcatttctcaagttcttacaccaaattgtacccacctgccaaattgatacactataggtgcaatttactctaaattttacatacaatagttcaaattcaatactaccgaaggttttggcactaccaaaattttggtatggcaaaaattggttctaaaccaaacaagccctattccatattagtattatcagaaaaacggacagacggaatccaatggggcggggggcatgagagcacgggatataaaagatgtgagcgttatcttccatattcgtttctcccatcaactcatttttctcctccaccaagcaacaacgctttgccttcctcctccctccatccactcttccatcccagtgatcatcctcctctctccctcctcgactcaagactattgtctccaacgctgacgacatccctatcctcttttcttccttcctataccggatccggagcatgtgacggagtggaggttggagagggcatgagagggagctaattatggctgtgaggtttggggattgtcgtgtctcatgtgtgagaaggaaaggtcctgggaaccgacaagaagatggatgcagccggtctcgatgtatagtgaccgtggagttgatgaaatggatgagcggtcattggttttcttcattactcatcactgttgtatacaggtacgttgcaattgatacccttggtatcaggggattattagtaccaaggtctggtaccccagatatcatgcctgatacctaggtactagggtttggtacctcgagtatcatgcctgatacccaggtacaagcctaccagggtctagtatctcgggatatcgtgcctgatacctcaggtgctaaccgatacccatagcaattaggtctgatacctgtggtatcgagtagagttaaggcgtggagaaggagagcgcgttgtcgtcgtttggctggccagtaagtcaactgttgttgtctcatcttctcttctcccttcctctcatcgacgccttcctccttcctgtattgttgctatggttggtgggggcaaggcgctaggggttgccgttgcttcaacgttggagcttgaccatggttcctctttgctatgtatagcagcttgaaggttttatttactatgtatagcagctgaatggttcctctttgctatgcacgtccaggctccttagtccatatatttggagggcagaaaccatcatcttcgtgcactccatcattcctacgaacactcaaaagcataggctcatctaaagtaatttgattatttaacacaaggttagcattcacctgagagtgaatttccttccccaattgtttggctctgctccttgtaattggacccactatattagatgcacttttattaggaggtggggaagagtggctactagggatgtcctcatcagcctccccctcttgagaaggagtcgtcctcgactcagactcaccaacaaatggacacaaatctttgacattgaatgttgcactcacattggtatattcttgagggagctcaattttgtaagcattatcatttatcttctctagaaccttgaatggatcgtcaccccgaggggataacttactcttgcgctattggggaaatcgatccttgcgtagatgcaaccacactaagtcgccggcttggaaaataacagttttcttacccttgttcgcttgccttgcatattgtgcagttttcttctcaatattcctccttgtgtcggcatgtagcttcttaatgaattcatatctcttggcagcatccaaattcacctgttcctgtaatagtgaaggcaaaaggtccatgggcgtatgtggtttaaaaccataaacaatttcaaagggacaaaatttggttgtggaatgtactgccctgttataagcaaattcaacatgtggaaggcaatcttcccacatctttcagttctttttcagcacagcccttagcattgtggatagagtatggttgacaacctcagtttgcccatcagtttgtgggtgacaagtggtggaaaataacaacttagtgccaagtttaccccctaatgtcttccaaaaataactaagaaatttggtatcatgatctgaaacgatagtctttggcactccatgtagacgaactatctccctgaaaaacaagtcagcaacatgtgatgcatcatcgctcttatgacatggaataaaatgtgccatctttgagaagcgatcgacaacaacaaaaatggaatccctccccctctgagaccgaggttacctcagaataaaatccatagatatatcttcccaaggtacatttggaatagataatggagtatatagaccatggggattaagacgggacttttcaaacaggttatgcaccgctcaacgtgtcgctggacatcacgtcgcatatgtggccaaaagaaatgatcagaaagcatgtccaaagtcttttttacaccaaaatgaccagccaaccccccagcatgtgattcctgcaaaagaacatttcgtatcgagcaagctggaatgcacagtttgttagtccaaaataagaatccatcatgcacatagaatttgtcccatccttttccagcaatacaattagagaaaggttcgttaaaatcagggtcattagcataaagttttttaattgattccaaaccaagcacttttgtatctaattgtgtaaccaaagcacattgtctagacgaagcatctgcaacaatgttatctgtgccacacttatgtttgacaacataggaaaatgtttcaatgaactcaatccatttcgcatgtcgacggctcagtttgccttggctttgcagatatttcacaaattcatgatcagaatggattacaaattctttaggtaataaataatgttgccagacttccaaaactcgaactaaggcataaaaatttgtgattagaatggattacaaattatttaggtaacaaataatgttgccagacttccaaaactcgaactaaggcataaagctctttgtcatagacagagtagtttagatgtggaccatttaacttttcagaaaagtaggcaacatgtttaccttcttgaagtagcacacctccaatgccaataccacttgcatcgcattcgatctcaaaggtcttaccaaagtttggtagttgtagcagcagtgcttcacaaagcttttgttttatctcttcaaaggcatggtcctgttcagctccccacttgaatggaacatcctcctttgtcaaattgttaaggggtgtagcgatggtgctgaaatctttaacaaatcgtcagtagaaacctgcaagtccatggaaacttcgaacttgcctcacattttcaggtgtaggccaatcctttatcgctttaatcttttcttcatcaaccttgatgccagctgcagtcaccacaaaaccaagaaaaacaacacggtctgtgcaaaaggtgcacttagcaataattccatacaatttctctgctctcaaaacagcaaggacttcacagatatgatcaagatgttcatcaattgatttactatagatcaggatatcatcaaaatatacaaccacaaattttccaatgaaagctcgtaaaacatgattcattaaacgcataaaagtggaaggagcattcgtcaaaccaaagggcatcacaagccattcatataaatcaaatttagtcttaaatgctgtctttcattcatcaccaattttcatgcgaatttggtgataaccgctatgtaaatcaatcttggtgaaaatggttgaacctatagatggccatgtgggccgcccggcacggcccgaccgacgcaccgggccgtgcagtgccagcccacgtgccgcactcacagcccaggccggcccgaaggcacgatgggccatcgtgcttttcctcagaataagtctaaattttctccctcctattgggctgtgacattgtatagctaaaaaaagtctattttacctccctcttctttgtgctgtggtatataaatagctaaaataagtctatttaaggtccctattctttagacattgacatttatatgtctatttttattccctatactttgtgtaccgggtctggcctgccagcccatcgtgccgggccggcccgaccgtgccgggccagcccagcgtgctggtggggaggcccaggcacggcccgacagtcgggccgggccggcatgggcccgacccaagtcgggccgtgccgtgcttgggccgggccaaaaaggcgtgccgtgggccgggccttcgggcctcgggccttatggccaactatagttgaaccactcaattcatctaacatgtcatcaagcctaggaattgaatggcgatatctaacagttatagcattgatagcacgataatcaacgcacatgcgccaagacccatctttcttagggaccaaaagtacaggaacatcacaagttgagagagattcacgaacatacccttagtccaaaagctcttttatctgtcgctgaatttcttttgtttcttcaggattggtgcggtaggttggacgattgggaagagaagcaccacgtaccaaataaatttggtgttcaattccgcgtatgggaggaagtctagctggaacctcattgggaaaaacatcctcaaaatcctgtaataaatcaagaacaacactaggcagcgacaatggtaaattgttagctgaaaataggacctccttgtgcaagagcacaaagaacgaggctatggtgttcctcacttctctcaaatcactctttctcacaaataaaaaatgttgtcgtggcagttttgtattttcaggaggctttatgtggctggatggtttaggagtctctcccttactatttgtgtggctctctcataattttcttttctcactctcatctcttttcatgcgagcaacatcagaagagcttatgtcttcaggagataatggaacaagaaccaccttattctctttgtgaataaatgtgtgtttgttcgactggccgaagtgcacagaatccacatcaaattgccatgggctacccaaaagtaagtggcaagcttgcataggaacaatatcacaatcaaccttatcatgatagtcaccaattgagaatgacaagcggaccatagatgaaaccttcacagtccctgaattattcaaccattgcatatggtacgggtgtggatggcgacgtgtttgcaggccaagcttctcaacaagcaaggcactaacaatataatattgttgcagctctcaccatcaattataaatttgcacacctgccgtttcactttgcatcgtgattgaaacaaattatggcgttgcccttgctcagctgcaactaattgagtagaaagaactcgtcgaaccaccaatgactggtctggtgcattcaaactataagcacgcacggtggaagttgtagcagacccaaatgaactatcatgtcggggcgaaataggagcctccaaataattaatatcaacaagcaaatcatcaaaatcggcactagtgatttcctctggatttggaggaattatacgaaaaaaagatcaaatctataaataaatcatatggagaaccaaaggcacaatgctgctgccgaccagtatatactttgcaattacgtaaaagaatatatatatatactttgcaattgccgtcttttggtgctttatcttcgtaaagcttttgttccggcggtttcctaggagcgtttgttccattttttctgctacactctagtggagttatatagaattctttgtttcggcattgtgagaaaaaaaaaagtgagaggttaacggatggcactgggacaacctagcaaaatcggaagagaaacactcccataaatggcatctcatagaatttgcatttatcaacaaaacaacttaggatattcacaatataaaaataggatcggtattaagccttgtatgatctacttatatatattacggaagtggcttttataaatgtccttagtatgagctatccatatgcatatgaactatctgtatagaataaattaagtaatacatcgatctctactcccatctctctctccttctaatgctacaatggcatgatatacaatgaataatgcaatagttaaagctaatatgtgtggaccccatctatatggattatatattttgttgatgctctacatagattccatcaccaacgataaaacacataatttatccaaataacaacaacaacgagaagaattaatcatcggtgtgatgatgtattaataatgctggagcacgactctacgcactatactcgctacaaacagttggattttcaccaatgtggcctatatatcccaggtggttaattaattagtgacattaaaaacctcattatatatagaaagccaaggcgatgccatgagaagaagaaaaacaagaacacacacgtttcaattccatcggaaagaaagaaaagaaaagaaaaaaaaaacaagaacacgctgacaccataagcagtacgtacgtcgatccgtttcatccgtctgggtacgtcggtgatgatcgatcgatcgatcgatcagccgcggcatttctcttttgctatgcatggcctcttggtaacggcgacgcccggtggaggcagcttcgccttgaggttgccgtagtcgaggtagccggtgcccgatttcgccgccggcgagtcgctgctggacgatgccgcgtcgacggtggcctcctgcaggatcgccgccagcacgacgcccaccagcaccagggccaccatagtgcccaacctgcagctcatcctcaccttcgtctccatggaaaattggtgcccaaaaaactactaccaacaacaacagcagctagcagctgcagctgccttcttatgccttattttttttgtgtgtaattattgaatttctcttatgtgttttggaggttgatgatggcttgctgggagagccctttttatgggagactgtttgcctataaatatcaacggcggggctgaaatttagagccggattaaattataactagtcacgggctcgatttttagcttgtactaaatttggtgatcggactcgacacagggaataaccgatgacctaaatttaattataactagtcaccaatatgtatatttgcatggccttagtcttggtactgtttttgggaaaaaaaacagttttagcatgtggccggaaaatgacttgccacactgcctgtgatttaaggcatgtgaaaaaacaccttttgcagatggcggacggccgcctagcggctatgttagcgttatgggactatctacacaaaaattcacagtagtgctgaaactaatttctataggtcctcaaatgcataaccgaataaaaagcgaataaaaattcacaacacaaattaatagaacaaaatattaaaatttatagcacaaattcatgaaactcgtagcagttgaagacgtggttcgatcatgttgctgcatgaagggttccccttcatgacctcatccacctccgccgctgtggacggcctctcccctcttctggatccgcacgccaccgccatggacgacacctcctaatctggattcgctaagtcctcctcatagcctttatcatatgcatttacaacccactagtttgctataaaattccatgtacattgaaacatattatcttatgtttggtatataagcatattatcttatgtttggtatataagcatccaagtatcatatagaattacaatttcatattaaccactatagaacgcattatcaaataagataatatgagtacacgagatgattatcgagtacacgagatgaactggtgtctagagccgtgctaactaaaagactgctagcacggcttcagacaccagcttggccggaattacatgatgttgttcagacaaattcgataatcatccagcaaattcggtaaatgaacgaagcaaaaggccggcagatgcaacaccatgataaagagacagcaatacggtactgtacattccagttttcttctactacctggtagtagattgcatgatgcatctaccaatttcagtccttgctcttttcggtacacactccattgcaggcagcatcatcagttgtcctggagcactcggcagagctgagctcccagtgccggcagcgtgaccggtttctggaccagcccgttgatcccggcacgctggcacagctcctgcacggcgccgccatcatcggtggcgacgacgccagccgcgacggcaatgacgatcagcagccagcagctgttcctgagctccctgatcctgagggccacctcaaaccggtccatggccgccgagggcacggcgcgatcgtcgaggtcgaggacgacgagctggaaggaggcctcggcgctcgccaggaggctcaggcagtgggcgcccgacggcgccgacatgacctggcacccaagcctctccaggatcttcttggtcaccccccggttcatggcgtcgtcgtcggcgaggagcaccctcaggccgttcaagtgagggatgtacggcggggatgcttcgacatgtccctgctgcagcttgaactgcaggatcagggtgacgctctctccgacgccctcggagtccgacgccgaccacatgttaccattcatcatctgatcaagtaatacataaagtaaattcatttgtttcctcggattacacaactcttacaggtgttaaagaacctataattaaactgagaagttttatcaacaaactactgataagtgatgataattctagcatttccagaacgctttctgtcggtgagtcagtgtgtgttaaacaatggctgtgttaaacaatgggatatgtaggtacttgctatgtgcttatcaacagaggccagagagatgtcaaccatttctattacttcatccgtttcatattataagttgcttgatctttttctacaaagtttgattaagtttatactaaaatttagcaatatctaaaatattaaattagtttcattaaatataacattgaatatatattgataatatgcttattttgggttgaagatgctactatatttttttataaacttagttaaacttgaagaaaattgattatgaaaaaagtcaaacgacttataatatgaaacggatgaagtatttaaaacagagcataattgagtacagtaaggcagcaaaatagatttggagatctgcttccagtacttgtatgagagtgtattgtgagtgatcccatatacctgcacaatcttgttgaagtagccgctgaagatatgccccatctgagagctggtagtggccgcagaacgacgaggcaattcgcacggcaaactcctctcaatagcacaactcctagatctcccgatcccgaccttgaacttgacgcaaacgttgcaaccggagaaggtcggtcgcatcgggatccagtcaaggctatacctctcttcacccacattgcagatcctgaccgagaacgagaggcggcacgccccggacccggtgttgcatcggttcagcagggtgcccaccatgtcaagcagcaggtggaagaccctcctctcgtcgccgacgacccattcgggcagcgcgcattccggctggtgcaggaacccagctcccccgcaatgagacaggcagccggcgacgctgatggcctccttgatcagcgcgtgcaggctgaagggtttcctctgcacggacaaatgctgccggttcacggtcacctcgtccatgagcgccgacaagaggttgcttgttcgggcaatggcgtcgacggcgagcctctgctccggccgcattgtgtctgcctccggatgttgcagcattgagaccagcccgactacggagtgcacgggccttcgcatggcgtggcacatggcgctctggatggagctgaacgccctggtcgccatggcggcccggtgcttggcctgcatcagcgctctgtgctgctcggcgaacctgtcccgcatcgaccgcgactcctccagcaccgcggcgtgggagagcgcgacggcggcctggtcggcgacgacctggacgatctccaggtcgtggctgctccacccgccggcggcgtcgtgggggggaagaagcagcaccaggatggcgtagctcgcctcggtcacctccggcgtccctcctccgtcgtagatggacaccctgaggatggggatccgaatggcggccaccgcccccgccggcgccgcgccgacgctgctcgccatggcgagcgccgagtccggcccgagcaccttggcgaccttgctcgccattacgtcgaccacgtcggggtcatcggcggcgacggtgcacgcgtcaccaacctccagcagcaagtcggccgcgtcgtcgggccgggaggtgaggtgatgcaccagaacaaggtcgtggggccggccggcggcgggcatccagacggcgcaggcgtggaggccgagggcgtctgcgagctggagcgcaatggt

SEQ ID NO: 10317 - DNA, 35245 bp, Oryza sativa
ctcaccctcatcgacggcttgaacgacaagttcaacaacctcaagtctctcctcccactgcaagtcccgttccccacctttgccgaagcccgcgctcaactcctcctcgacgagctgaccaagggacatcagcctaccggcgctgccacggctcttctcgcgtcgtcctccaccaacatctgctcgtcatccaccaactcctccaacggcaactcccgcaacaacaatcgtcgccacggtcgcggtaacggtagtagcagcggcaccggcggcggcggcggcggagcggcggtggcaccccccacggcggcggcggccaaggaaaccagggttccaccgcttcacaggcttctgctacatgggtcaaccagggatggcccacggcctttaatccctggactgggagcattcacatgtggccaggctaggctggcccaggtcttctcgggccacggcccggcttcgcaggcgctgccctcaccaacgcgccggcccacgcctacccgccgtccttcgttgctgcgcctgggccggcccagttcgcggccccctccacggtgccgccgactcccatggcgccaatcgccaccacgccgttccagtgaaacggcccctctcagtgggacccacaggtccttgcaggcgcctacaacacgaccacgctgactactccgccttctactgaatggtacatggactcaggtgctacttctcatatgacgtctgacactggtaccctctccatcccccaacgccccacccacaatactcactctcacattattgttggcaatggctcccttcttcccattacatccgttggtcgtgcctttttacattatcccagttattcctttgtgcttaacaatgttctggtttcgcctgagattattaaaagccttatttccgctcgccgtttttcttgtgataactgggttctgttgaacttgacccttttggcctctctgtgaaggattacccaaccaagaacgagatcgtcaggtgcaatagttccggtgacctctatcctctcccggcgtatgcgtactcctcggcgtcctctgcacgtgcctttgtcgctacctccaccaacaccgacctatggcatcgtcgccttggacatcttggtcatgaggctcttactcgcttggcgcaggcgtctgtcattccaccaccaaaagtcaccacctcgctttgtcatgcatgtcagttaggtcatcatgtgcgtcttcccttccccactagctctagtcgggccaaggcaaattttgatttagtacattgtgatctgtggacatcaccaatacctagtgtgtctggatttaaatactatctcgtcattcttgatgattgctagcattatgtgtggaccttcccactccgttttaaatccgatacattttctacactatctcacttctttgcttttgtgaagacccaattttccacgactattcgcagcattcagtgtgacaatgatagagagtttgacaactcctccgctcgctctttatttctcaccaacggcgtctccctctggatgtcctgcccacataccttcccacagaacggtaaggccgagcgtatgcttcgttctctcaataacatcactcgctccttgctttttcaagcatgccttcccgcttcctattgggttgaggcccttcacatcgccacccacctcataaaccgtcatcccacaaaaaccattcagcatcacacccctttctttgccctccatggtgcacacccctcctagtcccacttacgagtgtttggttgcaagtgttaccctaacctatccaccaccgctccccacaaattagccccacgatccaccccgtgtgtgttcctaggctatccccccaccataaagggtaccggtgtttagatcttgccaccaacagggtgatcacctcacggcatgtggtgtttgatgagtcagtttttccttttgctgagatgactaacaatgaagtggctactgatctggagttcctttaggatttctcagcttcacttccgacgccgattggacgacgcccctgccctgaccacatcggtccggcggcccgcttctccacgacggccccgcacaccgaccccaacaggccggcctctccgacgcgcaccggccccagcaggtcagcctctccgactgggcttgcctcgcccagtcccccagctgggcctccttcacctttggctaggttgcccagcccctcctggtcggctggcgcgccgaccgggcctccgccgactgcaccatcaccagctcagccgcccctcgctcggttggtcggcgcaccaaccaggccaccagcacctcttcggcccccgccgaccggcgcccccacacgcccccagagtgcgcgtgtgcctggcgtccgcataccgacacagctcggtctctcacccgtcgtcaacgagcactctatgatgacccgcggcaagaccggtcttcgtcagcccgtccaccgcctcaatctcagtgtggctaccctctctcctgtgccgcgcacgtatcgtgccgcacttgccgaccccaactggaggtccgccatggaagaggaattctccgcacttcaggccaaccacacctgggatctggtgccccgtccacatggcgccaacgtcgtcaccggcaagtggatctttcgtcacaagtttcaggcagatggtagcctggacaggtacaaggcccgttgggttcttcgcggcttcacccagcgtcccggcattgactacgacgagaccttcagtccagtcgtcaagcccgccactgtccgcacggtccttagcctggcagtctcgcgtgattggccggttcaccagctagatgtcaagaacgccttcctccatggcactcttcaggagacagtttactgcacacaaccggctggctttgttgactccaccagacctggcatggtttgccgcctcaacaaattcctctacggcctcaagcaggccccccgagcgtggtacagccggtttgccagtttcctcctatcacttggttttgttgaggctaagtcagatacttctctgttcatctaccgccacggtgctgatatggtctacctgctactctatgtggatgacattgtgctcatagcttcctctgatgctctccatcagtggacgatccggtcgctacagttggagttctccatgaaggaccttggcagccttcatcacttcttgggcatttctttcacacgccagtcttctggtctctacctcagtcagcggcagtactgccttgagatcttggaccgtgccggcatgtctgactgcaagccgtgtgctacccctgtggataccaatgccaagttgtcagctgttgatggtgctcctgttgctgcccctaccgactaccgtagtcttgccggcactctgcagtatctgaccttcacctggcctaacatttcttatgccatacagcaggtgtgccttcacatgcatgacccgcgggagccgcatcttgccgctctaaagcgcatcttgcgctatctccgcggcactcctgacctcggtctccacattcggcgttccactccggtcgatctcaccgcctactctgacgctgactgggcaggttgtcccgacaccagaaaatccacctcgggttacgctgttttccttggtgacaaccttgtctcatggtcctcgaagcgccagcacaccgtgtcctgctccagtgctgaggcggaataccgggcggtggccaacgctgtggctgagactacctggcttcaacagcttcttcatgagctccatacccctccgagtcattctacactggtctactgcgacaatgtgagtgttgtttatctctctactaacccggtgcagcatcagcgcactaaacatgtggagattgatctacactttgttcgtgactgtgtcgccgtgggttcggttcgtgtgttacatgttcccacgacatcctagttcggcgacatcttcaccaaaggtcttcccagcacgatcttctcggagttccggtccagtctgaatgtctgctccgtcgacgttccgactgcgggggggtgttagattgcgattgtgtatatttgtttccctcccttccttatcccctccgatattgtttctataaatcggttgcggtagatatggaaggcttgggcctatatgtactctgtcatatcgataatgcaatctatcgtgttgagccaatcacactttcaatatattccaacctggtccagaacctgcaattgatagtaccagatgattcagatgaatatacctatcaagtatcaacaggagtagcaaatatccatagaactaaccccagcttgagcgatgcgatccaaacaagttgatctagccatatgggcgagggcatgcactggaatgtgacaaggtgtggcagcagcgggggatcgacgacgttacttgacggtgagaagggaggagatcaccggcgaggaggcccatgtgatggggaaggagcagggagcccgacgaacttcttgggcgacaccgtgagtgatggcgatctaccagggtggcaccatggggtggggggtaggcagtgggcgacgaacgacgctcgagctccgctgacccatcggagtagaaaggatgcgcgaagagggggtgcccggcacggtggagggggcggttgaggtgtagtgggagggatgacggggcaacggcggctcggcgcgttggcaggggagaggtggcgtaatttttgggtgagctgtggtcgccgggggggttgggggggtggggagggagggggtgatgggaacggggaggagaggctgagccgttggattcgttgaattgatagatggacggtaggatttaactggttgatttcacctgtaggattggagggggcaactccttctttttatattagtatagaaattggttattagatcggttataggtgaattggagcttgtaatgggctatactattaaacttgctcttatatcgaactagcctataaagaacgggaaaactccttgaaaaaaacatgtagaagattgcaaataatattatcatcaacacatgaggggtatctctaaggcaagtataataacatcatgcgagcatactattagccggtccaacttagcattaatgtgctatgggtaacctttgtaaagcttaaccgagcatcgtagggcttacttcatcacacatagctgtctttactttagtactttagaaggggagctcacatgaaaattaatgtaacttcttttttaaacttttctttgttttttcatggtactatcaaagggctcctattatttttccatattttttaattcctttaggatttgagaatcgtctacttcaatttttatgtttttttattcctagtttttttctatcctgtaaataaaagagaccttaagattaggaagaggtcttaaacattatttgcgtttaccacaaataaaaataatgccctgagaaccagccaccatggatgatggatgggatagatcgatctccaaatacactatgaattattcaaagaagcgacatcctatgtataaccgatcactacgggagaagttatttttgctgggtcaggctatttccacaatagtcccggtttaaaaaagaggccggccatctttagtcccagattttccctcccggttcgctacctaggggttacaaaccaggagagataaagggtttctccggtggctgtaattttcaagcgatatgtggcgacctcactacaaatcgggcgcccctactactgtgtgctgcctgacatacttacatgcacaacctccatgcatgtgaactaacgtactacctctattttttaatagatgacaccgttgactttttctcacatgtttgaccattcgtcttattcaaaaattttatgcaaataaataagatataaatcacacttaaagtactatgagtgataaaacaactgataacaaaataaattataattacataaattttttgaataagacgaatagtcaaacatgtgagaaaaagttaatggcgtcatctattaaaaaaaacggagggagtagctatatcccctttcactcatctcacttgtaaaaacaaacttttaaacgatttttctattaaaacaattatacgatctaaatcgttatattccctataactaaatccctacaatcagatctcacgcaagtatattttgataaaaaaatcaaccattgtttcactctttatagaacattgtttcagtttactgtataaaatattttaaagaaatacaacatttaaaacggctaactgcaacatcaacaaacacttatatgaaacattaagtccgaacaagtgaaacacaaaaataatcatatgaaatatatgtttttttatgggaaagattgccatgcatttggccaacaatataattttataacaaaaagagttatttacagtaaaggaaaaaaagatcaaagttattataaatttgtaaccaatcaaatactatttgttttcgaagcatttaacacaaatacttaatgttttgatgcatttttatatatctatgatttcattaagttgtcactattaaaacattatgaaatacttactaaaacatttcagaatatcatgtgcaacttaaaaatccgtttaaaaaataaatattttttcaacggaatataactacgtgtgatcttgttgtgaaatatttactcgcaacgaatttaatggtgcaattatatcgtagattggaaaaatagtttagaagaaataatagttacatgcatgcatatgaaggattactacacggcataaaataagaataagagtaccatgtaaagaaataagcaacaagacgagagggcgcccgatcttttaggcatggattgggcacccgatgggaagcattttcggatacgttgttggattcaagtgttgtataatgtatagggcacgaaacatgataaatcattacttcgttaggactcatacatgtttaattttgatgctggattcatttccatataatactttaaaaactttaactatactattaagcatttaattaagccactatttctagtgatatttgtgcttgtcacctcacctcttgggcaaacagtctattttaaataaaaatcattgaagggtatattttcaaattttgaaaagtacaagtctaattctaaagaagaaaacatagcatccaagacatgtccacatgtgagtaatgttatgtacacagaagggaaaattatattatacttatgcaaaacatataatcctttattttttaatctatgatgccgttaattttcgacataccgtttcatcgtattaaaaaactaataaaaatgtcacttattatgttgtggcatcttttgtcgttaaagaaacttcaaatatgacttatacttaagtatatttatattgattttaaaataaaatgatatggtcaagcgttatttaaaaagttaatggtattgtctgtcaaagaacacatatagtttgtaggattagtaccagagagctctctctactatgataccctctctaaaacctacattgtggatgctctaagctagtactaagcagtgtacgggtgaagattcgtaaccaaattggaggcttttcacttagaattgaaattttgaattgagacggtattcgtcaggtcacaatccgattttggccaatccaaaatcccaaaccgtgtccctctcactccgcgcgtgcggctcactgctggttgtgacgggcggcgatgccgctgcgccagcgccaccccaccccacccgttcgacgaaatgcggcgcgccgctgccctgctccgcctcctccgctccggggccagcgccggcgtccgcggccgccccgcctgcgcggcggtccacccgctcgccgtcaagtccgggagcggctccgacgcccgcgtggccaccgcgctcgccgacgcctacgccaagtccggactcgtcgaccgcgcccgcagggtgttcgacgaaacgccgctccgggaccaggtgctctggaacgtcatggtctcctgctactcttcgcacggccttgtgagggagtgctgggatgtctttggctccatgaggcggtctggttttcccggcgatggcttcacgttcagtgccttgctcagtgtgcgtgcttcttcttcttcttcgtgctatgaccatgccaacctgttgctggtcctgggaagctcggtgcatgggattgtgatcaggttgggtctccacctggatgtggtggtagccactgcgctccttgatatgtatgccaaatgcggccaagttgctgaggctagccgggtgtttgatgccatggtgctgagaaataccgtatcctggaatgcaatcattgtttgctatggtaagcatgacagaggcaaggaagccttcgaccttttcgtgtcgatgatgagacatgggttttgccctgacgagcttacgcttgccagtctacttagttcctgtgccgacatggcggctgctaatgaggctactcagcttcatgcttacactgttagaagaggcttgcaagactttctacaagtgggcaatgcccttatcatggcttatggtaagaatggttttgttcaagaagcaaaacgaacatttggtatgatccataacccagatctagttacatggtcatcaatggtttcttcttttgcatatcttggacttgccaagagtgcaatcgacctgtttgacagaatgctccaacaaggcatacgggctgatggcattgcatttcttggagttctttctgcgtgcagtcatgctgggctcattgaagatggcttcaagtactttcttctaatgacgagggactacaaaattgatccaactccgcagcatcttgcttgtctagttgatctcttagggagagctggtaggattagagatgcctacgaatttttggtcaatatgtcctgcgacgcaaatgttgatgtcattggagctttccttggtgcttgcagaatgcgaggaaacattgagtcagcaaagtgggctgcctctaggctatttagtctaaagccagatgatccaatcaattacctgcttatatctaatacgtatgctgctgcaggagattggaatgagcttgcaaaggtaagaagtgtaatgaggaacatgtgtggcaacaaggtgccgggctgtagctggatagagataggtggaattgttcagacatttgtatccaatgatatgatgctccatcagtcaagagagatgcaaagaatgatggaacttcttgtttcattagtggaacaagattgcaatggtgatgacacaatttgcaatgatccatcatcgattttaaaatggcaagatttttatctggcatttgattaattcagctgtttgggataatttcacaatggaatactgtcagagcttcctaatgtgactattctcaggtcattccgagatgtatctattttactgtttttttatcctttgattatatacacaaacataatatgcttactagaattaccttgtgcaggttttcacttaccatagacatgagataatgtacacccaggaaggaaggaagtctaccgtttcttctaggtaatccatgtaaatatcaaaatatggtataacagccacatactgatttttgtatgtaagcaaccatatttgttttgggcaatcatgtgtaccagtcaactactaactcgggtcagtaagtaatagtaattattttagactggaaaacacattatgaacttaccaaggcaagggtggatagtcctgaccaaagggagggaggggactaaacaagtcaagggactgagagtcgcatgcatgaccaggctcaggatcctctctgtgtatagtggcatggtacctctgttgtgtgccttggtaggacagtggagtaggtaacttgattgggttgcatcagtgttgcctgttcatgagagtactgcaagaacgctgtaaatacaagccatggacctgatgcacaggtggggtgaacattgggtgtagcacatcatggatttaaggatttaagtggtacgataagccttaaacacaccaaacaaaaaaataaattacttgtgaaaaaggccccaaatgttgctgataggagagtattacttatggaacttcagatgttttgctgaattgtttcaatactgttagtttataacaactaaatgaaagctttattgatttcatttccttacagctggtatgtgcaaaatcgcctgcattggaatttggaattgctaaaattccttcagcatttattggttaatggtggccaagcagaataaggtaaacctactataagcagttcagcagcaaataccaatcccaaagctcatagcttaagctatgatcacccagtacttcacctctttagatagttttcattaaatatcctgatactccgaagtagagtgtgaaagagaaggaaaaaaaatgaatttctaccaagaagtacaaagcatcttgccattgatctagtccattcataccttggtcacggtatcactcctttctcacattgcccacattgctctattcatacatttggaataagggaattcttaccatttccgatgggaattgaactgattcttgtgcatttaaaaggaaccctacatgattatattatatttttcaaccattcaatgttgctgaagacaaaccgatttaagaattatctaaaacattccaaactgctacaatcataggaataagacacatttaggaaatttgactacctctctttcaatcatgcacaacagcccaatctgatgctatggagacagggactttctgatgcaagtctggtctgtatacatttaggcacttgaccgtttcaagttcagttacctgcttgtgagccaagagatctgtgcggctcaatcgtggttgcttgcgctgtgggaaagtttgatgagccaaacatccagatgcaatgaggtgtgtcggccatactacacttcagtttctcatacttgtacgtaagcaccaagaaaaaaatataacaaagttaaagcgatgaatatagaacattatgttttgggttcagatcgaatgaagaataactcatacgtgctcaatgtataatgattacttgagttataaggtattctccagtattacctatggtagttgccatccaatctcaaaatatagcatcttaagataacattggacataacccagtataacgaattcggaaaggcctaggttgctatattttaggaagaagggagtatatagcaataggaaacattagactaggtctcattcgtcctgctcaattatatagcaaaagtagccatgtgagagaagaggagagagaagataaaaattgttgttattttattttttggctagcctcatgtatattggtagttcatatactaaggacgaccatatggtctactcataatatataagctaaactctagaaattgatcctctctggtggctacattgtggatggcctaagaatataagatgtcaagaatattctgattaattgatgggccgcaggtctaggctcaagtttattgcttatttttcactacttgttccttccgtgagctccagtgtccaaaggagatatgaagcattcacttccttttcttgactgagacttttttttaggacaggcttaaagccatcttgactgaaactagagtgcgtgggttaggattcatcgggatgttcatccgctcgtttcccttccaacattggtaggctgtcgttttggtaggatgacgattctaatcccttgagtccccttgtagctttttcgttcaaattcagtgtgaatagttatgaaaaataaaaagaaaatgacaatgtagactatattactaatatctagagtgaattgcactttgggccatgttttattgtcaaagtttcactttagaccaccctgtacacaatcttttcattttggactaggtaactttacctttcttgcgtaatggaccactctaactctttacgttagtgatgtctagcgtctcttttgacaaaggtatagcaagcatttaggtatgaaaatttgttggcatgtcgttaacaatttgcttgaaatcatcgaaaaactgaagatgtggtttggggtggttcattgtgtaacaaaggtaaagttacctagtccaaagtgaaaagattggacaaatggtagtttaaagtgaaactttggcaataaagtatggcccaaagtgaaattaactctaatatctatcactccaccaaaaatcattttcaaattctatctactccctccgtcccaaaaaaagacatcttggttttccgtgtccaacgtttgactgtccgttttatatgaaattttttataattaatattttcattgttgttagatgataaaacatgattaatactttatgcatgatttgtctttttaattttttttcataatttttttaaataagacggacggtcaaacgttggatatgggaacccagagtttgtcttttttttttttggacggagggagtacacattaagaaacgaaaaagacaaaatcagacatgaatagcaccaatactattcatatgctggatttatctttttttttatttctcaatgtgtgagttaagttttgatttgatttttgtgcagtagtttatatatatggtatgaatgttgtcaatttttaacgatttttgaatcacgtttgagtagacgaggggacattctcttaagagtttaaaacaattgttcccaagatatacacagtggtagtaaaaatattcaagtttgtactatcaatatttttgtgataaaaatattgtaaagtaaagtatatattttggggcaatttttattaaagttctatcagcatgcaaataccacacacccaaacaaattttacaaactttccgatactgatgttttggttttttctttatccaatttattcgtgtgagatgacgtcaacattgcctaagaaacgagaataaaaatagatgctttgcttgtaactcgtatttaattgtttccaacaaactacaaaatgatgcagataataaaggccaagaaattacttctccgacaaatatatacagtatatgtcccaaccaatttgagatccatgagtacatattaggtgggttcattagtgtttttttcttatgggtgataataatatgtgcaaactgccacagtttcttatgggtgagatttatggagccaagtacaatgtgccacaattaaatttcttccagactagctctatatacagtacaaaccatttccttctgctgtttctcaatcattcatgacttgagattgtgaaagtttacaggtcaaagtaagatcaccgacggacgaagacacctccaatcattcgtcatcgatacccaagtatatatataggattaggatgcatctgggaattcgtcaattggtttcaatttctctaaattccagtagcacgtagccgatatgcgcatagcactggcatttttttgaattggcatatttgcattgccatggatccaattaacccatatcatctgtagttgtgtgttctcaattgattttttcagctgcaatgtggtatcgattttctaataatcaaacgctaccaaaactcccaaacctttctttaaattcatggcgttgcattgttttggcacgtcggcattacacttcatttgtcatgcctagacacaataaataaataaacaagtaaaaaataatgaagtgatgaaagtaaaatagtgcatccaactctcggtatttgattattacgaatttcataattcagaaatcagaatgaacctaagtaccctgcaagttcgttgggggtgcaagttcgttgcatatttaccataccctatactttatgtaaggtcccattagagctttttcaatgtaaataaatccaaaaagaagtagcaaagtgccaaagtggcggcataattgacaaaattggccatgacacatccgcaaccaaaggcttgttccaatcatccttgcagacatatcctctaaaaagtcaatcataaacagtcgtgttctatcatcttcaaaattttcacattaaactcaggtctccatcggttggccatgtcttattataagccataacggcttattagcgattaaaaaatgatatgtgagtaaaatttttgtatatatgttcttagtgattgaaaagttaaagctgaaaaaaaaactatgttgaaaagcatcaaaatcaaattcaaaatcaagttttaaaatttaaatttttgccttctgacttactgttgccaattacagtaatgggagagagtggcaaagtactgaacattatatgacctagttaatcacccaactactgatgtagctcttgttgaacaccttgactgctggcaactgtataaagaaatgctagttgtacttgtatcgccaattcaagccaaaatgctcatgaattgaatgcatgagaccgtccactctaaaggcatttttgctagctcttgatttgtgtttacagagacttcctacatatatcccatgttatataggattagaatgcaacaggaaatccaaatgcctggattggtacctgccgcagaaaatggacttttgcaggcggcaagataatgccaaccgctagagaaaatgattttccagaaaaaaattaaatccccaaaatccctttctaccatctcaaccaagaagttgccaaaaaaattgaaaatgaacatgaacatcattcaagcatcaatccaaatacagagcatcacaaatatcaacattggcatcattagcataacagattaacaacaacaatctgccggctgccgttggcccaagtgaacccgctgccggctttgtcacactcgaagttgtcgtcatggccacggtggactcatggtcgtcgtggtcactgtggactcggtgtcatcatcgttggattcgagcaccaccggcgccggatccacctcttccgagcacccccgccctcccgagcaccgccaccagagccaccactgcctgcacgagccacctcactgccgccatccctcatcttcgccgctgccatcagtggggaggaaggaggaggcaccggatctgctccccgtcactccctccccccgcgccgttgatgccgaaagccaccagcaccgcttccgaggcctagtggcgctggatccgccctctcaaggcccaccgacaccagatccaccctctcgaggcccaccggcaccgtatccactcccaaggacctccccgttggtcgatgcggcgacagtggaggcaatggcagccggcggcagtggaaaagggaggccagagaagggagggagaaggagagaccgagggacaagcgagaggcgagtttggtgggcgatggattttattcacctcaaaagttttttttttttgcagcggtcctcttgtcgatgtttgagatcacgactacagtatttgaatggtatggggatcgttggtaccagggtatatgtgagatcgaggtaaaagagatggagacatggatttttatacaggttcgggccccttatctgacaggtaatagccctactcctgttgaccgaagccggtgttgcttctttattcatctgaatcacacaagtacaataattggataacccgtctagctgtcgtcgacttggcggctagataaccaacttgtagtcgacggcagggtagtcttcctccttgaacgaactcatcgagatcagagatagtgctagatctcttttgccggccttcgcaggcaccgtattgggtttgtctaggcttatctctgatgttgatatgtggcagcgtattggtttgtgttgatctatatgtcttctggcttgtctcctctcctcctagggggttgtatttatacccatagatgccccctgtcgaagtaaaactagcgagataaatatggatacgatcctagtagtcctggttgtttccatatagaactccttttgtcattccttattcggaactccttctatatatgaggtttgttttcgtataagatatggtatatggtgggtcctgccgagcttagtcgattattattgggtatgtggtatccataaccctaacacctctttacctaccgccggcgaaaacgcgattttcattggtgtacacttagaggttcgcctcgaaaaatagagttgttttttatggcggacctcttagtgcggccgttaaatcggttttcattggtgatccgtagccccctatccctcgatatgtttgtgcttgcggttttcgcgtacggccgctagcaaaaattatagggcgacatcatgaaaaatcgttttttatagtagggattcttccacaagacaaattttgcaaatatctcgcaaatgttataaaatgtgtctaaggctattcccagtgtgcaggttccacaagagtttccatctcattagatgagatgtcatatagactaaacttatgacatgtcaatgattttatgaatagagagaaaaagttgagtatcgtctagatgaaacttgatttgcgcacttacctatacctcggaaacataatgaaatcccactgaatcatttcatcctataccttggaaatgaaatgaaatccccactgtgaccaaatagtttcataataccatttaataattaaatgtcatatgtagcatatgaaaccactaaatgaaactatgcattgaaaatttttctttcattcatcaaaccaaatgtttttagattatggctgcgttcgaatcttataaagattcacaaatacgggcatgcaaaacaagaaagctattagcatatgattaattgagttttaattattacaaacttgaaaatgatatatttgatactttgaagcaactttcatatagaaagttttcgcacaaaacacgccgtttagtagtttgaaaagcatgctaatggaaaccaaggtaaaatcttcatcttcatgataaaagaacggtgcctatgtgacactcttagaaatcataatatgaaactctctatttggaatggcctgaaatgtcttgtaggttgacttttaaaataccacttgaaagtgtctttagacgaactatggaactcctgatattacggatgatttgaaaaccatctctgttaagatgtactacacggaaggtttctgttgtaaggatttgatttatcttcgttcatttttctttctgtttttctatatatccaattgtcgacctcttcttctcattcaaaatatcttattgaataaactaggattaattaagttcatccgacatctctaaactttcatgaaaatctagaaaccaaccaaaaatgcacggttcaacgcggaactgttaaaaccatagagtagttcttgacttcttggaggagggttattttctagactttccagagtaaaatggacttctctgttgaaaccttggtaggtccgagaataatttaaccttaattgcaaaaaaaaagtttaggataatatgctagcacaaataaaaatgttttaccacgcaataaattatatatgaacaaaagtagccaataaatatatgagttgttgtaaccaatagtagcaaccatgcatcgatgctatggattgtaagtagccaatcttgtaatatccttccagccgtgttcattgtttcctatgcactctaagaattccgatcgacactcctagcaacaatacttttcttcttcatcgcacttaattagggataggaagcatagggaactagaatcatacatcctccatgagataaaggatcagctccagccaactgatgcataaggttgatacatattgcgatagaagttcaattcggcagccatccgtacctgccttacctgcgacttgttcccgcaccacactgcacaagggaagaaggcaacacagacatagctagagaacaacagcgatccttcttctcgggcttctaaactatgttttcacgaagtttattcattagcatttttttagaaaacgtttcaaatcattatcaactttataatatttgtcacttttaagatgtgaaattaaagatttatcacttacagtctatgacatgtgagccctcatgtgtctacgacatgtggatccagtgacaaatctataattaccacttgtaatagtgccaaataattaaatatctcagggaagtacggttggcacatacacacaagtggagggggaacttacatcacttggatggagggtggaacgcacgtgacgggaaggggtatttttaagatggatcaaaaataaaaaaaaaagtatcgacatatctaatggttgaaatgaattaaatatcaatggttagatgtattattatttattatagagtgaagtgcacagacggtctctaaacttgtttgagtgtgtaatttaggtccttaaactctcaaatagtttttttttaggtttccgaacttgtcatgtgttcatataaatccaaacaggctctactctacttcgtgagctaatgtggcatgccactgtagcacctacgttagtgggatccacaagtcagttacatagaaaatataaaattaaaaaagagaggagaaaaaaatgttcttaatgtttttcctattggtgatagacatgtgggtttcaatgatacagacgttaccatgacataccataccagcacacaaagcgggttggagctcgattagacctaaataatacacgatgcaagtttagagatcaaaaatgcattttgagagtttagagacatagatgacacacatgcataagtttggaggctatttgtgcactttactctttcttataatatttttttctaatttattagagcgttacataacgatttaggagcgtgtacaagatgtttaacgaagtcatagtatataatagatagacaaataaataaatactactatatatcttataggtggaagacatgcatgtaaatagactttaaaaacttataccacacaaaaataggaaaaggaaaaggtacatctgagatccctcatctcgtcaccgagttacaaaatcgttcctgaactgaaaaaccagatacaacgcatcatccaactttcaaaaccagtgcaaataaggtccgtcggttgtattgtccttggttatgactgacatggcgcttatgtaacacttcaccctcggtggtattatccctttgcctaggtcttcatccacgtggcattgacacgacggttacatagcaatttggtaaaaaaaataataaaataataaaaacaatggggcctactggtcagatccccttatccttttctgtctcttcttcctctctttcttgcgtcaggcatggaggaagggcagaggaggggacgcctctccatcggctgtgggcaacctcgatggtggcgggaggtggccccggctccggtggcggtgaggccagcggcgtgtataatggtgtctcgggctcctactcactctcgttgccggcgccggattcctcatcgatgatgtagaatcctccaaatgcagtctgctcatgtctaacacagggcacgcattcgtcaatacacaaacaaaattggccatatccaaatgcagtctgcactgaacaaaatcctccaaatgtagtctgcagttctgcactaaacaagaacgattcccaagttggatattgggtaaaaaacgattttagcaccgtcaattttcctagcgcggcaggcgcatcaacaacgcaaatttaccaaaaccgaaggaacgagaccaccgacagagctaccaacgatcttcccttgttcctcgagaaggacaaaggcatcacaacccccaagccaggaggagcagcagtagcggcaaagcatcagaaccttccggagctaacccaagggcagcaacctaagaatccaaccgagatcaccttcctcttcgtcgacaggtatcgcctgcttaccttcctccccctgcgtagcggcggcgggagcatggcaggaggcggagcagcgcggcggagaggagggccggcatgacggcggcgtcactgacgcagcggggagaagggccggcgtggcgagcggtccttggatccacctgctggtggctaccactccattccctaggccctagcgacaccgcagccgaggccacctcccgccacggctgagccattagcgcataattaattaagtattaactattttaaactttaaaaatggattattatgatttttaaagcaaatttcatatagaaaacttttgaaaaaaaacatacaccgtttagtagtttgggaagcgtgcgcgtggaaaccgaaacaaacaaactcactttcacctcccctagagcagagagaggaagaaggggatctgatcagtggacccccagcatttcttattattttttctagatcaaattgtcacgtcaatgtcacatgggtcgaagacctagtcaaagcagccatgtagacgccacgtcagccaaatcagggataaaactattgaggatcttgtttatattggttttaaaagttggaggatggacgaggcacctcaaatatacttttacccccaaaatatacttaaaagatactaccttcatcttaaaatgtaactatttctagcacaataacttgtcctaaaataaagttttttctccacctacctcctctcaaccaatcacaatcattcccctttacctactttctcttttcaaccaatcacaccatttttttaatcattttttacctatatttatatttttaatagccgtgccgtcggaggaagtaaatcagtactagacctgtttaaaggacagcaatatggacaatatcaacctgcccactcacaatatgtgtgtgtgtatacagccataggattcattcgtttattcacaaacttcacttggtcctctcaaaatgaaaaaagaaaatgcatgcctacagttcagcttgattagatgcctcaaaagtaactgaaggaaaaatacttcctctcttcaacgtggcaccggcacattacacttgtattatttagaaagcaacggtccaattttaattgttacactcctccataataagattaggatgcatcaggaaaatagtatcgactttttctgcttgatttcgtcagttctttcatgctgaattcaccggtgcccaaagtagccgttgccgatgggtcgtcaggtgaagatgtttgctcatgttggtactttggacagcgcacactacgatcgatctgtcgtaggcattgccaaaagttttgctcaaaaatcaaacaagattagcattgaactgtgcgactatttgagattttttactttccccaaaatctcaactggaattgctcggtgtctacaaagtttctacgtagagggctaagtcaaaactttaaagtcgttttactctcgatttgccccaaatggtggttcaaactttacagtcgtttcacactcatcacactcaaatcaatggcaacattcaagaggtagattcaacatgaaacagtaatttcaaggcgatttaggcagtgagataatagcttggttaacttggaacgtcatggcaatgtgcagtccaataaacaaaactaaccacactagctttgtttttttcttactttgatgtcacaaggttaactgtaatgaatcaagaaggctcaaacttaacatacacacaccaaagccatccattcctcaaaataaatttaacaagcttatgcacatacaatcgaaagggctaaactacggtagacatcattcacctgatcacccctactagttattccaacaattgcaattttacaagtggtacagacagcatatactagtagtaaaaacattatcactgaccttctaccgatgatctaacgaaggaccttctccaccatacctggaaagctctagtaaggttcgggcactctgatcctttggatgcaaaacactgaaaccactcctcaaatagacactgctgctgcttgagtgggagggttagtagggcctgtcctagattttcctccaaagatcttacatccagacctttggagcatcgctgaagccagccgaaatcaagcaacatcgggctgaaccatccgtagaagaggaggctcctcagctctccacggcactgaacttttcctttgccgagtgcgatgaaaacactagcagatattcggcttagttcatacctcatcatgggtgatgcctgctcatgtatcctgatgagcctgtcttgctttgcccacagctccacaaactcttcagccatgtcaatattcacaagaatgtccaagagccagttgaggttctctgtctgctgagagattctctcaataaatggtttactgcccttgataactaatgcttgagcagtgtggtttgtagcctctgttgcttcgtcataaagatccactagtgaatttaaacaggcataacagatattatacaggctctctctgtttagccctgccatgtctttttggtagacagaacttttgcttagaaggccatttaccaaagattgcatatcttttcttgcaccactgttggtgctgctcgtgactgattggataagatgcactgtgaggtcttctgagctgctccagctgtgaggccgcaatctagccagaacatcttgggatattgcttcatcaaaagtacatcttgcaaagagattcttgagcttctcctcctcgttctcattccatggaactgcttctatgtatgacaaacacaatttaactcctctttcaaacatgattgatgaagacacctgcaattaaagcattaataaacaaattatgtacgtgattaattagttggcatttaataaactcattaccaatgcaagaaagaagcatttaataacatattattctgtaaatccccacttgagaaatatacatgctagaattgaaaagatgttacaaagatattggacagcaatggtggctgctttatttggatcactagatagcaattatgggcaacaggaatacttgcttttaattgcgggcctagatgcattcaaaccactaaatgcatttgtagctgactttcatagctgtagaatgtgatctaatggacatcaagccatagaatgtgtatggttacaagacttatagtgattgtattattatctaatccatgatttaacatattaaacaaacaataccagcatgcaaacaattcacatagaaagtgagtgatctacaacatctaatatggttataattatatacttacatatcactttgcataacttacatgaaagcaatggtttaataaaagcattagatgatattaaatcactaatatcccaggtcaaatgcttctcacacaatcatatcatattagtttcactcgaatgctagagctatcgttgtttggcatatgctgattataagccgtaacggcttatcagcgatcaaaaaatattccgttcgtaaaactttatatatgtgaactagttagcgatttaaaagccaatgctggaaacataaactacaatgaaaaaaacctcataatcaattcaaaaattaagtttccaaattaaattttggcagtggcttataagctgaaaggcaaacgctggggctctaacttgtgcgcctatcaaaaaaaaatgtgaaaatgagtattttggtaacaccacactggatatctaccaccaaaatggcttcggaaaatgaacatataaggaacacaacatcaatgtaccgtgaatgattgtttggttgcaatgcccactaaatttcctgccctgttgtgggtaacaaaatgccatccattattgcaagtagtactacttcttttgcaaccacatcatgctactagtaacacaaaatcaattaagagaagctgcttaagcttaattcgtttccctcacctcgagcacatcaatggagcgcgacacgccagcggcggcgagccaccgcagcggatcaggctggtacatgagctcgacggcggcgcggaacgcctccacattgtccaccccgtccacctcgatcctcctgccgctccctcctccgtcaccggcgggcccgcgcggcggcgccatggcggcgaagaaggcgctgctgtcgcagagcaccccggagtcgagctccatcaccacgcacgtactcccgtccctcccgcgaaggaaaagcctcagatccagcgcctcgtcgcccgccgcatccgcctccgccgacgccaccaccaacggcgccaccgccgccgacgtctccgccgggaccaccaccgtctccgccgcgggcgtcaccggcggcggcgggagcgggagcgggagcgggagcgggggcgcggagtcatcgaggtcgatgggcgagacgcggccgggggagaggatgcggcgcgggtcgatgaggccgccgaggccggcgagcctcgacgacgtcggcgagctgtggaacgacgagatcgagggggacttgggcggcagcttattcctcccggcaccaccacccggcgccggggaggaagacgccgccgtggccggcggcgcgagggagggagggaaggggcggaggtcggggctctgcgggacgccagcgaaggagcagcaccagccccggggcgttcgcgcggcggaccccgccgcacctcggcgccgcccgcggtggtggcgctgagccccgccgccttccatccttgccgtcgccggcgcagatctgggtggggcgcgagagagagagagagagagagagagagagagagagagctagggttcggaggcggcggccatgagaggggaggagggagaggtgtgatgagtggaacaacacgggacgagagctctctctctctctctgctgcttctttctctcactctgtgctgtggcactcactgtgcaccgcgtgggattggtccatgggacaagactggtaggtggggtccactgtaagtggggtcctcttcctcggataccgcgggcgtggtgtacgggcatcacgagaggagctggcactgcactggcaactcaactgggcaagagagggtttgcgatcgtctgcgtccggggtatgggtatgggcgtatggctgtgccgctgccgatcacacggaaaacggtcctaaacgatactcgggaggttccaactcccccacacgaaaaatggtggtacccgttaaaacgtgattaattaactattaatctcaaaagctcgaaaactcgattattatgattttttaaaacagctttcctatagaaaacttttaaaaagaatatacttccttccgtcccataatataagatattttaagtggatgtgacacagacatgatgtgtcatatccacctaaaatccattgtattatgagacggataaagtattgtttagcagtttaaaagcgtgcgtgcgaaaaaaaagtgagttgggaaagaaggagaaagaacacaaccttactcttataaaaataactttaacttttacttccggatatagtccctccttcctaaaattatttttaacttgttccatacatatgcatatctctctactattataaaaattaaatatgtttttgactgtactttggaacatcatccgtgtatgatcggtttctaagtccttttgctttttaaaatatagatatgtatttgagtcggattttaaattcattcgtttttggaaataatgaggaatcttataagaaatctctttaaaaaaacttgcatactaacttaaaagatgatcggacttataattgcaactcatgattttctagaaaaatatatatccaagtgaattctcacaacgaaactattatatatatctctactgttataaaaattaaaattgaagatacttttgcatacgttatctttctttgagttggtttttaagttcattcgattttagaaatacagatccatgtttgagttgaattttaagattatttgcttttggaaatataaaaggagacgtataagaaacctctttaaaaaaaactcgcatactaacttgagatgaaatatagactcctaattgcagcttatgattttcaaagaaaaaaatatccaaccgaattcccacggtgaattttaccatagctaaaccttataacaataataaaattaaaatagtatttaccgttgcaacgcacgggcattttttctagtatgttataaaaattgaagatgtttttgttggtactttagtatgtcatccatgaattagtcggtttttaatttcgttcgcctctgaaaatataggagcagtattataagagatctctttaaaaaacttgcatgctaactttcagactcagctcatgattttctagaaaaaatatatatcaaagcgaattctcacagtgaatctaaaccgtataacaatatttctcacttcatttacctgtaatgcattattctctactttcacaaatagaagagcccaaaaaataacttattttgggacagatggagtaaaaaaatattagcctgtttggtagagctccaactcctaaatttagctctaggagttgggtctggaagtggagtcgtggagcaacctaaacccagctctaactctctagttcattttgtgagagagctctacccagctccgctcccattttagatggtgctgaaactatttggctgagttctagcttcaggagaggtgaaggtggagttggagcagtagctatgccaaacaggtcagactatcttcaaaacacattattaaaaaaagagtaaagtccatcaccggtccctaaacttgtaccgttgtgtcatcccggtccctaaactcgcaaatcgaccgttcaggtcctcaaacttgttcgactgtgtcatcccagtccctaaacttgcagatcactcgtttaggtcctacaacttgttcagttgtgtcaccccggtccctaaacttggatttgaatatcatctgggtcaaataagacagtctaaagactttatatttaaaaataatttataactttttcatgtaaattctaatgaagaaaaactttatatcaaacttgtagccctcgatgcgatctacaactttgtagttgaatttttttattttaagtcattttttgtcccaaaatgtaattttaaaattaaaatttcaaaatatataaacatgcaacaatattttgggacctaaacggttttaattcaaaaacttttcaactacaaagttgtaagtcgcgtcgaagactacaattttgatataaagtttatcttcattagagttcacatgaaaaagttatgaattattttttaatataaagtttttagaccgtcctgtttagggaccggggtgacacaactaaacaagttggagctaaacgagtgatctgcaagtttagggaccgggatgacacagtcaaacaagtttgaggacctgaatggtcaatttgcgagtttagggaccgagatgacacagtggtacaagtttagggaccagtgatggactttactctaaaaaaaaatgcacgaaagccaggacctaagcatagacaactggctaagagcgaggccatcctttcatgctaggcatgatttggattcaaacaggtgaattcaatgaaattagatgataatcttgcccatacagcatgtacactttatgtatctatgtacattatactctaggcatacatatgtacattatactcaggccacatgtaaccccgtgtaaaagccacggacactattagggttgtaatatacaaaagtttgcacataagaacaacaaaatatatgcgtaaaagaagaactgtttgtagacaacctaaaatgtataaaagctaagaattcactagtacaaaaactgtgataggtattttctcctatgttccggtttatttaaaaccgacacttattgatcgttcccacctctgtgggatagaaaaaataaaggaccaccaccttcgtacaactatatctgtcggttcaaaatatcccggttcaaaggcatccataacatattataggttctgttcttttaaaaaaccgacacctatgaaaaactaagccgagccattggtcatcgggtgggtattccttttaaccccactgagtcaacccgcgttcatcgtctctctctctctcatgcatcttgtcgtccctatcccctccagcttgccttcgtcgtcaacgccaccacccgtcgtcatgtccccccctcttcctcctcctcaccacatccatgcctccccccctcctactcgcttccacctctatccccgctgccacccatcctcacagccttcgctgcctctaccacccattgtcctctgcaccacattctcgcctgctcccagctgccctaatctcttattgtttaaggtttatgaatcttgttaatgatttactagtttactgatgcatataacatgtaaaaaaaagactggcaatgaaaatggtaatatctcaatgctatacgtgacaaattgaaaacatatttaattactattatattggacgtaggctaccacttagaagatccaataatcaacaatctcacctaattctagaagaaagtaatagcatacagagcagcaggggtgtactaaatttttaattggaaaaatggccatctatataagagagccatagctgtcatagtgccatagctcaagagtagcgagacaacagattcattagggattttttttttgtcattccagtgattagtattgccatatcattagcattcatatagggctgtgaggcatcagtaatacttgaaattgacttgctatgaaacacagtagtctggcaacatttctatgcagtagcacactgagcactcggttggacaagatctggagtgaacaatacctcgctcacggtgagagtccgaccacttacttttgcaaccgttgtcggagtgccgccatggatgtgagcaggcacatgagtcagcgatctggagcgaatggagccttcctgggcaacacacctgcaccgtagttgcagtcttcctgagctcatgatctgcttgacatcgacaggcaatggcagcgcgggcgctcgacggcgtgcaggggtggttggctagggcaagcaaaggcagattaggaggctgttaatctggtcatgaacttttttgattattttgcgatttgtgaagatcgagagaggaagggaaaagggaaatgcggcggcaaatccagccacatcctcttaaattggtatagatatatattgggaattttaatattgtaatttgcaaagtatacagtttcgtcgtgtttgcaaagtgctaactgcttttgcagattgtgagaacatttctcctttccattcgttcttcctatggtctgttaattcactctaccacactggtctataggccacacctctccttttaccgtcctctgccatcaccccttacctgtagataaaaccttcataggtacctgttctgagccctttgttggtgctggtttttttaaccaacatcaatataggggaactagtgaggataaccaatgggcacccaattttatttttacatgcgtgaaaaacctaaaaacatagtattactccctccgtttcacaatgtaagactttctagcattacccacgttcatatagatgctaatgaatctagacattattatatatatagattcattagcatatatataaatatggacaaaagtcttacacactgtgaaacggaggaatgacatatttcactaggcagccatggtcaagtatcgtttcccacaactcacaagattttaataccattttacctctctctccacctaaagacttcttaccatctcaccggaaaacacttattgtcttggaagcaaatactattcttttgatacttctatcattcgaaacatataatccatatttagatctacaactgaaaattttattaactacaaaattatcgatctcatttagatgatctacaactacaaattgttgacctcgaagaaaaatgtaatcaactccaaatttgtatatctcgtcgagttatacaaatttgatataaagtttatcttcatccaacttcatatgaaaaacttagataaaaacagacatatgtaagtggcgtcattataggtgccggttttaattgtcgattggcacctatgaactcatagaggctggtaataaccatacataatacccatatatgacggttcacagtaaaaaccaacacctttaacatcgtttataggtaccagtttattataataaccaacacctatgacttgagaaaactattggtgtaggtttttttatggacatgcaccaataagtaattataggtgttggttcttaattttatccgttaaaagatgaaaaacgcttcatagatatcggttttagataccggtacctatatgaccggtctatgttgtgttctgcactagtggctagcattgtcacagggtaaaatgtgttatggcttcattgtgggccaagcatgatatggttgaacaaggtcgacaaggtgctgatcgagaatgatacgtgaaagccaatctaagcatagtctactggatggctaagagtaacgccatattgtcatgttagacatgaatgcatgatttggaatatgcaaactcgtgacttcaaggaaattagataatgatcttgcccatatatacaacacgtatacgttatgcatatacgtacattatactctaggtcacatgtaaccgtgtgtcaaagcaatagacactatcaaaatcatagtatatataagaacgttaagttctcacataaagacaacacaatatgggtatataactgagaagaattgtgtatagacaacctaactacttatcatgtataaaagctaataatgtttgatgtgcatgaatgttattaacggcttatttgtttcctgatgcataaaatgtgtcgaaaattttgttaggcgatagaaattgtaatatctcaatgctatacgtgtcaaacagaaaacatatttaattactgttatattgggcagtggctaccagctagaaggattcaataatctagtcaactagatgattctccgtactttgctgcggaaattactaagtaacttttaatattttttaataattaagctaaaagtaaaaattatattagttattaacaacaaataaaaactggtttgtcaaactatgttaagagagaaataaatctaatagactatgtatgagattgtagatgaaatatatgatgttgcacgctttgattatatggatgaatatatggtaaatattataaaaatattgtgaaaaataatgtgaagtaagataattgtatgttaatttgtactcaatgaattatagatgatgttgcatacttacataagttttgtatgtaattattgctagtggatgataaggtgccatatttgaatgttgagctttagaattagcgggttataactttatagtaagataggatgtggaataaaagttactattatattgttaacaactcatttttctctattttctttaatttttcctcgtacttttcatacttcccctattccccctaaattcgcctcatatcccccgccttcatgtttttctttcttttttcacctcacattttcaccggcccatgtgtcacaagagtgctcatgccggtccggcatctttttaggttgtgccttgactgaggccttgcacgcggggcggcacggtacagaccgctgctgctgtcatgccacaccactgtagaatcaaggagttgatttagattttgtgatgaaaatattggtggtttgctaatgttaatttggagattttataagatggttgattttgtgaagtggatgttttcggttgaccctggcggtcagaccggccgagtgccgtcggtcagaccgcaggtgttgcggcggtcagaccggccggcccgacggtctgaccggcaagatcctgattgatgtcggtttcgggttgttttgttggatttggatattaccttcggggatttggcttctagatggtttctatgcgtatggatactgttgttatactaatgtgagttaagttgggacgaacttgggctcggaatatggtttcttggttgttgcatgtgcaggtgttgcttgagaccttgggatagtgttgccggtgatagattattggagtcaacttgggagaagttgatgtccagggatcaagagatcatgcgggatactaaaggctagaggacaatgcacgtagtgatgaagaaatccatatggtatacaagagggattgtgtacgtatggaaagaggagtcaaatttggaagggagtccgaattcgggaagtttgattgagataaggaaagagatgagttgtttacttgcaagagagggtttcctacatgggttaggagtcctaagttgtgttagattcgtgggctttgcatagcctacctcatgtataaatagagagggagggtgaggcctcccggtatcgattttagagagactagagttgagagaaagttagggttttgaatttagttcgagattttggtgagaagtgttgttggtgcactttgtaaacactagttgatgcaataaagtcaaaaagtttcaatctacatcttcgagtttgtcatgaatcggtgtttctgggtcctgacggtctaaccgcacgtgcgcgtgcggtctgaccggtgggatagcggcggtctgaccagtgaggagttggcggtctgaccggcggcaggagggcggttcgaccggcggtgataggacttcatcgtcgtcttcgttcgagggtaatctttaattccgcaaaagatttttgggtttttggttttccttaccattcacctcccctctgataggttattttggtcttgtgtgatcctacactctccttaattctaagtatactatagaatatataaagaatctatagtatatttagagcctattgtagttcagctctacatcttggtgtgtgttgaaatgaatgatgagagggccatttataggtggaggtgccttgggaggatagagtttcttccaagcatccaatgagcatcttcatcctcctagtgccgggtgtccagcttatgatggttttcaccggtgaaaacggctataaccatcattggggagcggattgttgccgaacgcaacctgggcctagggcagcagcctctgtcatggttcggctgaactctggccagcttctttggctccggttttcgcctggacactcatttcgggcccctcattatattggtatggatgtttgtcccatttgaaggtgtttaattgggtttttgggtccaaaactctataagttcggatacgagtttgattctcctcctccttcttgtatatttcttctcgacttagatagtttgtcacctgcattcgaatatacaccaacactcatagaaattgttagaaataaaccctaccactatgttggatgttttatatttatggtcttatgcaagtattgacggtgttaatttggtacttaatagccatcaacaaacccacacacttagctctttactcgtcccgagtaaatgttgaggattaatgtggaacaaaattttcaaaaatataataaaagtacacaaactattctaagccataactgtacctataaactttgcagtgtataacttaccatcttgggtaactgatgaatggaacggttgtgactcaagtccttcatgtttctcctgtcaatctcttgagttttcatatgttttcacaaagtatctatactcctcaaatgactttctctcaaatcacgcatgtggtttaatttgtggatcctcaccaaggcatattttgccgaattgtccctattctaaaaggttgtatatgtggagcttggtagggatcaatcggggcatacctgcatcacatattttgcaaagccaaaaggtcggacccaaggagatagcgagttatactctctgatcaagaatgtgcatgtgtgtgatatgtgtatgggtatgtatgtgtatgtgtatagtatatttttggatggaaaaaggaaaataaaaaacaacaactcctttggtataccgcttcctccaattttctctctttggaaatttgagagagtgcatggctatctcctttttttttcatcatgccccatactttgtatgagcagattttttttctattttctctctctcatttttttttatcaatgctccatacttatatgagcaagactttatttttccttcttgtgcatagtcatgcatctctctttcttttttctttgaaagaattttggaggaagagacataaatgacatggagtatttattttgtggataatgaatataataaatgatggatgagagatgctaacttccagtgtagaagtttagcataacgtgcgtatgaggagtgtggtgtgatcttgatcatgaaagtatgaaaagtatctcacacaggtcacaataatttgacaaagctcaatgtaatgtcaagcggcctatacacatataaggttttgcaatgagaatcatatatggccttggtaggtaataatatagtcactaaggagtattgctctaaaagaatttttaattttcacaaaataaaatcccaagtatcatgaaagttggacatgaatttctttcgttcactagcacagaacctttcatctgtgatagccactaacatgcctggaattagcgggccgtcacaaggaagtcatctcaatcgggccaaaaaagcattcgattaagatatggtcgcacagacatattagatgggcataaaactcaggctcgtcatggatgacacctatccgtgacgggccgtagtttaggcccgattgagataacattccatatctcaatcgggcctcaagttggctcccatcacagatgaccatcatccgttacgggcaccaacttagggcccgattgagataacaactaggcccgccacagatgactcatccgtaatcgattgagatgacttagtatttttttctatttttcatatggaatgtttatatttgtgagtcgacctgtagcaaaataattaactgcagtataataattcattttattagtcaaaataatttttcgagtagtaaaggatttcaaatggaaaatttgtcaacaacaaagttgtataacttatcaagatttacaacttttattttggtcatttttctgtgtaaccttttttatcagtttaaatttgaatttgaaaatatgacaactttaaaacaacattttcaaatactaaaaagtcatcaacaaaaaaaaagttgttataacttatcaagatctataacttttatttttgacatttcttaatcgacaaagtgttagtaacattgttcacaaaactcacatatctctcatctg

SEQ ID NO: 10318 - DNA, 1066 bp, Oryza sativa
ccccccccctccccgaaattttttatttttgttttatttgtttgatatttttttcacgcttagggacacacaagaaccaaccatagaaaaattgaacttaaatggacgtaatatgtgacatgtagaatttttcctctcctctctccgaactagtgcagaggagagagatgtgcaacttttttatttttattttatttttttgatatttttttcacacttaggaactcacaggaaccaaccatgtaaaaaataaactcaaacggacgaaatatgtggcatgtgaaattttccaaagctctaccgaaaaacttctctcctcgaaaacacaatcttgcaagcggaatttggaggttttaatatcgccgaacccagcaaagctgaggagaatcggatgtaactttttctgtagatgtccatgcatatattatttgcctgattccgagtccgtatgagaaagttacgcctattttaatagatgacatattttgtccgtttcggtagagttttggaaaattctacatgtcacatattttgtccgtttgagtttattttttatacggttggttcctatgttctcctaagtgtgaaaaaaatatcaaaaaaatgaaacaaaaataaaaaattatatctctatgtactgtttaacttatatatgtcatttaatgtggttatattttgaattagattaagtaatttcatatagtggtagagtgcattatgtttaacatgctgatcaaagggttttactaaaggagttatggtctaattttagtgaaggtgcaaagtagactaagtgggtatgctagatattttcagacttagctaagtggtagttcgagtttaaattttttttttgtggttggttgtatcgtgatcctgagtgtgaaaaaacatccgaaaaaataaaataaaaatgacaccgttgtaactccatacagaaaaacaggatggaggcggcggcgccagcatgctggcgccctcctccctggggcggcgccagccatgctggcgccctcctcctgccacgtcggttcacgtgcgccacgatggcaggaggacggcgcca

SEQ ID NO: 10319 - DNA, 9381 bp, Oryza sativa
caattcctgagaactaagaggctaagaaaattccaatttctccccagtcccaggaagtggtggagagattcagcaccttttaagcccaaatgctggtaaatcccaagcacagaacaactataccagtgcaggtgatttatcatatgaagggatctccagttgctacagtttggagcaagaattatcatcctcagtcagtttgccacgctagctatatatgtaacatggagtgttgagttatcacatattttctacgaagtgttatgttacgtagttcagtccagagaagagtttttgcatgtttcacttcctgtatacttgcagcatgtatgtgtagcccatgtgagttgatagaatgacagttgtattctactataattatttgtgatcaatatccttgtaaggaatgacatggtattgtaatattgtatttaagctacggtggcaaagtgaacaagttcagtaataattttattactccattgccaatgtcttgctcagtaagggtcaccaataggtatctgactaataactcagtttgtagtatgctggatctttttttccacatagcagtgacatcgttaatacggagtattatagagcttgtcggaagtcagaacttggaactcagagaacgttccgaatgcctttacacaaagtataaatggcacggttgaaattttttatttcatcacttgtccaaaaaccctgcattcataatgggaactgtaaaattgtttggatttggtgggataaggtcataggaattgggatatatatagaggaaatctaatttatggtttgattgaggaataagggaaaaaagtgaagggttagaatcagtccacactccacaccccatcaccatctctatcccaatagcaaaccggaccacaagtagtagtaagtacctatgctgcaaacaaaaatgctattgtctttggctccaaattctctagctttgcaaaagacagtttagtttaccaatggtgataatttgactatggagttaaccataccagtacaattagacttaaaaaaagaattcaaacctagattatgcacacaaccactaacacaccaagcaaaacaatggagattgccgtttgacaagggagcgcaccaatttcggttcgaacagacgagacaaccagagtggcggcctgctggcctccgcgcttgggggaggcaccggccttctgatcgcgccggggaagaggaggagcccgaccgccgaggcggaccaggcctccctttcgccccccgcaccttgacaccgcggccaccagttgacggccgagcaagaggcgcggtggtggaggcgcaagggctctccgctctccgcactccgccgtccgcagcactctacgctatttgggctcatgggctttggattctttctctctttctttttccattttccctctgttcggctttgcagttgtgccactttgtcgtgattgtgtccgttattttcgtgtcgctatttgctcatgctgcctgcgccaccgccatctcataaattagaggaccaatgttggcttgctcctgcatataagaaacacagtgctaatcaacttgtagggcagaacttctgactgtaagtagagagagcaaagagccgtaattttgacaaattgacccttctataaaacttagtttcaaaataagtcgggtcaaaaattaatttcaatactaggccgtgaccttagcgccattagggttggcgctgagctaagctaaaacgtccaagcgccagcattgttggcgctaaggtcatatccgacgtggaacatattagccacgggctaagcgccaaatgagttagcgctgacctcttagaaggtttaaaattagtgtgggcaataactgacacaagttaaatctagctcagcggttggtcagtgtggctgcaagccagagttccagggttcgtttcttggtaagaactgagaacctaaatcatacaacataaaattaaaaatacaaaattataataattgagctaagtatttaacattttaattaatgttttcaaatttatttattccagattgaacataaaataaaataaataatccccttaaaaagtaacataaaaataaatctacaaacaaaatatgtgattgtttggaaaaaaaatttcaatagaacaagattcaaagaggaagtaagaaaaaacctgaaaaccggctttcccggttcgaactgtgaacctgtgggctggagtagaggggcctgaccactgagctagcttctgcgttatgacacttccagcacacattcttttaaaccatgtaaatatcagcgccagcacacatgacgctgagctcctcttttgtggctaatccgtgccacgttgaacgtgatattagtgccaattagagcaagtttaatagtatagccaactactagcttcaattcatctatagccaatctaatagctcattcgtataatagttatatattatactattaatacctggtcccacctgtcatacacacattgtgtattgaagtccgtgctacagctggctacaaatctgtagcccgctgctcttctctctcatcatttatttccttaaaatatgtttgcagctgacttatagcctattattgtacttgctcttagggtggcgctggtacgttttatctcagcaccattggggttaacgctgaggtcggcctagttttgaaattagtttttgacgcggcttattttggaaataagttttatagacgggtcaatttgtcaaaattacgggagcaaagagtatacaaaagcaagagtatacaaaagcgtatgtggctttatcgtactaaagtaattctagtttggcaaacggcgtcggccttcttttgttcatctgtatgaattagtaggagattgtggtaattgtataacgctagtgtatcgtgattaggatttgtgttacgaactcttcctgggatttctgtcgaacaattggtgagcaagagcgagagagggagacaggaagaatagaagagttcaggacataaagaacaaaggattaggaggaggatgggatttgaattatagagaggtttcagtacaatgtttttcgataccgattcccataaggctaggcctttatatacacatgctagccactctcttacgcaacccagtctggcccaattatacgagtgttgggctgtcgctgtcttgagctcttcggcctggtcttgacagggttggtaacatcctcccctccttcacatccggcttgtccccaagccggagcagcagggtaacgctccttgagccgctccagatcttcccaggttgcctccgatgttggacagcccgaccagcaaaccttgacttgatcaacagccgctgatccccgacgtatcagtctgcgtgctagcactcgcactggaacaggatctgcttcttccaccgctggaggtagggtagctaccgtagaagaagctggttccgatgccttccgaagttgggacacatgcaccaccgggtgaatcatagaagaagcaggcagcgccaaccgataagccaccgcccccacccgagcagtcacctgaaagggaccaaaaaatcgaaaggccaacttctgattaactcgcaccgccaccgaggattgcgcatgaggttgcactttcataaacacccagtctccgacagcaaactgccgctccaaacgcttcttgtctgcttgatgtttcatgcgctggcgagcgcggtggagatgttgatgcaacaacgaagtaataacagtgcattccttcaaccattcttgcaaatccggcactgcacaggctgcgatatcaacaataccaaagtgccgaggaggatggccatacaatacctcaaaaggagaagttcccaaagctgagtgcagagaggtgttataccaaaattccgcaagagccaaccattgagaccatttcttagggcaagcatgcacaaagcaccgcaagaatgtttccaaacactgattgacgcgtacagtctgcccgtcagtctgaggatgataggccgtactcatacacagctgagtgtctgccaatttaaacaaagtggtccatagagtgcttgtaaagatccggtcatgatctgagatcaaagactgaggcagtccatggagcttataaatgttagagagataagcttgtgccacatcaaaagctgagaatggatgagctaaaggcacaaaatgggcatatttagagaacttatcaacgaccaccataatgcaatcaaaacccgaggaagtcggcagaccttcaataaaatccaaggataccatttgccatgcatgatccggaacaggaagcgactgcaaaaggccagggtagcgaacccgttctgttttcgcttgttgacaaacagtgcaattggccacatatgtctttactgctttcctgagccctgtccaagcaaacaaacgcttgacacgggagtaggtaacctgtacccctgaatgtccacccactgccccaacatgtaaagattgtaagatttgagactgcacgtgcgggttagcaccaatccaaactcaccccttatagcgcaaaataccagattccaaggaaaaatgaggtaatgcgtcagatttgagtgtcagttgagccaccagctgagaagaatgaggatcttgatcataccccttttgaacttcctcaagccaagctggaatacaaactgaaagagacaatacttctgttgaatcatcggccactcgtcgggacaacgcatcagcggcgctgttctcactacctttcttgtaaaccaaacgatactgcagtcccatcaacttggttaaggctttttgctgccaaggtgtggctaatttttgatctccgagatgaatgagactacgttgatcagttcgaatcacaaactcagcaccctgcagatacgagcgccaatgatcaattgctaggagaatcgccaagcattccttctcataagtcgacaagccacgattgcgaggaccaagcgctttgcttaaaaatgccaaaggatgtccctcctgcataagtacagcaccaacacccacagctgaagcatctgtctcaatttcaaatgtctttgagaaatccggcaatgcgagaactggagctgaagtcaaggcagtctttagggcatcaaaagaagcttgagtttcagcagtccaatggaaaataacattcttcttgagaaaattagtcagggggcgactcagaatcccaaaatggcgaacaaatttgcggtaataccccgctaacccaagaaatcctctgacctccttgacattagaaggcaccggccactgcagtactgcctgaatgttcttagcatcggttgacaccccttcagcactgatgacatgtcccaaataagtgagagatgaccgagcaaacacacacttagatctcttaacttgcaactgattggcagagagaatatcaaatacagcccttaacaagcgcacatgttcctccaaagtccgagtatagatcaaaatgtcatcaatgaagactaacacacctttacgcaagaatggctcaaagattgtattcattataccttgaaacgttgctggtgcgccggtcaatccgtaagacataacccggaactcgtaatggccattatgtgtcttgaaagcggttttatgttcgtcttctggcttcatacgaatctggtgataaccggctcgcaaatccaaactcgtaaaccaacaagctcgtgccaactcatcaagtaactcatctataataggcagagggtaccgattcttaacagtgatagcattaagatgtctataatcaatgcaaaatcgccaagtaccatccttcttctgcacaagcaacacgggagaggagaaaggactggcactgcgttgtatcactccttgtttgagcatgtcagcaacctgtcgttcaatctcatccttttgtgccggactgtaacgatacggtctcaaatttactggttgggctccaggcagcaagggaatagagtggtcaaaagctcttggtggtggcaagccagagggttcatcaaaaaccttggcaaattcctgaagcaatccctccacttctcttggcagaacaagactgattgcaacagcttcactggcacaaagttcaactgtgtgtaggactgcattatgatggaagagacccttaagttgatcagccgaaataaccgggcaacagctaacatccggcaccacaccctgtaacagaacctgcctgctgtccaacacaaattgtatggtcttaagcttccaatcaatttgcattggactgtgtttctctaaccaatccatgcccagaatgacctcataacagcccaacggtaacaccttaagattagtgctgaaggactccccttgtacccaccaatgacaattaggaaactcctgacaacattgcaagataccaccatccgcgattttcaccttcagaggagtcagcgagctgcgcacaccctgcagtttattagctaacttctcactgataaagctgtgagagcttcctgaattaaccaacatcaagacctcatgtcgttggatcaatccttacaaacgcaccatacgagaagactcaataccaagtacagcttctcgagaaatggccaataactcaccatcatctgattcagcagggggctagtagatgactccacttcctcaggaacctcatcagaaaaaagctgtagcacttcttcaatcacatgcagctgcacagtagggccacaacgatgatcacgactccacttttccccgcaagtgtgacaaagccccttcgctcgatggaaagccctgagagctgcaactttatcagtagcagaaacttcagtagttagcttatcatctccctttggcacaaaaggtccaacaccagtgtgcaagggtcctcgggctcccccagtcggctcaaagcgacgcccctccttgcgattctgttccagtacttcctcttgcaaacaagctaattccacggcagtatccaaatcggttgggcaatgtaaaacaacagcagatctcacttctgccttcaacccatccatgaactgagtaacaaagaaaaccgaattccacgagggatgatgcgcatgtaacccatgcatcaactcgttgaacttttctgcatatgcccacacagtgctagtttgccttaacctattgaactgtcgaatcaaactttggaactcctctctaccaaatttcccacacacccaggcagcgaattcctcccaactcccactaacttcatgagctcgggtcgactgcaaccaagtcaatgcagtacccgagaactggagtatcgccacaccaatccagtgatcagaaggagttccacacagcccaaaataagtctcacacttcagtttccaggccttaggattttcccctgcaaactctgggcactctactctagatgcagaaatttgacccccaaaactaaacccacggcatcccccactcgactcaggaactgaatggaaaggggaagtagagttatacgcacccttgaccgggggagttcgtggggagttgtttccccacacagccttcccccggtgattcgaagcctcgtggtggcaaaattgcctaggcgctcctttgccgaacgccgacgtggaaggtcggttttccaccgtcctcttcggcagccgctttgccccaggcggcgtcggaagacgtggagccatttcctccggcttgacgggatccggcttgacggactccgacttgacttgatttggggacggcgcgggctgcttcaccatcttctcgagctgagcgcggatgtcgcccacctcgtcccgcaattccgccaccaccttctctaccgtcggcttccatcccgctagctccacaaccatcggcttgatttcctcgatggattccaccgaaatcatgatagcctcgttctgcttctgaattgaagtcatcgtagtcatcagctcgccaagttgctgctccatctcgttcgccttgagttgcgctcgcgaatgataccgtggcttctctagataatccagattcgactgctctgataccaaatttgttacgaactcttcctgggatttctgtcgaacagttggtgagcaagagcgagagagggagacaggaagaatggaagagttcaggatagaaagaacaaaggattaggaggaggatgatgggatttgaattatagagaggtttcagtacaatgtttttcgataccgattcccataaggttaggcctttatatacacaggctagccactctcttacgcaacccagtccggcccaattatacgagtgttgggccgtcgctatcttgagctcttcggcctggtcttgacagggttggtaacaatttgcaccttgccactctttctttccagctgatactggatttgtggaaagaatcggcgagttaattggcctctgcaacggacgtagattttgcaaggataatatatagtagtaccacattcttaatagttgcaatatactccatccgttttatattataagttgtttgacttttttctagtcaaacttatttaagtttgattaagtttatagtagaaaaatattgtagtattttcaatacaaaagaaacatattatcaaaatatactcaatgctagatttaatgaaattaatttgttattttagatgtttcttttaatgacaagagcccaattttcactcagaaaatgttgaaatcatgagttcccaatgttttcatggggaactgcagtctgcgggactatatttacgaatctgctcgtaatagcttaacaagacgagcatagtgaccctatacggtgacaaatccagcaaatatcctctaattaattaagctagcaaccccaatttaatcactcttagggcatctcctcagcgtgcctccagtcgcaaaatataattttactaatgactactcctacttcagagtgtgtttcgaaccagagcttgttatatacgcacacaaaagcagccattgcatcgatcaataataatattgcagtttgacaagggagcgtaccaatttcgaacaggaaattaatcggccttgagctacagtggcgtgtcggcatggccttctaccggtgcctctgccatgaggaggtgctggaagctgaagtggacggcgccgccccccttcccccccccaccccccactccctcccgaggctgtggctagctgcttgcggcgaactgcaggagaaaatggacattttgccactttgaaaacatggtttcgctgaaatgctattccgaaaacgtgtttcgctaaaatgcaaatatagagcgcgccatcacagccactttgccattttctccatttttactattttggatattattttctctgcaaagcggtttgaagagactagaatgcccct

SEQ ID NO: 10320 - DNA, 6941 bp, Oryza sativa
  unsure (1)..(6941): unsure at all n locations
atcacatattttctaggaagtgttatgttacgtagttcactacaaagaatggtttttgcatgcttcacttcctgtatacttgcagcatgtatgcatagcccatgtgagttgatagaatgacagttgtattctactataattatttgtgatcaatatccctgtaaagaatgacatggtattgtaatattgtatttaagctacagtggcaaagtgaacaagttcagtaataattttattactccattgccaatgtcttgctcagtaagggtcaccaataggtatctgactgataactcagtttgtagatgctggatctttttttccacatagcagtgacatcgttaatacggagtattggctgtgtttagttccttccaaagttggaagtttgggttgaaattggtacgatgtgactgaaaagttgtgtgtatgataggttgatgtgatggaaaaagttggaagtctggatctaaacacagccattatagagctagtcggaagtcaaaacttggaactcagagaacgttccgaatgcctttacacaaagtataaatggcacggttcaaattttttatttcatcacttgtccaaaaaccctgcattcataatgggaactgtaaaattgtttggatttggtgggataaggtcacaggaatagggatatatagaggaaatctaatttatggtttgattgaggatcaggggaaaaaagtgaagggttagaatcagtccacactccacaccccatcaccatttctatcccagcaacgaaagggcatgtagcctagtggttacagtgacctgagtagtaccccaaggtcctgagttcaaatctcctatggagcgaatttccccttctctaaaaaaaaaaatctctatcccagcaaaccggaccacaagtagtagtaagtacctatgctgcaaacagaaatgctattgtctatggctccaaattctgtagctttgcaaaagacagtttagtttaccagtggtgataatttgagtatggagttaaccataccagtacaattagactaaaaaaaagaactccaacctagattatgcacacaaccacaaacacaccaagcaaaacagtggagattgccgtttgacaagggagcgcaccagattcggttcgaacagacgagacaaccgggagcggcggcctgccggcctccgcgcttgggggaggcaccagccttctgatcgcgccggggaagaggaggagccctactgccggggcggaccaggcctccccttcgcccccacacctcgacacctctctgacactgggcctctgtcggcaaacaccctgcaactccaccgcggtctctgtttggctttgcacttgtgccgctgtgtcgtgattgtgtccgtcattttcatgtcgctctttgctcatgttgcgccaccgccgtctcataaattagagcaccaatgttggcttgctcctgcatagaagaaacacactgctaattaacttgtagggcagagcttctaactgtacgtagagagcaaagagtatacaaaagtgtatgcggcgttatcgtactacagtaatcctacttaggcaacggtgccggccttcttttgttcatctatatgaattagaagactgtggcaattgtatcacgctagtgtatggtgattaggatttgcactttttttttttgaaaggagggcaaaagctttgcctcatatatttatagagatgaagaaaaaacagatcaaaaatatgtacagggattaggatttgcacattgcaactctttccatctggtactggatttgtggaaagaatgggcgggcgagtttattggtccctgcaatggctttagattttgcaaggataatatatagtagtaccacattcttagaagttgcaatatactccatccgttttatattataagttgtttgattttttttctagtcaaatttatttaagtttgattaagtttatggaaaaatagtgtagtattttcaatacaaaagaaacatattatcaaaatatactcgatgctaaatttaatgaaattaatttgtcattttagatgttgcttttaatgacaatagcccaattttcactcaaaaaatgttgaaatcatgagtccccaatgttttcatagggaactgcagtctgcgggattatatttacgaatctgctcgtaatagcttacaagacgagcatagtgaccctatacggtgacaaatccagcaaatatcctctaattaattaagctaacaaccccaatttaatcactcttagggcatctcctcagcgtgcctccagtcgcaaaatataattttactaatgactactcctacttcagagtgtgtttcgaaccagagcttgttatatacgcacacaaaagcagccattgcatcgatcaataataatattgcagtttgacaagggagcgtaccaatttcgaacaggaaattaatcggccttgagctacagtggcgtgtcggcatggccttctaccggtgcctctgccatgaggaggtgctggaagctgaagtggacggcgccgccccctttncccccccccccccccactccctcccgaggctgtggctagctgcttgcggcgaactgcaggagaaaatggacattttgccactttgaaaacatggtttcgctgaaatgctattccgaaaacgtgtttcgctaaaatgcaaatatagagcgcgccatcacagccactttgccattttctccatttttactattttggatattattttctctgcaaagcggcttgaagagacgagaatgcccctccttctccaacgacgagttctcccgtcgagctgtccgacgatgccaccccgatcaacgacacgtccgacaccgccgtcccctcctcctccacaaaaaacccgttcacctcctcctccacagccgccgccttcccctttgccatgcggaggaccttcacgccgagctcgttgcaccgcgccttgaacgccgcgttgcccatcctcggcccgccgtaggagaagacggtgaccgggcggcggcggcgtcgccgccgagacgctggcgacggcgaggtcgtatgccaggagcagcgcaagcgcgccgcccatgctgtggttggcgagcgtgacgctcacgtcctcaccaccggagcgggaggcgacgagtcgggacacctcgcgaaggagctggttgcggcagctgtcggtgcagccgaagcggcatgtctcgtcggcggaggtgtagatgttgagcaaccccgactcgaccttcacgtagccgccgccgccgtcgccgcggcgtggggcgaggcgcgccagcacgagggagctcctgtggttggccatccactcggcgggggtgacggtgccacggaatgagacaagcacgtcgcaccgcccgagccgccgcgtcgtctcgtcggtggacacagcgacgtacccggcccagctggcgcggccgctggtcgacacctccatgcccggcacagcggcgtccggcgacgagtagatgtacctcgtcacctcgtacccggcaccggcgtcctccagcatccggagcttgccgtacttgcagttcatgtacctcggcgacgaagggtcctccaatgccgcgtagcatgcaccgacgagctcgccgtaccgcgccacctctccgcggagcaacgggtgcagcggcgagcatgtcatcccagtcgccggagccctggaccttcctctacacgcgggcgacaaagcccgccgctgccgccgtcatggaccacctcgccacgctcgtcctctttctcccatgaactggatcgatccctttcagctagctagcaaggggcaatttggtaccatcaagccgaaaatacaattgaaaatacacaaaatggtaaaaatggcaaagtggcggtgagtacacgcttcgtattggcattttagcgaaacgcattttcagaatggcattccagcgaaaccgctttttgaaagtggctaaatgtctattttctcgaactgcggcgcgctggcggtgagggggaaggcgacgagcggcgctgccgctacgaggccgagggaatggatgtgctgcccccggacgatgttggacttgaggtcaagagttgagggctcccgttgcgcgtggttgggcttcttgaggcccagaaactctaacaggccggggaaaaaagatcgagaattcacgccaatgcaaaagtattcacaatagtactgtatagagaagtgcagaccgcagaactagattgcaatataaattcagagttgatcaagatttacaccacttccataatttgtgggttgtccttcgttcagatcgctagcttgtcggagaggaaactgtcacgtagtacttgtcaactgtagtcgtcactgccgagtgccgaagaacgtgttggtagaaatgattgcgacttgcgaggtcatcttaccgtgaacaccagggcatatacctggtctaacacggccggccgtagtcattccctcgaagtcctaattcaaaagttaatgcagagcttctaaatgttttaggctaaaaaagtttctcctgtcattccagctggtcgagaggtgcatgctttaatttcgatttatgtggactgactcagctacgcggtggtgttcggatccatgactaaactttattcctatcacatcggatactcatatcacatcggatacgtgtacgctaatttagagtattaaacatagactaattataaaattaatttcataaatgagagctaattcgtgagataaatttttaagcctaattaattcataattagcacatgtttactctagcatcacatagcctaatcatatactccctccggtttcattttaattgacgttttggacaatgacacggtctacaagatatatctttgaccttatttttctattataatatatataataaataaatacatgtttacttttattatagtactttaaaagacaaatctatatatgttgttctagttcctttaaactaaatatttttaaagttattaatggtcaaagttataaaagtttgacctcagccttgtccaaaacgtcaattaatatggaaccggagggagtattaatttagattcgtcgaacgaattagtctaaagttatggaatgggttttgtcattagtatacgtttaatatttctaattagtatttaaacattcgatgtgataggggttttagtccctgatccaaacagggccgcttctaatctctttctactccagtacatttcagttgctttaatttatgatatgtgtagatataataacctaaaataagctagataggaagatttggttaatagtgaccaacatgtgtttaacgttgttttgtttaagccatgctgcgggcggcgtggagccgtgcatctatgtcctgttcttttctcaaaaaaactgtataaacttttagataaaaatggtacgttttttaaattgctaaacggtatgttttgtgtgaaaactttctatatgaaagttattttaaaatataagattatttttcaagtttataaaaattaaaactcaattaatcacacattattatcacttttttttaaaagacacattattaccacatcattttacgtgaaacacttaatttttatctcatctccatttttgggagatttaaacaccaccatagtcaaaagttaacgcagagctcctgaaggttttcagctaaaaatatgcttatgctttcgatctacgtggacttgcttagctatgaaatctctgtctgcacattccagttggttacgtcgaaatagtagccccatattggtggatgaaatagtaactatatacaagtatgcttaaaaataaatttgacagccctaaaagaacgagacatgcacgtgaagaaccagactctgaacatgttcacacctagattagacccatttcatctcagccacatatatattaattttatctggggcaatcaccttgaatttctacgttgccttattttcattccacaccatacttgtccctgttttgcatattaagaattgcgaaaagtctaattaagtaagaatatagtgggagaattggaaagttgggtagaagcaaaggagcgctaagtaagtgtagaatgattcaacatgttgctttctttcaagaattatgctcccttctttttatattataagactttcaaacattgctcatatttatatagatattattgaatctagacacatatatgtctagattcattaacatatacttcctccgtttcacaatgtaagtcattctagcattttctatatacatattgatgttaatgaatctagatagatatatatgtctagattcattaacatcaatatgaatgtgggaaatgctagaatgacttacattgtgaaacggaggaagtatatgaatgtgggcaatgctagaaattcttataatatgaaatattcattaacatatatatgaatatgggcaatgctagaaagtcttataatataaaacggatgaagtacttggaagatatcagaagagcctgtgcaaaagtctataggcatgtcttgtaggacaatctctagttggaaaaaaagatgaattatccctgaactatcgcggtcgatcgaattacccctctgaacccgccagacattgcttaccctaaacctttaataccggacgaattaacaccctcaacccattccagagcggttttgtcctacgtggtgtacgcatgacaatcccatcaacattttttttaaaaaatggtgggacccacatgtcatacatcattttcccctcttcctctctctctcttcacactctctctcgctctcacgaggcggcgcgcaggggcaggaggtgggctgcggcacgagacgcggaggtggaggcctgagctgggtggctccggctggcggtgagcgctacgggacagtggcagaagcagcgtggagatggat

SEQ ID NO: 10321 - DNA, 15417 bp, Oryza sativa
tgtctggttttcgggttggggggggggggggtgggtgggtgggtaatttggtcgagtgcaatagttcagggggtaattcatatttttttcctctctagtttcacaatgccggcaattattttcgtcatctgtaatgaagtaagatggtagcatctgtatgagtactagctaagatataccttatccgattaaaatctcttactccctctatcaaaaaaatgtttgacgccgttgacttttttaaaaatgtttgaccgttcatcttattaaaaaaattaagtaattattaatttttttcctattatttgatttattgttaaatatacttttatgtatacatatagttttacacatttcacaaaagtttttaaagaagacaaacggtcaaacatgtttaaaaaagtcaatggtgtcgaacatttaaggaaggagatagtatattttagtacagatggagtatatatatgattattaattagccttcctgggcagtaccaatctttccaattggaagatagctactggacgcgaggagaaaatcggacgtagaagcgagcagcgaccggcagttggacgagtcgttggctccagcaacgaccgggatatctgatgcgactagtgcccctggacttcgtcgatcaatggcaaattattgcgataaaattgttttctgccgatcgagtataagccaatcaattcctccatatatgttttatacatagcgcttggggagtggctggtattaatctggcatctatacttataaagtccacgaaagcgtgagcacaaagagatggctgcctctgaatataaattgatcggtagttaacaggcaccggcctacgtacaccaggaagggcaagccggctggcgcaaagatgagctcgagctttctggcagtttgtgccacttcttttgtgctggtgtgctcggcagctacgccacgagtattggcttcagtctatggagttggtggagggctcttgattgtcccttctaatgactccctcgctcactgcccctctagctgcggggaagtcgatggcatctcctaccccttcgggattgggggaggctgctttcgggacggcttcgagcttacctgcaacaccgccaccaaaactcccaagctccttgttgccaatagtacaacccagataacagcaatggaatatgacatggctttggctcctatgtacttcaattttacgacaaggcaaggtatggacacctacaacatttcatgggtgtcgccagctaagggtattaaaatttcagatgagaacactttctatgttgtctgttgtaattttgatgccaccttgttcgagtttggtacgggagatttcgttggttcttgtatgagtagatgtgacattgagaaggcaccaatagcaataggacagccttgtaatgggaacggatgttgctccatcaagttatcaagggacatgcggggatttcagtcaacacttgttcaagctgaagctgcagcacaaatatcagatccgctgcatcatgggatcatggctttcatgtcatatacggattattacgtacgtaatgcgagtgatcttttcttgagttggacgaatgtgagcaacgttgagggagccgagcttcagtttgccatcacggaccaaccaagctgtggaagtgcactggtaaacaaatcaagttatgcttgtaccaccggcagcaattgccaaaatatatcatcgggaggttacacctgtgagtgcaccaatcgttatctacaaggcaatccttacattttgggaggatgcaacatgcaaggtacttcctaccacctttaatttcctgcaaaataagacacatatatcgatatatatctaactttcatcccttgtcactctctttgtgggacagattacaaccccaagcataaagaacactgtccgacatcatgcggaaccatgatcattcccttcccttttggtctggaagaaggttgttttgcaaacaaaaggtttcggcttaattgtactgtacatcagatcatatcacagttttggaaacaagtgaagcacaatttattgtgactaatgtgtctgttgaagatgggactctgactataagtaatttgttgaataatacggaatatgggagagagatactaataactcaaggtgaccaatatggtgatacagtgatttatggtcctgttgaagatcgatttgacttctctttagaatacaacattgttataaagtgggccgtagccaatttaacttgtgataccgatataaaaaagaatgctacatatgcataacgcagtatccatagcgattgcctaaacgtcacccacgcaaacatattcatgggatatcgttgcaagtgtcttcctggttttcaaggaaatccatatatccgagatggatgtaaaggtttgttcctgttcattcccctcctatttgcaattgtttaagaattttagagaagttttatgtggatagtttaaccatggcatttcccctttagccttgttcggttaatcccatctacaaggggatcaagcgggattggaattaatcccctccaatccctctctaaccgaacaaggctgtactagtgcctagcctatgtctatacgttgtaccaataaaaacaaaaaaaactgaagagttaattgcagatattgatgaatgctcactgccaaactactgcaatgggacatgccaaaattttcctggaggttttacatgcactagttgcccccacagaaaagagtttaatccaattacaagacagtgtgttgcatcagctaagcaacacaatcttattataggtaagtcatagctgacagattagtcaatcttattgccttaagataatgcaaagtggcttcacggcagaaaattaatgaatggctgtaggtattacaactggtattacttgtggcattggttccataattattgcattaggtgcaattattctagccaataagtggaagaaaagcatccaaaagagaattagaagagcatacttcaagaaaaatcagggcctactcttggaacagctaatctcagatgaaagcgccacaaattaaacaaggatattttccttggaggaactagaagaggcaaccaacaactttgatgctactcgtgttcttggtcgtggaggacatggcacagtttataaagggattctatctgaccagagtgtggtggccattaaaaaatcaaaaattgtggaacaaactgagatagatcagtttatcaatgaggttgctattttatctcaaattatccatcgcaatgtggtgaagctttttggttgctgtctcgaatctgaggtgcccttactggtatatgagttcataccaaatggtacattgcatgatcgtcttcatactgatgttagtgttaaatcctcattgtcatgggatgatcgaattaggattgcttcagaagcagcaggggcacttgcttatctgcattcggctgctgcaatacctattttccatcgagatgtgaaatcttccaatatactcttggatggcaactttactacaaaggtctctgactttggtgcttcaagatctgtttcactcgatgagactcatgtggtgactattgtccaaggtacatttggttatttagacccagagtattatcacactggacaactaactgaaaagagtgatgtatatagttttggagtgattctggtggaacttttgacaagaaagaaaccgattttcatcaacgatgtaggcacaaaacaaagtttgtctcattatttcgttgacagactccgtgagggatctcttatcgaaataatagattatcaggttcttgaagaggctcacagggaagacattgatgatattgcctcacttacagaggcatgcttgaaactcagaggaggagatagacctactatgaaagaagtagagatgaggctgcaattcctgagaactaagaggctaagaaaattccaatttctcccagtcccaggaagtggtggagagattcagcaccttttaagcccaaatgctggtaaatcccaagcacagaacaactataccagtgcaggtgatttatcatatgaagggatctccagttgctacagtttggagcaagaattatcatcctcagtcagtttgccacgctagctatatatgtaacatggagtgttgagttatcacatattttctacgaagtgttatgttacgtagttcactccagagaatggtttttgcatgcttcacttcctgtatacttgcagcatgtatgcatagcccatgtgagttgatagaatgacagttgtattctactataattatttgtgatcaatatccttgtaaggaatgacatggtattgtaatattgtatttaagctacagtggcaaagtgaacaagttcagtaataattttattactccattgccaatgtcttgctcagtaagggtcaccaataggtatctgactgataactcagtttgtagatgctggatctttttttccacatagcagtgacatcgttaatacggagtattggctgtgtttagttccttccaaagttggaagtttgggttgaaattggtacgatgtgactgaaaagttgtgtgtatgataggttgatgtgatggaaaaagttggaagtctggatctaaacacagccattatagagctagtcggaagtcaaaacttggaactcagagaacgttccgaatgcctttacacaaagtataaatggcacggttcaaattttttatttcatcacttgtccaaaaaccctgcattcataatgggaactgtaaaattgtttggatttggtgggataaggtcacaggaatagggatatatagaggaaatctaatttatggtttgattgaggatcaggggaaaaaagtgaagggttagaatcagtccacactccacaccccatcaccatttctatcccagcaacgaaagggcatgtagcctagtggttacagtgacctgagtagtaccccaaggtcctgagttcaaatctcctatggagcgaatttccccttctctaaaaaaaaaaatctctatcccagcaaaccggaccacaagtagtagtaagtacctatgctgcaaacagaaatgctattgtctatggctccaaattctgtagctttgcaaaagacagtttagtttaccagtggtgataatttgagtatggagttaaccataccagtacaattagactaaaaaaaagaactccaacctagattatgcacacaaccacaaacacaccaagcaaaacagtggagattgccgtttgacaagggagcgcaccagattcggttcgaacagacgagacaaccgggagcggcggcctgccggcctccgcgcttgggggaggcaccagccttctgatcgcgccggggaagaggaggagccctactgccggggcggaccaggcctccccttcgcccccacacctcgacacctctctgacactgggcctctgtcggcaaacaccctgcaactccaccgcggtctctgtttggctttgcacttgtgccgctgtgtcgtgattgtgtccgtcattttcatgtcgctctttgctcatgttgcgccaccgccgtctcataaattagagcaccaatgttggcttgctcctgcatagaagaaacacactgctaattaacttgtagggcagagcttctaactgtacgtagagagcaaagagtatacaaaagtgtatgcggcgttatcgtactacagtaatcctacttaggcaacggtgccggccttcttttgttcatctatatgaattagaagactgtggcaattgtatcacgctagtgtatggtgattaggatttgcactttttttttttgaaaggagggcaaaagctttgcctcatatatttatagagatgaagaaaaaacagatcaaaaatatgtacagggattaggatttgcacattgcaactctttccatctggtactggatttgtggaaagaatgggcgggcgagtttattggtccctgcaatggctttagattttgcaaggataatatatagtagtaccacattcttagaagttgcaatatactccatccgttttatattataagttgtttgattttttttctagtcaaatttatttaagtttgattaagtttatggaaaaatagtgtagtattttcaatacaaaagaaacatattatcaaaatatactcgatgctaaatttaatgaaattaatttgtcattttagatgttgcttttaatgacaatagcccaattttcactcaaaaaatgttgaaatcatgagtccccaatgttttcatagggaactgcagtctgcgggattatatttacgaatctgctcgtaatagcttacaagacgagcatagtgaccctatacggtgacaaatccagcaaatatcctctaattaattaagctaacaaccccaatttaatcactcttagggcatctcctcagcgtgcctccggtcgcaaaatataattttactaatgaccactcctacttcagagtgtgtttcgaaccagagcttgttatatacgcacacaaaagcagccattgcatcgagcaataataatattgcagtttgacgagggagcgtaccgatttcgaacaggaaattaatcggcgctgagctacagcggcgtgtcggcctggccttctgccggtgcctccgccatgaggaggtgctggaagctgaggtggacggcgccgcccccttccccccgactccctcccgaggctgtggcttagttgcttgcgatgaactgtggcccgcgcaccggcggtgaggtctgaggggagggcgacgagcggcgctgccgcgatgaggccgaggggatggatgttgctgccctggacgatgttggacttgaggtccagagttgagggctcccgttgcacgtggttgggcttcttgaggcccaaaaactaacaggccgggaagaagatcgagaattcacgccatacttgcttatgcacgtaggcaaaagtgggggccgctgatccgcgaccagtcgcgcgaggccccgcgcgcgcgatcagctgccccccctctagtgtgatctgttatcctatatatactactatacgtactatatgtatacgtactatatgtatatacatatgtatatatatagtttatacgcatatatattatacatacgtgtgtatatatacataattttttatatgtatgcacttttaatgtataaaaagatatacacatgtatataaagtttgtgtgtatacgtataaaaaacctaaaaaataagtgtatacaaacatatatatgtgtatacaaactttatatacatgtatacagagttggtatacgtatgtataaaaaccaaaaaatacacatacaaactttgtatatacgtatataaaagtttgcatacgtatatacaaagtttgtatacatgcatataaagtttgtatttatacgtacacagagtttagcatacatatactattaaaaaacggacaaacacaaaaatatacgggaagaaaaaaaaggaaaaaaataaaaccggaaaagatacggaaaaaaaaacaaaaaaaagggaaaccgtacgcccatacgcgccgaccgccgcctcctctgtcgtgtcgcgcgcgggagggctattagcccatttcaggaaagcccacgacacgaagaagcccaaaaaacagagacccgtgggtttatagaaacagtgttaggctagaagtagtaggggtgaactcgccgcgcgcgctcacacgcgcgactagtcgcttattagcgatttcgggcaaaaatggcttaaaattgggaaccagaaattacgaggccattcagattgtagataaaataaatcgtactacatagataagtgtagatcatatagataagtgtagatcgcagaactgattgcaatataaattcagagttgatccagatttattacaccacttccataatttgtgggttgtccttcgttcagatcggaattgacttgtatgaataatttatattcccagtcatctaccagaaacgtttcgcacgtgcaccggtcgttccaatcatcatctcgctagcttgtcggggaggaaaatgtcacgtacttgtcagctgtacgtagtcaccgccgaagaacatgttggtagaaatgatttcgacttgcgaggtcatcttaccgtgaacacccgggcatgcatatacctggtctaacacggccggccgtagtcattccctcgaagtcttagttcaaaagttaatgcagagcttttaaatgcttagaaataaatttgacagctctaaaagagtttgagacatacacgaataaacaaactcacacctaaattagactcaggttgtgtttagttcagcgcgaagtttggattttggtttaaattgaaaatgatgtgactgaaaagttgtgtgtgtatgacaggttgatgtgatggaaaatgactgaagtttggatccaaactttggatctaaacacagcctcatttcatctctcaaccacatatatatttcttccatctgtggttatcacctttaatttctacacgtacgtatcttcactccacagtccaccccattacttgtcattttttgtttttgcataacaagattatcgaataattatttcaataagaatatggtgggcgaattggccagtttgtagaaacatcagagtactgctaactgcagtgtagatcgaccgacttgacatgttacttcctttcaaggattcattagaaaagaacctacaaaaatctactattgaatcttctacagtctctagtttggcaacgccgcaggccattattttcgtcatctagtagcatgtgtattgctttgttactgtgtgttgtgattaatagcatccggacagtaccattctttccagctggtagatagtcagatagccatggacgtgtggaaataatcagatgtgtataggatcagtgagcagcgaccggcagttgggcgagtcgttggctccagcaacgacagggatatctgatgggactagtgcccctggaattcgttcatatacgaggacaatatacaggcttggcagattgcaacaaaactgtttgctgctgatcgaaatactgatcaatcaatgtctccatatgttatatagcgcttggggaatcgctcttaatcttgcgtttacttaagtctctgcaggcgcacgatcagtataaattaagagacgacagacgttgcctctgaatacaaaatcgatctcacgcgtagttagcatacatatctgcacccacaaagctaggcaagctagccgatcggcgcaaagatgagctcgagcttattagtggcagcttgcgccgtctcttttgtgctgctgtgctcggctgctacgtccccagcatcggctgcagtctacggagttggcggagggctcttgtctatcccttctaatgattccctggctcattgcccctctcgttgcggagatgttggcatcgactaccccttcgggatagcgccgggctgtttccgggaaggcttcgagctcatctgccgcaacaccgccaaaactcctaagctctttctgggtgatggtactactgagatcacagacttgggttataggtatgttttggcccagatatacttcaacattacggtgagaccaggtacggatacctacaacatatcctgggtggccccaacagagggtattactattgatcattacaacacattttacgttatcggttgtaatttcgatgctaccttgttcgagtatggcacggaggacctcataggttcttgcatgagtagatgtgatggtgaaaaggcaccaataggagggccttgtaatgggatgggatgctgtttcatcgagttaccaagggtcttgcggggctttcagtcaaccataattcttcggtcggatggcattcctgtagcacaaacagatccagtgcaccctggaatcatggctttcatgtcatcggactattatatatcaaacacaagtgaccttttcttaggttggacaaacacaagtaatgttgaaggcacagtactttcttttgctaccatagatcaaccaagctgtgaacgcgcgcgcatgaacaacacaagttatgcgtgtagccctggcagcaattgccggaatgtgtcatctggaggttatcattgttactgctctggttatgaacaggggaatccttaccttctagatggatgcacgggtacgtacttcctgcctgccccctttttacccccaaaacgaagcaaaatataatgcactgtcactaacctccttcttattcttattatatattgtaatttctatggtggaacagattacaaccccaaatataaagaacactgttcaacatcctgtggagacatgaagattcctttcccttttggagtcgaagaaggttgttttgctaacgaaaggtttagacttaattgtacagaaggtaacctaactgtttgcgaattaggagaagcacaatatcatgtgactgctgtgtctttggatgatgggactctaactgtcggaaacatgatgaatgacacaaactacgagaaagaggcgataattgttcagaccacagatactggccgtgattattcattctcaggccctgtggaagatagatttgatctctctatggaatacgccattgttataagatgggcagttaccaacttaacttgtgaagtagctgtgcagaagaacactacatacgcatgccgcagtagccacagctactgcctgaacgtcacccacaggaaagagttcatgggatatcgttgcaagtgttctcccggttttgaaggaaacccatacatcgaggatggctgcacaggttatttcctcttcacacctcctccagtgtgcaccagcaatgctcatgcctgcaaatgtttagaaattgaattatatcaatttaacttgggagaatcgacaaactaatcatagttttttgcagacatcaatgaatgcttactgccaaactattgcaatggcacgtgtcaaaatttacttggaaattatacatgcacaagctgcccgcatagaaaagagtttgatccaatcaaaaagaagtgtgttacatcagcaaagcaacgcaatcttcttttaggtaagaccgtaagaagtaatagccaacatgcaaaatgattttattatgacaaaatgaattgatgcaggtattgcaattggaattggttgtggtcttggctccatagttatcgtgttgggggcaatgatacttgccaataagtggaggaaaggcatccaaaagagaatacggagagcatatttcaagaaaaatcaaggcctactcttggagcaactaatctcaaatgaaagcgccacaaacaaaacgaagatattttccttggaagaactagaggaggcaaccaacaactttgatggaactcgtgttcttggacgtggaggacatggcacagtttacaaaggcattctatctgaccagcgtgtggtggccattaaaaaatcaaaaatcgttgagcaaactgagatagatcaatttatcaacgaggttgttatcttatctcaaattatccaccgcaatgtggtaaagatttttggttgttgtcttgaatctgaggtgccactgctggtttatgaattcatatcgaatggcacactgcatgaccaccttcataccgatcttagtgttagatgctcgctgtcatgggatgatcgcattaggattgctgtagaagcagcaggggcactttcctatctgcattcagctgctgcaataccaatttttcatagagacgtgaaatcttccaatattctcttagatggcagctttactacaaaggtctctgattttggtgcttcaagatctgtttcacttgatgaaactcatgtggtgactattgtccaaggcacattcggttatctagacccagagtattatcatactggacaactaactgaaaaaagtgatgtatatagttttggagtgatacttgtggaacttctaataagaaagaaaccaattttcattaatgaggcaggtgcaaaacaaagcttgtctcattacttcgttgaaggacttcaagagggctctctaatggaaataatagatcctcaggttgttgaagaggcaaacaaggaagagatcgatggaattgcctcgcttacaatggcatgcttgaaagttaaaggagtagatagacctactatgaaagaagtagagatgaggctgcagttcctgaaaactaagaggctaagaaaattccaactgctcccaggaaatgatggagaaatcgagcaccttttaagcccaaatactagtaactcttatgcacagaatatttatacaaatgctggtgatttaacatctgaaggaatcccaggttctggttgctacagtctggagcaagaattatcatcttcaattagtttgccacgctaattaggtataccacggtgaagtgatatctgatatgctttgtagttccgttctgaacagggtatgctgtattgttttatttcctgtgtgtaattttaggttacagtacgtatggatagcccacgcctgttgtatattactatcattatttgtgaggaatatatggttgtaagggattaattaaggccaggtggcaaagacaaaaatttgtataatcatgaacagatccattcagtaataatttcataactccatttccagttgcttacgcagtacttcctccgtttcatattataagactttctagcattgttcacatttatttttttttaccggaatcacattcatatactccctcattctctaaatatttaacactattaacttttttaaacatatttgaccgttcgtcttattaaaaacttttgtgaaatgtgtaaaactatatgcataaaagtatatttaacaataaatcaaatgataggaaaagaattaataattacttaaactttttgaataagacgaacggtcaaacatttttaaaaaagtcaacggcgtcaaacattttgggatggaggaagtatatgttaatctttacctattataaaagtttaagatgtttttgccagatgtttcgtacgtcatctgacttcgattcctactcggcttgcgcactctcgcccgctcgtgcgcatcagaatcaggtccgtgttagtgtccgacttctcccctaatacctgcgcgtgttcacatcctccatcacgagtcgttcgcacgcaccagccggaaaaaagatcgaagcatcgatatgtcagcaaatcgatcggactctaatccagacctcgtgcgtatcagaatcgggtccgtgttagtgtccgacttctcccctaatacctgcgcgtgttcacatcctccctcacgagtcgttcgcacgcaccagccggaaaaaagatcgaagcatcgatatgtcagcaaatcgatcggactctaatccagacctcgtgcgcatcagaatcgggtccgtgttagtgtccgacttctcccctaatacctgcgcgtgttcacatcctccctcacgagtcgttcgcacgcaccagccggaaaaaagatcgaagcatcgatatgtcagcaaatcgatcggactctaatccagactgatacaaatcacataggttgactcacggccacacaaataataaaatcagcatgggagatatatctatatctataactaatataaatattcatatttttccggtcgtcacatccttaacccacgtttttcgtccgtcaccgtcgccttcagctttgttcacaaaaactagggttctatttggagagataagctcgaaccgagctcgattccgcgttaatttctccgggataaggtccgattcttggggaaaacggaagaggaggataagggaaatatttcccctcaaccaattttggaaaaaatagaaaggggcgcccggatttggagtggaaagcggcgccgggtcgggttctgtctccggccagaggttgaagacaacactgtagcgacagggatgagatgtggactttggggaaaaaaagcctagcccgagaaaaaaagaaggaaggacgtgaaacaaacttttagcggtgcagctactaggccgaacaggaagaagtaggatgctaaagtggacttcacggattaggcccaagaaagagaggggatttttaattacttctccagataaattaaccaataaaatgatctttaaattgttaaaattatttcaaatgctcaaataatatcaagaaaactcttgaacatacttggataacaacattaaaaccagatcatttaatgattaatttattatttaaataatactgaaacgttctttgtattattaaaattagtagttgagctttgaaaaatccgagaaaaattccagagagcagaattaaccacgcatagaattaaatccatccatgctttatatttaggaaattttattatacatttacaacttattaatttatttatatataacattaattcaccaacaaatacatagcattaagtgtagccaagagcgaaaaaatgaggttggattcatcatgtcatctttccattcactacttaaaaaatatttttctggatgaccacccgaatagattgcagacaggccataagtgtttgtgcctacaaaaatttatcccattttcccatacggcttcttaagaaacttgtatgcaagaatcattttttccaaacggaccatttaaaatatatggacgtgaaaatgtggtgtttaactcaccggcatgcaaaaatacccccccgtagattctcactttttttattctccagtcctctctctttcccatcacccccattcatctcctccctcccagcggtaggcaagggcgacgacgatggcttcctcctcttctcccccactctttctctcccctctcccccctcccgacgcggtggagggctcgggcagtgggagagggcggaggagggatgcgacagcggcgacagatctggcggtggtgaggcgtccggcggcggatccgacggtggggaggtgcggcggccatcacccgcgcggatccgactgcggcggatccggtggtggggatgcgcggcaacagcggatccgatggtgaagaggcacgggggcaacggattcaactctccctcccgcgcgtcgacagtgatgggagcgggcggacccggccacccctagccccctacgccccacgacaaggacgaggatgaggatgaggacagcaacgacgacggttacaacgacgatgatgacgagaaggacggcgggcatccgtgatatggacaatattacatgacctaaaaaaataaataacttattgtagccataaatataggagtcaataaaaaacaattttatttcaaggtggtatcaatatctttcttataatcataaatcgagcggatccggtagtggggatgcgcggcagcaacggatccggtaatgaag

SEQ ID NO: 10322 - DNA, 20957 bp, Oryza sativa
gttgatcccaatttataaatgttttaccgtttgcaaataaacatgcatgtcttgctaattacatgggaatagggtttacctatctgctcgcttgtgccatgtttacttgatatctatcctttgtcaaccttgggtgataaattgactagctcgtgttacttatgtgacctagctagaactatatgcttagccatgcttaattaccactagctcagtcgatgggataattgcagtattagacattctagtatcttgttgagccgcgtgctcgagacatctggccatgttttgtggttgtaattatccaactaaaatgcgactgaatggtgggctgtgggtgcatggttttgtgagtcgcacccatggcaattaaggaccggttcacgggaaaccctggaagacttacagcgcttgccacaagcgggaatgggtaactgcttgatctgaagtatagctcgaccctttcctaggcaccggtggcgagggtgggcgtgatggagttgggtcggccggggtgtccggttgtccagctgccggattcaccgcggcgcaagaggggaccgcccactgccttttgaggggtgggggtgaaaccttagcgtggtgtggatggttaggggagggttatgcgaagggtctcgtcacaatcactcgacatggtgacgtgtgcatcatgggcacatgatgacgcggtgacatgtccgtgggttgtgtcttgtgggtacagttgtgcacctctggccagagtaaaactattcgaatagccgtgcccgctgatatgggcgatcgaccagattcaccgtgattagtctcacacttaataaatcgacccaatgcactgtagtacaggtgggttggttgggcctgttcaacatggtgtagcgttgatcattggagattttaatgttactttaattactcaacagttttactgttttgctcaataaaatgttttacaaccgcctttatgcaaatagccacaaaccgtccttgtgttccccttgcacgtctgcatcgttggtgtggcttgctgagtacggtggttgtactcagccttgctattattcccccttttcagaagtgtagtgcttctgagctgaagatggagttagaggaccaaggctcagaccccagttgagttttgcctgtggagtggagctgaagccccgctaggatcgcctttttccgctgctgctgcttttgtttcggtgtgaggactaagtgcctcttctgtaagtattttacgcgttatttacgtttggaactgtttattacttgtcgttttgtgtaccctggctggtcctggacagggatttaatgcacaaaatagtctggaaatttgggctaaatttctgggcgtgacagcacgacaagtatatctattaattaggaatagttttttagtttccttttgtctttagaaaaatatgtgtttagtgtccgataaggactttatgttttccttttatctttacgaaagtttctttcttgtcctacaaagactaatatctccccatgggtataaatatgtacacccggagtcattgtaaactatctcttgatcaatacaactactctcggcgcatcgccaccctctttaccgaggtttttacttatcaaccagcggaatttggcacttgaagcggggctgcatcggctttcgatctccggcgaaggggtaagtcctacgtttcgccggccccagtgaatctatcggctacattggtgttgttcaaggctgcatcgcttcgatctcttggatcgctctgatttggttgatatatttgcctacctgatatctcaattctatctctagttgcatttgtttagagacacatcggtttagttgggactgtcttggttaggttcgatcttctgtcttagccgatatatctctacaatcacaatgttgttataaatagatttgttatatccatcacattagacagatctatcggctcatcgagtattaaattatcatatacaatctcgtgctgcatcggttagattcgacctactagattattgttgataatataagtcttgttaagccgataggttcatgctaatgttttatcggggtgcaagctgataagttatctggacgttgcatcggcttgtaaggattgcatatacatatagttggatttagccgatcgcaacaaaagttttactgtttaatctaatcttgtggattttatgacatcagacctccagccgatgtatactttaacctttggatcaatacttgtttgactatatcatattgttagccgattggtttctactggattatattgctatattattgctatcagccgattgcctttatatcattatctacatcggacatatagccgattgctcaaaaccctatcgctatcggctggtatcggcatcggctggaattgctccatcggcttgtcagccgatcggctcattgatctgctatttgtatatcttgtcagttgcagtatcaaactgactggcacgcccgcatctcaacaacctttagacctgcactggagctaagcagatctctcaggccagtgtgtgtttttcacgtcaacagatattactatatgtttttattttctatacttggtgacaccctattttgtacaacttcaaattccaaatccatgtcagctctagagtttgtaaattagtttataataattttatattttatattttatctaaaatagaaacaaaagttcacatctaaatgttatcgatgtaaccataggtatagagacctatatattctgggttagaaatacacaactttaataaaaaaatcttagttctataagagcgaccccaaataatacctaaaaaactttttaaattgaactaaacattataaaacactaaaacaggtaagtttttctattacacagtatacgaacacacaccactatacacatagcatcatactaacgcacccgtgaattcatcctctaccacacgttcaaaagagacatcaaccatctctgcgcacctcccaaaatcaggctctcagatattactcgctcacagatggcttccgcttgcggccttccctttcggggcttgacgacgctgtgtcaagtcggcaacgcgcagatgcaggtggcaaggtcagcgaagcgaggcactgcgcacactggcacgacgcgcccaatgattggctcgcgagctgagagggccgcgaaaacgacgcgcgctaagcttagcttcggtgggcttctgcctgtacggcgagcgaagagcgatcgatggagatggatggatagtgcacggtccacgcggaagccaccaattttaaccgatccaacgtacacaacacaacaaaatcacacgaagctcacagcagcagcagcggcgtgccgtactgccgttcccgtgtcgtagtgtgtgtggcgtggaaagcgagcgatccgcgaccgcgcaaacgttggcgaagaaaggaacaggttttacgtacgttcgaccggttagtgccaaaactggatggagcttttctacttctgtttctcgcgtcaagatcgatcggtcgatcgatattggactaccggctttttattcgccggccctgccttgccgatcgaccgatcttttgcaatactggggaaatggggtgaggtaatcaccagtttagtacagacaagtcgaattgtattctttaagatctccctttttttttgcttttgtttctttttgcaaaagtttttttggttatataattggatacttgtgccaacttatggacaaatgaatcatcgatgcatcaatatgcatcgatgtatgtatggtttgattgaactgaagctacacgacggcggtagcggctagggtttcaagttattttgctttttgggatttttattttttttgccaaaactattttcgcgtaaagtcgctttaggtgaccacatacgaaaatcctgttttcgcatgtagttgcactacctgcatggaaaaataacagatatttacagacacctaggtgtagacaggccgaaggcctgcatgtaaaaatatgttttgaccgtctggaaaaatccttatttagtagtgttttgctctaattccttaatcttgtgtgccttttggctgttattggctttctcatcggcttttcgtatgcacgttaacttcttgagggtgggaatgcctcccatataggcacaagtacacaaccgctgcaccaccacctggtccttggatctagtgacctcaatctcatcatagcccgcatgtggcattgccctccatgcactcactctcggaagcgattgccacgtacactttcacctacacttcctagccgttagattcacgtattgcaacggtgatctcatcactattagatctaatgtcccccggtctaattgatcaccaccagatttggtaacctcgccattctcgtagaagagcttatcccacggtggtggagatgacatcatatccaacctctgcctttagtctctgatggagagggggcaggcaacgacggggcatggagaagggggaggtagggctcaaagagggaaagcaaggaaggagtgagggggagtaagggagagagggagatgagttatcagctaagatgagtggaagattgagctgcctgattcaacctatcgctagttcatccagttcactatggtttttatataggaaaacgtatgaattacccctttgaactatcacggcagtatgaattaccctcctagaccacaaaaccagacatttttaaccttgaactatctataccggatgaataaccccctttgatcaaatccgtcgtcgaccgccactgcgcgcctcaaccaccgaccgcccaggcgagctctgccttagctgcccatcacccgggcaagcttcgcctccgccgtcaactgactggtcccactactgcaggacagggcatgatccgcctccgcctgcttgagcgcgtacgcgggagagagagagagagagagaggggtatgacaggtgggcccaagggaggtatttttttatttttatttactgactagattgccacgtaggcgcaacgtgtgcaaactcaagtaaaaaccgttcaaaacagtgttaaggggggtaattcgtccggtattaaaagttcagggtgagtaatgtctggtttttgggttcaggggggtaatttgatatcgatcacgatagttcagggggtaattcgtacttttttcttttatatataatgaactggaaataatatttttttatcgattttagatgagcctgtagtgattaactgatttaaattgccttcctataccagtgaatcagtgattcaaagttagaaccggaggtgttaagtactcctacttgaggtatctaaattttacactaaaatttttggtaccttgaggtactttataaaggatggtaaaattaccttaatataaattatgagatccacatacaaaggttttatttcagatgcagaaattccgtgtgattaaatatctgcattacatttgtcagtcgtcacttatcatagtaaacgtgcagacagctctcttttaataattgacatgtttgtacgaatgtgtaacgattgagtcattggcacgacactttatgtagtgtcatgtccgacgagatctgacttgcgagaaagcacacacatacatgcatgtacgaattagcatccagtgctttaatgcttttgcaggttgaaattgtaatagtctttgcttcttaattcctccggtctaaagtataagtttggtcatcattttcatactctcacgcatatggcgatgctcaacttaacacaccacaggggttaaaccaaatcacttggtgacgtcttctttgccgtatttttatctaacaagtagattttggatagtgaaagagagccttttagatcacttaaaagctgttacacttaggttatgaaattgttttctttattccgacgtttgaaagtactccttgtgctattaggtaagaggtttctttttgtccatgtgctagcaagtatatttcttattatcttatatatagcctttgcaacctaggttttaattaagacgatccatggatatatagcacaagtatttccaacccaaaaaatatatagggtttgttcagattggtgccaaaataaaccttaccaaaatttggcaaattggcaacattttcaaaaaaaaattggtatgattggcttaataatattgtcaaaattctatacacattgccaatatttggtaacaaactaaacgtggtcatatgcctatcaattttaccaaataatagtatgattgaaaatgtcatcaatctgaacagcccataagctccctttcattatgcaatggtgtgtgtgaaagatatagcagtagtacgggcacatacgacctgcactagctgcagcctcaattgcaattcagtgctggttaccactaagcaagcacaacacacacatgacagaccagtgaaacaaaggaggaaaaaaagaaggcactattgtgtttggttggccccttcaatgtgggagcttgaccctacctgaatggatctatcaaatcaaaacccttgtgcaaaagagacacatgtaaatgtgcaatgtgtgtcttcccttttcacctccattggttctcagctgagaggcagtacatcatatagagatctttggcagtgcacagtccggacactttagggggacatcatatatacaaagaatgtttggccaccacaaacttcagctttatcttacaaaattcatgcatggttcatttatacaatttttctcattaaaattaatttcactcgttgcaaattctttgattttttgagtagtacctagttttgcaacaaaagaagttattggagaggtattacagtcaagtttgttattctttttctagttgtatatataggttgaatttgaatttttcatgtttgtaggacatatctcatattgatcatcatgcttttttttttttgaaaaaactatgatgatcatttgaatgacacacaaaaaatcccttggagaatgaaaagagtttcccatgccattgctctgaaaatatttcaggccgtagctaataaaaaaaagagtgagaacaataaaaaaagagtgagaacaatctgtgatgatatacatgtatagcactaaaataatatcagcggcaagcatcaatccaagcagaggacataacaagtaaaagagatttgatagcttgcaaacgaagaaaggcactaaaaacctttgcttttccacatcaaggtgaaagcgagatgcatctttatccaactggatactggagaactagtagagactaataactagtggcagcagcagaaagcaccaaacaagcaccccaaccaaacaaggcagaatccacccaccccaaaaacgaatttaaaggaggaaaaaaaataaaggaagctaacgcaacgtagaatctaattagcattgttcctctcactctcaggcacaaatcagattcttccaggagtcaaaggctctctctcaaagctttggctttcggttcacatggtgacatggttcagattcctcgtgtgagccagggaggagtcgacacggcggctgagagcactgagcagaatcgcaactcgctctgccggagattccaagtgccacaccaaagatactatttctctcctagtagtagtgcattctcctgcatggctgcaactatggacggctacccggctctatctttgcctttggtttttctctcgctttctcactgcttgcactagcatattaatttggtgattgatctgaatcagctgcatgcgttggccgtgacgaattcagaaaattgagggtcatacacataccaatggtctaaattgagcaatattgtatttaatgtagcctaaaacaacaacgagaaatggacattctacccggtgtcttgtgcgctaggtagtgtaccaccatgtataaccatgtgtgatgccattgtatatgaagctataaacgatgaaatatagaagtggattaattggagcacgaacagtggagtatattagagggttaggaaattgcacttatttatccgatttttttttcaaactttgtttagcataaatccattatggcgtttgtcgaagctgtgggcgtagaaagttgtccaaaataccattgttgtgttgatgatacgttgaactaggctcttattacgcatattgccatcgattgtcttgtcacaagagtcacaactcacaacacgatgatattttcacaactgttgatctaagcgctagatagaaagggatcgaattctgcagccgtggaggcaattaccacaagttggttgcgtccactgcgcgaaggtccattcagggcacaaaacctcgctttctccggcgtaattattccgtgtaaagcagcagcgcatctcgtggcagacacgcgtagtcgccaagcaatcatcgcgcgaggagaggagaggagaggaaggattgctcacagctcagagatcatatgattggtgatgaaacgaaaccaagctgaggtaaggccttagtgctgaagtgcccgagtgaaaagctggctggaggaacgaactggatatcagaaggtttgtgtttgttcgttggctggctcgatcactcggagctcctgctgcagattgggtcagtagtgaaagtgtgtactatgcatgagatgagtgcgtctttacaggaccctgttctgggaacttgtgacgactaacggcaagaatacctttgtggccatgatgaggatatgaatgcaagggcttcaaggatttgtccatattccataggagctggtacaaaataattgcggtaggtgacatgctatttgcaagatactccctattaacaaagctccgcgttaagacagaatcagcacatgtgtattttgcatcaagtagacgcacaagcatattacaggctgttaaggtgataaggtcccaactaaaacatgttattcagcactcgagatgcaagaacaccttatgtacaaaagcacaacgggatcaacgtgccccacttaagctccgagcctccgaccaatgcaaccatcaagtcattagctgatcagaagacatctttccttcctccattgtcagtgatgcactaggttatattgagtgctagtcattaatcttttcgtaaacttgtttttacttcatgtcaaccacctttccataagcctgttttacctcttcaagattttcagttaatcctcataagaaagggattgaagagaattgaggggaattaattccacactagatgtataataaatccccttcaaaaacaaggctttaggcagttagaagaaaacccttcaaaacaatcgtcctatcaaaaaccttaggacaagtagcattcatcgtctccttccataactatggtagaaaccaccagcaatgtggtgccgctgccgacctcctctgatcgaaccatcccaaatgccccgtccacctgatctgatactgctgccggtgttgcttcctccttgaccccaatttcccatctgtgacgatccaccattcatttcttcttcctccctttcattgtattccaggatcctgcgcttaatactctgcttctcctcaagctcagcagcctcttgctgctttgtgctttgcacaagtgagcagtcaccaggaacgaacatctgttttgtttgctgcttgtgccctttcttcattagcaccttaacacgcaccttgctgccacccccagcactaccaccctcttcatccacagtttcttctccactctcggactcgacagcccttgggtccttagaaccctcaaggacattcattggtaccatcatgttcaaagtggccctgggccgtacctctgatttacgtgactccaagctctcctgaagaagggctttcagctcccgatcaaagtcttctagctccttaggatcaacttgcacgactttatgtctaacctcaacaccttcatcttcatcagaaccagcaggaatgccatcatcctcatcatcaccttcattctcagatgcgtcatttgatttatcctcgaacataagatcttcctcgtcttcatgaccatcaatgctgccactatctgaataactttcactgtcagctccttcatgatccttgccattttcctcggctccatttgctgagctcctgccgttagcagaaaaggcagtatcatgtggctgcaccttctgagattcgctgtctgagagcttttcattttcaggcttctcaactgaggctgcacgctcactttcttcgagctcaagtaatgcagcatccagttcttctactgatgaatacctagccatgttgggtcttagctcagcaaacaaatcctgcaagaacacatggcaaaatatattttcggcatcatcaatgtaatgaacgccaacaaaaaaaatcaagtaatcataagccatatatctacagctccagtagagagtaatatattccaaaattcaaatgcatgaaactaatcctgtcgatttccttttgactcgttgtacaaacataataacaatggtaggattaagcacaaaacataacaatattgactggttacgaagttacaatgttctaagatatttcattgtttcacttgtaaagtacgtagtttttgcacagtgaccctacagaagtcaaggctcaagacaagatactccttgttctattttactgtttaatgtttcttgttagcaagaaaagtattgttgacttagcttctcctatttagcaaaacaaacaggtcgataggagtaaaacccaattttcttttctattctggtccccctagtttctcaagaaaagaaaggattacaggtccatttgcttaccaaatttcataatgctatttttttgtaaagttcatttggttacaaaccaaatacccatatttggcaatacccgaatatcaacatgcctcagaaatatgatgaagtaatcaatagaaagcttatgcagtcatttgacccatcttgttgggttttttcccctcataagttcataaccagaatccgaaaccactagataactattcttggctacaaacaacagcagtttgactgcacacatatgacactcgtgttttttttacttagtaacccagcatctctaatggagaagtttcacaaagtatatatgcatgttgggttgtcatcaggctgttcacatgataaagagtactaaaatgtacttatgaacattggcaaggtgtataatgagaaaaactaacctgaacgtcaaattctatgtcaagtggtaagggccctttactaataatatatctttgaaaatgcagcaagaacttgtcaagctttctttttgaagagcctctgttgaaatagtggccacaagtctgcagaagtgtaatgattaacctgatcctgaagcaatcttctggtggatccaacacatcttgctgggataaaaaaaaaagaagattactcaactgaatacaatgacagaaagatttgttagatctttcttaaaatcagcttgcaataagtattaaaaaggacatgagtaagaagatcaatgttaatgccacaaaatccaggcttttcactctaagaaatatgctgatgttctgtataatttggagtgtgtaatatgcacacaaatacagcaaacaagttacataacactaaagccaggcacagcatgattaacttttgatgaagttgctcttgtgttgtactgagcaaagagaaaggatcagagcacgaaacaatgttctagtatagcaatttaattgtttcaaaacagcaatcttagagccatgtggttttcttttttgaaaattacagagtctgagcctgcatctgaacatatcaacagaaataaggaatagtgccataaagttaaatgaagatataaaaaagtttccaatctttgctaaaggatatactcgtttacctcaggagttccatgaccaaatacgatgataaggtacagagtctcgaatacaactgatgaatcaatatgcttgtagctgtatagctctccaaggaatctcatgtgggcgagacgcctttgttgcattccatagtcattcagctccagccctacccttgtctcctctaaaacctgaattgaaatagagaataaagtaaaccacttggacatgatccacaaaaaaactgaaaactgccactttgttacaatttatttctactagctgacttgcaaaaaagagagcttgtggatagaattttggtggcgtagctatttctcaaacattccaaacacaaagattttgttcagaaacaaaggtaaattattacaatcagacatgcccctttggatcaaaaacaacatgagctaataccttgaacaaaggaactaacctcatctaccactgaaacagcaaagtcatcatgatggcgactaagaccagcagttagaagggcaatcagatgaacatggctgtattttcccttgtgaacctttagaaaacactttataaggtattgttggcactccacccaaggtagcttgcgtaattggcgaagaacatgttcaacacttgatttatcaagatcggagaaaagcaatttccgtatgtactgcagaggaagaaaaagacgatgaaataatcactactacactatactctgtagataaattcagtgaaaataatcaaagaaacgatcaaagaagacagaaattttacttgatgcagaggtggccgaacttttgaaactcgagcagatctttcaggtggtttacaaaggtaataggcattttctacaagtgtactgtggcggggatccaaattcttcacatttttcaatcgcatcagtatctccaacatgttagccatacgaatagtagtttcaggtgaacgatacaaaaaacgtccacaagtctcgagtagattgcaggccacatcaatgttatgatgactgaaatcatctaggcaggactgcaaaatatgtaagatatgagtacacaaagcaagtggaaatgcagcagagctataaagttccaaatcaatgcacaagatatgaataccttcaagcagctaaaaacaagagctgcaggtgcaattttgaatttgcacaactccccaataaacctaatgttttttatttttgtttcaatgttgatctgatcctgaaaaaataacaaaacagcgaggaatagttagtcacggtaactatcaaaggggagaaaagaaaatcttgcgtcccttaaacttaacatttcctagtctgtttggattatatgtggggaagatgcagaacatctggtccatgattgtctttgcttacattgatgttaatagcctaatatagatcggagagctaatgatatatagtccctccattattaaatatatattgttttagaattcatgcagacaaaccttgaaatcttaagtcactcgcatatgctataataatataaagatttcatatgtgaactatgtcattagtaaatgtcatgattttttaaacatagttattgttttacaatgagtatacgattagagaaggcgatgatcaaacatgtacattagagactgtaacaatgtcctaaacaataagtaaaagaaaacagagggcataccagatatcacaaaagaaaaaaacaagaattttctttcgaaaaataataaaagaagaatctttttgagaaggaacatgaaatgagcacaaataatgcaaagggaagaaaatagttaatgtcagcataccttcttatttattaagaagttgaactcctcttcaagcatagaaagaagcatacttggaacatctttcatacatgttgaaagtgtagccaccaaccgagaatagtaaggcaaaagttccagtgaagtccttggaacattgaataacgtccgcacgagtttctttcgacttgctttagaatttaggtagcaaaactcaacctggaaccaaaagtaagttatgaatgataattggtgttaaacatgaagtggatcgataatacaatttgagttaataccgtcaattggtcaataagatcacggctaacacatcctggcagcctctgaaggaggttgtctaaacttgcaccatccacagctcttattttctccttctctctttcagtttttctgtcaaaatccttctctttagatttttccttgtctacaccttttcccttatctttatctttttcttcactatccttcactccatcatctgcctttccttccagatgatattcagtgatggaagaagtttgaggattgtcatgtacgtcagtatcttgttctgcgacgggttccttcaaaagaacatgcaacaatggtttagggcaggacatgacacaatgacatacaaaagggaaatgatacaaaaaaaagtaagaaaatgcacatttaaaaaagcaatgaacacattccatcttctctcttttcctctcccaatccacaaacatacaacaaggacacagaaacaatcttgtgtataagatatgaaaatgtattggaacactttatcaatcaaaattgtaaacaaggaaatggaaagcattcattggatcatgctctgtcaaacatctccatataacatcacatatttgattaacatcaattgggaattaaaacactgcacaaatatttagcttgaatcaatctacatacactatttgaatttaaacagaatcgtcagccatatctaagagactgaaaaggtctgaactttgatacacagaagaaatgagcaaaatggagatactctggatgcctcgtgccactaaaaaagagtacccaaggaaacataagtgacaaccaaattgtcatgcagtgatatattgatatctaaaaaaccagtttacacagaaaaaaagtactaagtttggagacattgtgttcttacagattgttcacgacccttctcattcaactttggttcagcctctcccaataacacagcgggcacaaatgctctgctcgaaattaaggcatataggttaatgtagttccacaacaactaactagtgagagaagataacagtgaagatatgaagggaaacctgagatcaggtaaagattcataaaaagcttttgtatcctcatcatcccaaataggttccagtgcagacggttcttttgcagtagacggggctacatcacttcctgtagtaactctagttgtgtttccatcatctggcatcacggggggctgcatgtcaagagcttcagctaacctgcaaaagaaaggttaaagattggcaaaaaccacacacaaaatacatgcaactagatgataatgttaacatcatcaaaagataagtgccaacagttagtcaacacatggcaaaatagttatatttatctaccaaaatttaatggcattgaacagtaacactacaaagatcacgtgttggaaattaacattgatgtatcactgaatgtggacactggtcccaacttgccatcctcacattggatgcaaaatttacaatttaaccatttgcaatgtcattgagcagatctttttccccagaatgtgcggctgtgaattaactaaatatctgtggtcttttgcaatcacaaacatgaaaacatattataggataaaataggtagaaagatgtcttctatatcactttgtaaatcttttgcttagtaggaaggaaacaatgttttgaagttcgatcaaaacagtaaaattcgatttacatgatcaaaaggaaatcctctaagttacatattgtttttatactgaaatttgagaagggccaggaatgtctggtacatgttgtatcccagctgcacttaggcatggtatactcctcattcatgtgtatgtatattcatatgataaactatgttacagtgtgtgtggtacagaagaacaccatgattgcattgtaataaagataacaaattagaggaaattaaaatggtaaattccagggcagcacatgtcctgcaatactatgcaactataagctccctaacagaagaccagatgcgagaactggataaatggtagcttatgctgttacggaaccatatacaaataaattaaagataacactctcaaatgtatactcacgaggatacaccacgttgtaaatgatcaaaagacttccggagtttttcatacgaagcagtgttctcgtcgcttagttcacctttggcagttaaaacttttgcattctctgcctccatcagacgaagagactggggatagtgcatagttgggacgtattcataaaagatatcagaggaaagtaaaaaaaatgatgacaaaagaaggcaaaactagtatatataagagagcagttaccgcatgttctgattggagtagttcagctacagcatcataataagtgttcaaggctttcttgaagaactttttctgatcagccgtaacatttagatccttaaataactgtaccaattcagaatttgtgcggtcagatactcagcgcaatagtatggatactataatgcatggacaagagtttgttcgaatcattcaaacatatgagtcttctgaacaatgtgctagctggtatatgtattccagaatgctgtattggtagaatccttaggataacacagcttagcataaggtggggaagtagccaggtaggatcattttatacatacagatccttcccatgcttaagcccttgggcacaacgagtcaattatagcctaggcacttcctgaattgaagttccccaccattttctttttataataacaaaattaaaccttatgggtctatctatccttagtggtgaactagccaaattcgatattttatacatttctaaaagctgaaaaatgtatgtgcacatattcagaaacaaaaccagttgaatgatttccgttcaacaagtaaagagtagatctctcttcctaatgaagtctcatgatttaataagtatgcttaaatttctcttacctcatcataagcttcttgaccatgagactgtaaccctatgaaaaatctcccttgacgagcaaaggcagaaagaagagacaaatttgcctgagttgtttcccggtccttcaagtgttctaatgatgtaagatcttttataatgtttacaaatatactagcatcttcaacaatcccaacaaaatacagttcaattagaagtttcagtgtgcttctcttcttcatagctcttgagtttttgtctgcgtccaaatcttctccagatttcccaggaaagaatacctttagtagcccttgtgtaagacaaggagagaaatccttgtatctttgatgaagtaaggagcaaacctaaattacattgacacaatagttattatattacacaattccagatagaagtgacacttttggaagttcaagtctttatcaaagaaaactcaaaacaagcaaattgcagtaaagcatgatgcaataagtccaaataataactgaaatacatgtaacagcacatgtaaagagcatcactaggcaatggaaaatgcttcattatgcaacctagaaactaaatagtcaattgcattgaacaaaagaccttgctcaagtacaggtcggatggttccttatataggcacttttgcaaacacactaagaccacacaagttattcgaactcaattacctgaacagcagcttgtatatcagcagaacgaagtttggcctcacaaatataagaaactgcctcgctgacaaatttgctcaagttcacacttttcaactcatccatcaatccatccttctgttcatcatttattgttttgagtttctttataactgttgtatttcgcttaatactggagtcaagagtcctcaagtaatttgcatctgaaattagagaatcaccatatcataatagtgctagaaaaatgtggttatgacttatcaccattagaaattatctaatcaagaactcaaacatttttctgactgaatataactcaaaatttcattaacctcaacggcataaatattaaccatccattccaacgcaagagaaccaaggattacgagagtggtaaatttgagtaaaaaagacaaacaatgaattaaaatgaagtcattgagtagcttttgaggttattttcgtagctaagactccaaaatcactacaaaaattcctcatccacaacaatctcactttagcaaaaaattataaatattcaaattagtcactaatattcaccatgaccactatgaagtcattatactgaatgcaacttagtaccaggcctttcagagtttaggttgctccggcggagggcagtcttttgatcaacaagttttttgtattcttcaagacgagcctcctgcatacagccaaaatttaggatcagtgagcagaatttctgaagtcacgtcactagaaagtgcagacgaccaattgtacagggtagtttacaaattatcaatcttcaactagatctgccacagttctagaaacagcaaacgagtccatttcacaggcaatcaagagtacactttttacgcaaatacctcaagttaaagaaactagaactgaattggttgtaagggagttttcttgtgtgttgagtactaatataaccagaacagttttgtttgtaaagctaagtcaaatatgtgttgcagattcataatttctgctggtaacttcagttgttaagttgcgagattcagattcacagtaaacaagtataatgtggttcaatgcgtcagaaccatgctgtgttatgcccccatgtaatcaaagtatctctggctatcatggtgaaaaatgggaagcaaaaaacccaaccattataataatgacaaattatggacatcaacctgctcccttattgaattgcagccaacatccattgattttgtcaatgaaaaagtatcgtgctaaaatgagattaagcaaaattgcctgtttcagattgttactaaaggcacaccagaattacctcatcatcttgcttgttttggcgggtctcgtcatcttgcttggcttccttgctgttctcattctgagtgttctccattttattttacaaaaagtagaaaccagatatacacagtggaaagctgcaaaactagaaaagagaagaggaatgtttcacgttttagaaactagtagttcactgcaagtctgcaactgcaaattatttgcaaaatacagctaaatgcaacatccctgacaaacagcacaataagatatgcacgacatatgtgcatctcacgttaatgacaaagccataaaggccattatttagagattcacgctgatcactagagatctgtagtgctcaaagtacccaaacatacagaacttactgcagggcaactaatccctaccaccacacacacctaccccccgcgggccgcagagactgaattaaagtggatagtttctcccaattgcaaataaaaccgacaggaatcgaatcgctaggtttgaacgcatcaaaaccaaaaacccctagggatcgaactaagcgtgtgaaactactccctagttggcagcggcaccgcaggggtgtcccgaagcgggcggagaccgagaggacggtagggcgggcgcgccacaattcgcgccgccgccgccgccgccgccgccgtctcggcccggaagcccgagagagccccggcgcacggcgcacgggaggggaacgtgggggaagcaggggcacgtacctgcaggagagggcgcggcggtcgccggagacgagcgcgtggctggggagacgccgcgctttctcggtcggaggccggcacgaagggggaggttgcgggcgaggaggagaggggtgtggactcccggtgggagggcgcaggggaagaaaggggagcacgggaggggagaagcaggaggatctctctccttaaatgggcctaacccgtgaaaattggcccggcaatgacttcgcacgtgcgcggcccaatattagggacggacgcgggggagtgggagataaatgggccgaaagacggcctgactaagggggacaattacaatgcggaatacccatcggcctagcctaattagatggtgtttgaaactgatgaagaacgaaaaagctattattggcacataattaattaaattttgattattacaaacttaataaatttatataattgatattttaaagaaatttctatatataaaattttcgtatagaacacattgtttagtaatttcgccttgcagtaaaatgtgagaatgggccagattcaccggatccactgcatataaagtcctacgaactgaagaaaatggtacttcttcgaatatctaccaatctgctttgggagaaaatcaggtacagtacttccttccaaaacaatgtgataaaaagatccagcggagcatacttttgcaatgcattgctatgcaggagtacaaatttcaagataataagtaataaattcggatgcattcttgaaaaggaagtgtggtgctgcggtgcagtataaaggaataagattactttgactccctcaactgaccaccgaatctaaatcgtatccctcaaccgcaataccagaaatctcgaccccccgaacttgcaaaaccggtgtaatttaactccctcgccggttttgggaggtggtttcgctgacgtggcgccacgtggcgtctatgtggcgatattaaccgagtcttcggtccacgtggcgttaacgtggcaattacgtggcattagaattacaaaatatgcgtgggacccattagtcattggcacaaaaagaaatgtgggcccactgatatgtggggcccacatgtcagtcctcttcctcctccctatctcccttctctctctttctctccccttcttcccattcggccgacaggcaggagggcggcgagagcgagcgggcggcatcggggcgcatcagaaccgaactgggggcagcggtcggcggctaggacgacggcggctcggcggcggcgacggcgaggggaacggcggcggcgactcgcggcagtgggagggcgaggggaacggcggcggcgactcgcggcagtgggagggcgagcggaacgg

SEQ ID NO: 10323 - DNA, 54653 bp, Oryza sativa
ccgtcctgttggatgagggagccagccactctggcgccccaaaaaggaccatttctaggataagttttttcaggggtctatttgcgaaataagtttttcaaaagaaccaaaatgtgaaaaatccagcctaagcctgcgaggctgcgaccgcctcctcgagcagcatgatgatattgctcggctcgctgccatcgcacggcttgttccccttaccgttttcggcgtggttatcggaccccacggtaaagtggttaccttgataaccgcaagatataccgtggttttaaaaaactttatgtattgtaaccgcgataaccgttaagtaaccgcactgttttgtaaaccgagggaacgatagccgtacagcgtggacgaacgcaagtatctgtacagaaacgcaaacagagatcgacgaagggaatgccaaacgcccagatctgggaggctacgacctggagcgcagatggtgtttgtctctgaaacagaggagaggacgagtcggctcaaagcaccagagagaaaaactaaccacaggatggtggcacgctcgtggtcgtgggcgcctgggcgacgaacgtgcaagctggagtatgagagagcgagccatgaaggatgggcaggccgcactcacgggcacacggcgagctgcaagcctgcaatgcctgcaaggctgcaaatcagagtccacggagctacagcgtgtcgttagagcaagtttaatagtatagcttactgctagctctaattcattatatccaatctaataggcaattcatacaatagttgcttactatattattaatatattgttccatctatcatacacacattgtgttttggagtccgcgctgtagctggttacaaatctgtagtccgttgctcttctctctcatattttatctcgttaaaatatgtttacagctggctaatagattgctattgtatctgctcttatgcatgatcgccattgttcccagataaacagaggcattacccccacggctcgggatctctactacacatttcagcatagcaaagcgccaaagcccattggccccaccggccaccgcgcataagccctcgcaacaacagccaacttgaagcagtggagctcaaaattcgttccgattctaggggggatcgagcagcgagcggactcccctcgcttaccgccgcgcttggccgccgccgagggacggtggatcgcggtgtcgggggactcggcgtgaggggaagcgggaggcgtggtccacctcgttaggccggtgcctactcccagcgacggcaccgccaggacgacgcgccgccgtgatctcggcggctccggacctccggttgtcttctcgaaccgatattggtacgcttccttctcaaacatcaatctccatgcctcgttgatgttttaatctgctactattattgagtattacctccgtttcaggttataagactttctagcattgttcatattaatataaatattaataaatctaggcacatatatatatatatgtttatattccctagcacagtgcctgtgcgttgccacgggtgaagtcaattttgattttacatatatatactctgtacatgcacgttagtagataaggaatcgaaagcgatgacatatcaaccgaaagtgactccactaaatcgaaccttctattgttgtgcaacgaattgacactcactacactcatacctaattgtttgttgttttaaatctactcgatttatgattataagaaagatattgataccaccttaaaataaaattgtttttttactgactcctatatttatggctacaataaattatttatttttttaggtcatgtaatattgtccatatcatgtatgcccgccgtcctcctcgtcatcgtcgtcgttgctgtcctcgtcctcgtccttgtcgtggggggtagtgggctaggggtggctgggtccaccagctcccttcaccatcgacgcgagggagggggagttgaatccgctgcccccatgcttcttcattaccggatccgttgctgccgcgcatccccactaccggatccgctcgatttatgattataagaaagatattgataccaccttgaaataaaattgttttttattgactcctatatttatggctacaataagttatttatttttttaggtcatgtaatattgtccatatcacggatgcccgccgtcctcctcgtcatcatcgtcgttgtaaccgtcgtcgttgctgtcctcatcctcatcctcgtccttgtcgtggggcgtagggggctaggggtggccgggtccgcccgctcccatcactgtcgacgcgcgggagggagagttgaatccgttgcccccgtgcctcttcaccatcggatccgctgttgccgcgcatccccaccaccggatccgccgcagtcggatccgcgcgggtgatggccgccgcacctccccaccgtcggatccgccgccggacgcctcaccaccgccagatctgtcgccgctgtcgcatccctcctccgccctctcccactgcccgagccctccaccgcgtcgggaggggggagaggggagagaaggagtgggggagaagaggaggaagccatcgtcgtcgcccttgcctaccgctgggagggaggagatgaatgggggtgatgggaaagagagaggactggagaataaaaaaagtgagaatctacgggggggtatttttgcatgccggtgagttaaacaccacattttcacgtccatatattttaaatggtccgtttggaaaaaatgattcttgcatacaagtttcttaagaagccgtatgggaaaatgggataaatttttgtaggcacaaacacttatggcctgtctgcaatctattcgggtggtcatccagaaaaatattttttaagtagtgaatggaaagatgacatgatgaatccaacctcattttttcgctcttggctacacttaatgctatgtatttgttggtgaattaatgttatatataaataaattaataagttgtaaatgtataataaaatttcctaaatataaagcatggatggatttaattctatgcgtggttaattctgctctctggaatttttctcggatttttcaaagctcaactactaattttaataatacaaagaacgtttcagtattatttaaataataaattaatcattaaatgatctggttttaatgttgttatccaagtatgttcaagagttttcttgatattatttgagcatttgaaataattttaacaatttaaagatcattttattggttaatttatctggagaagtaattaaaaatcccctctctttcttgggcctaatccgtgaagtccactttagcatcctacttcttcctgttcggcctagtagctgcaccgctaaaagtttgtttcacgtccttccttctttttttctcgggctaggctttttttccccaaagtccacatctcatccctgtcgctacagtgttgtcttcaacctctggccggagacagaacccgacccggcgccgctttccactccaaatccgggcgcccctttctattttttccaaaattggttgaggggaaatatttcccttatcctcctcttccgttttccccaagaatcggaccttatcccggagaaattaacgcggaatcgagctcggttcgagcttatctctccaaatagaaccctagtttttgtgaacaaagctgaaggcgacggtgacggacgaaaaacgtgggttaaggatgtgacgaccggaaaaatatgaatatttatattagttatagatatagatatatctcccatgctgattttattatttgtgtggccgtgagtcaacctatgtgatttgtatcagtctggattagagtccgatcgatttgctgacatatcgatgcttcgatcttttttccggctggtgcgtgcgaacgactcgtgagggaggatgtgaacacgcgcaggtattaggggagaagtcggacactaacacggacccgattctgatgcgcacgaggtctggattagagtccgatcgatttgctgacatatcgatgcttcgatcttttttccggctggtgcgtgcgaacgactcgtgagggaggatgtgaacacgcgcaggtattaggggagaagtcggacactaacacggacccgattctgatgcgcacgaggtctggattagagtccgatcgatttgctgacatatcgatgcttcgatcttttttccggctggtgcgtgcgaacgactcgtgagggaggatgtgaacacgcgcaggtattaggggagaagtcggacactaacacggacccgattctgatacgcacaaggtctggattagagtccgatcgatttgctgacatatcgatgcttcgatcttttttccggctggtgcgtgcgaacgactcgtgatggaggatgtgaacacgcgcaggtattaggggagaagtcggacactaacacggacctgattctgatgcgcacgagcgggcgagagtgcgcaagccgagtaggaatcgaagtcagatgacgtacgaaacatctggcaaaaacatcttaaacttttataataggtaaagattaacatatacttcctccatcccaaaatgtttgacgccgttgacttttttaaaaatgtttgaccgttcgtcttattcaaaaagtttaagtaattattaattcttttcctatcatttgatttattgttaaatatacttttatgcatatagttttacacatttcacaaaagtttttaataagacgaacggtcaaatatgtttaaaaaagttaatagtgttaaatatttagagaatgagggagtatatgaatgtgattccggtaaaaaaaaataaatgtgaacaatgctagaaagtcttataatatgaaacggaggaagtactgcgtaagcaactggaaatggagttatgaaattattactgaatggatctgttcatgattatacaaatttttgtctttgccacctggccttaattaatcccttacaaccatatattcctcacaaataatgatagtaatatacaacaggcgtgggctatccatacgtactgtaacctaaaattacacacaggaaataaaacaatacagcataccctgttcagaacggaactacaaagcatatcagatatcacttcaccgtggtatacctaattagcgtggcaaactaattgaagatgataattcttgctccagactgtagcaaccagaacctgggattccttcagatgttaaatcaccagcatttgtataaatattctgtgcataagagttactagtatttgggcttaaaaggtgctcgatttctccatcatttcctgggagcagttggaattttcttagcctcttagttttcaggaactgcagcctcatctctacttctttcatagtaggtctatctactcctttaactttcaagcatgccattgtaagcgaggcaattccatcgatctcttccttgtttgcctcttcaacaacctgaggatctattatttccattagagagccctcttgaagtccttcaacgaagtaatgagacaagctttgttttgcacctgcctcattaatgaaaattggtttctttcttattagaagttccacaagtatcactccaaaactatatacatcacttttttcagttagttgtccagtatgataatactctgggtctagataaccgaatgtgccttggacaatagtcaccacatgagtttcatcaagtgaaacagatcttgaagcaccaaaatcagagacctttgtagtaaagctgccatctaagagaatattggaagatttcacgtctctatgaaaaattggtattgcagcagctgaatgcagataggaaagtgcccctgctgcttctacagcaatcctaatgcgatcatcccatgacagcgagcatctaacactaagatcggtatgaaggtggtcatgcagtgtgccattcgatatgaattcataaaccagcagtggcacctcagattcaagacaacaaccaaaaatctttaccacattgcggtggataatttgagataagataacaacctcgttgataaattgatctatctcagtttgctcaacgatttttgattttttaatggccaccacacgctggtcagatagaatgcctttgtaaactgtgccatgtcctccacgtccaagaacacgagttccatcaaagttgttggttgcctcctctagttcttccaaggaaaatatcttcgttttgtttgtggcgctttcatttgagattagttgctccaagagtaggccttgatttttcttgaaatatgctctccgtattctcttttggatgcctttcctccacttattggcaagtatcattgcccccaacacgataactatggagccaagaccacaaccaattccaattgcaatacctgcatcaattcattttgtcataataaaatcattttgcatgttggctattacttcttacggtcttacctaaaagaagattgcgttgctttgctgatgtaacacacttctttttgattggatcaaactcttttctatgcgggcagcttgtgcatgtataatttccaagtaaattttgacacgtgccattgcaatagtttggcagtaagcattcattgatgtctgcaaaaaactatgattagtttgtcgattctcccaagttaaattgatataattcaatttctaaacatttgcaggcatgagcattgctggtgcacactggaggaggtgtgaagaggaaataacctgtgcagccatcctcgatgtatgggtttccttcaaaaccgggagaacacttgcaacgatatcccatgaactctttcctgtgggtgacgttcaggcagtagctgtggctactgcggcatgcgtatgtagtgttcttctgcacagctacttcacaagttaagttggtaactgcccatcttataacaatggcgtattccatagagagatcaaatctatcttccacagggcctgagaatgaataatcacggccagtatctgtggtctgaacaattatcgcctctttctcgtagtttgtgtcattcatcatgtttccgacagttagagtcccatcatccaaagacacagcagtcacatgatattgtgcttctcctaattcgcaaacagttaggttaccttctgtacaattaagtctaaacctttcgttagcaaaacaaccttcttcgactccaaaagggaaaggaatcttcatgtctccacaggatgttgaacagtgttctttatatttggggttgtaatctgttccaccatagaaattacaatatataataagaataagaaggaggttagtgacagtgcattatattttgcttcgttttgggggtaaaaagggggcaggcaggaagtacgtacccgtgcatccatctagaaggtaaggattcccctgttcataaccagagcagtaacaatgataacctccagatgacacattccggcaattgctgccagggctacacgcataacttgtgttgttcatgcgcgcgcgttcacagcttggttgatctatggtagcaaaagaaagtactgtgccttcaacattacttgtgtttgtccaacctaagaaaaggtcacttgtgtttgatatataatagtccgatgacatgaaagccatgattccagggtgcactggatctgtttgtgctacaggaatgccatccgaccgaagaattatggttgactgaaagccccgcaagacccttggtaactcgatgaaacagcatcccatcccattacaaggccctcctattggtgccttttcaccatcacatctactcatgcaagaacctatgaggtcctccgtgccatactcgaacaaggtagcatcgaaattacaaccgataacgtaaaatgtgttgtaatgatcaatagtaataccctctgttggggccacccaggatatgttgtaggtatccgtacctggtctcaccgtaatgttgaagtatatctgggccaaaacatacctataacccaagtctgtgatctcagtagtaccatcacccagaaagagcttaggagttttggcggtgttgcggcagatgagctcgaagccttcccggaaacagcccggcgctatcccgaaggggtagtcgatgccaacatctccgcaacgagaggggcaatgagccagggaatcattagaagggatagacaagagccctccgccaactccgtagactgcagccgatgctggggacgtagcagccgagcacagcagcacaaaagagacggcgcaagctgccactaataagctcgagctcatctttgcgccgatcggctagcttgcctagctttgtgggtgcagatatgtatgctaactacgcgtgagatcgattttgtattcagaggcaacgtctgtcgtctcttaatttatactgatcgtgcgcctgcagagacttaagtaaacgcaagattaagagcgattccccaagcgctatataacatatggagacattgattgatcagtatttcgatcagcagcaaacagttttgttgcaatctgccaagcctgtatattgtcctcgtatatgaacgaattccaggggcactagtcccatcagatatccctgtcgttgctggagccaacgactcgcccaactgccggtcgctgctcactgatcctatacacatctgattatttccacacgtccatggctatctgactatctaccagctggaaagaatggtactgtccggatgctattaatcacaacacacagtaacaaagcaatacacatgctactagatgacgaaaataatggcctgcggcgttgccaaactagagactgtagaagattcaatagtagatttttgtaggttcttttctaatgaatccttgaaaggaagtaacatgtcaagtcggtcgatctacactgcagttagcagtactctgatgtttctacaaactggccaattcgcccaccatattcttattgaaataattattcgataatcttgttatgcaaaaacaaaaaatgacaagtaatggggtggactgtggagtgaagatacgtacgtgtagaaattaaaggtgataaccacagatggaagaaatatatatgtggttgagagatgaaatgaggctgtgtttagatccaaagtttggatccaaacttcagtcattttccatcacatcaacctgtcatacacacacaacttttcagtcacatcattttcaatttaaaccaaaatccaaacttcgcgctgaactaaacacaacctgagtctaatttaggtgtgagtttgtttattcgtgtatgtctcaaactcttttagagctgtcaaatttatttctaagcatttaaaagctctgcattaacttttgaactaagacttcgagggaatgactacggccggccgtgttagaccaggtatatgcatgcccgggtgttcacggtaagatgacctcgcaagtcgaaatcatttctaccaacatgttcttcggcggtgactacgtacagctgacaagtacgtgacattttcctccccgacaagctagcgagatgatgattggaacgaccggtgcacgtgcgaaacgtttctggtagatgactgggaatataaattattcatacaagtcaattccgatctgaacgaaggacaacccacaaattatggaagtggtgtaataaatctggatcaactctgaatttatattgcaatcagttctgcgatctacacttatctatatgatctacacttatctatgtagtacgatttattttatctacaatctgaatggcctcgtaatttctggttcccaattttaagccatttttgcccgaaatcgctaataagcgactagtcgcgcgtgtgagcgcgcgcggcgagttcacccctactacttctagcctaacactgtttctataaacccacgggtctctgttttttgggcttcttcgtgtcgtgggctttcctgaaatgggctaatagccctcccgcgcgcgacacgacagaggaggcggcggtcggcgcgtatgggcgtacggtttcccttttttttgtttttttttccgtatcttttccggttttatttttttccttttttttcttcccgtatatttttgtgtttgtccgttttttaatagtatatgtatgctaaactctgtgtacgtataaatacaaactttatatgcatgtatacaaactttgtatatacgtatgcaaacttttatatacgtatatacaaagtttgtatgtgtattttttggtttttatacatacgtataccaactctgtatacatgtatataaagtttgtatacacatatatatgtttgtatacacttattttttaggttttttatacgtatacacacaaactttatatacatgtgtatatctttttatacattaaaagtgcatacatataaaaaattatgtatatatacacacgtatgtataatatatatgcgtataaactatatatatacatatgtatatacatatagtacgtatacatatagtacgtatagtagtatatataggataacagatcacactagagggggggcagctgatcgcgcgcgcggggcctcgcgcgactggtcgcggatcagcggcccccacttttgcctacgtgcataagcaagtatggcgtgaattctcgatcttcttcccggcctgttagtttttgggcctcaagaagcccaaccacgtgcaacgggagccctcaactctggacctcaagtccaacatcgtccagggcagcaacatccatcccctcggcctcatcgcggcagcgccgctcgtcgccctcccctcagacctcaccgccggtgcgcgggccacagttcatcgcaagcaactaagccacagcctcgggagggagtcggggggaagggggcggcgccgtccacctcagcttccagcacctcctcatggcggaggcaccggcagaaggccaggccgacacgccgctgtagctcagcgccgattaatttcctgttcgaaatcggtacgctccctcgtcaaactgcaatattattattgctcgatgcaatggctgcttttgtgtgcgtatataacaagctctggttcgaaacacactctgaagtaggagtggtcattagtaaaattatattttgcgaccggaggcacgctgaggagatgccctaagagtgattaaattggggttgctagcttaattaattagaggatatttgctggatttgtcaccgtatagggtcactatgctcgtcttgttaagctattacgagcagattcgtaaatatagtcccgcagactgcagttccccatgaaaacattgggaactcatgatttcaacattttctgagtgaaaattgggctcttgtcattaaaagaaacatctaaaataccaaattaatttcattaaatctagcattgagtatattttgataatatgtttcttttgtattgaaaatactacaatatttttctactataaacttaatcaaacttaaataagtttgactagaaaaaagtcaaacaacttataatataaaacggatggagtatattgcaactattaagaatgtggtactactatatattatccttgcaaaatctacgtccgttgcagaggccaattaactcgccgattctttccacaaatccagtatcagctggaaagaaagagtggcaaggtgcaaattgttaccaaccctgtcaagaccaggccgaagagctcaagatagcgacggcccaacactcgtataattgggccggactgggttgcgtaagagagtggctagcctgtgtatataaaggcctaaccttatgggaatcggtatcgaaaaacattgtactgaaacctctctataattcaaatcccatcatcctcctcctaatcctttgttctttctatcctgaactcttccattcttcctgtctccctctctcgctcttgctcaccaactgttcgacagaaatcccaggaagagttcgtaacaaatttggtatcagagcagtcgaatctggattatctagagaagccacggtatcattcgcgagcgcaactcaaggcgaacgagatggagcagcaacttggcgagctgatgactacgatgacttcaattcagaagcagaacgaggctatcatgatttcggtggaatccatcgaggaaatcaagccgatggttgtggagctagcgggatggaagccgacggtagagaaggtggtggcggaattgcgggacgaggtgggcgacatccgcgctcagctcgagaagatggtgaagcagcccgcgccgtccccaaatcaagtcaagtcggagtccgtcaagccggatcccgtcaagccggaggaaatggctccacgtcttccgacgccgcctggggcaaagcggctgccgaagaggacggtggaaaaccgaccttccacgtcggcgttcggcaaaggagcgcctaggcaattttgccaccacgaggcttcgaatcaccgggggaaggctgtgtggggaaacaactccccacgaactcccccggtcaagggtgcgtataactctacttcccctttccattcagttcctgagtcgagtgggggatgccgtgggtttagttttgggggtcaaatttctgcatctagagtagagtgcccagagtttgcaggggaaaatcctaaggcctggaaactgaagtgtgagacttattttgggctgtgtggaactccttctgatcactggattggtgtggcgatactccagttctcgggtactgcattgacttggttgcagtcgacccgagctcatgaagttagtgggagttgggaggaattcgctgcctgggtgtgtgggaaatttggtagagaggagttccaaagtttgattcgacagttcaataggttaaggcaaactagcactgtgtgggcatatgcagaaaagttcaacgagttgatgcatgggttacatgcgcatcatccctcgtggaattcggttttctttgttactcagttcatggatgggttgaaggcagaagtgagatctgctgttgttttacattgcccaaccgatttggatactgccgtggaattagcttgtttgcaagaggaagtactggaacagaatcgcaaggaggggcgtcgctttgagccgactgggggagcccgaggacccttgcacactggtgttggaccttttgtgccaaagggagatgataagctaactactgaagtttctgctactgataaagttgcagctctcagggctttccatcgagcgaaggggctttgtcacacttgcggggaaaagtggagtcgtgatcatcgttgtggccctactgtgcagctgcatgtgattgaagaagtgctacagcttttttctgatgaggttcctgaggaagtggagtcatctactagccccctgctgaatcagatgatggtgagttattggccatttctcgagaagctgtacttggtattgagtcttctcgtatggtgcgtttgtaaggattgatccaacgacatgaggtcttgatgttggttaattcaggaagctctcacagctttatcagtgagaagttagctaataaactgcagggtgtgcgcagctcgctgactcctctgaaggtgaaaatcgcggatggtggtatcttgcaatgttgtcaggagtttcctaattgtcattggtgggtacaaggggagtccttcagcactaatcttaaggtgttaccgttgggctgttatgaggtcattctgggcatggattggttagagaaacacagtccaatgcaaattgattggaagcttaagaccatacaatttgtgttggacagcaggcaggttctgttacagggtgtggtgccggatgttagctgttgcccggttatttcggctgatcaacttaagggtctcttccatcataatgcagtcctacacacagttgaactttgtgccagtgaagctgttgcaatcagtcttgttctgccaagagaagtggagggattgcttcaggaatttgccaaggtttttgatgaaccctctggcttgccaccaccaagagcttttgaccactctattcccttgctgcctggagcccaaccagtaaatttgagaccgtatcgttacagtccggcacaaaaggatgagattgaacgacaggttgctgacatgctcaaacaaggagtgatacaacgcagtgccagtcctttctcctctcccgtgttgcttgtgcagaagaaggatggtacttggcgattttgcattgattatagacatcttaatgctatcactgttaagaatcggtaccctctgcctattatagatgagttacttgatgagttggcacgagcttgttggtttacgagtttggatttgcgagccggttatcaccagattcgtatgaagccagaagacgaacataaaaccgctttcaagacacataatggccattacgagttccgggttatgtcttacggattgaccggcgcaccagcaacgtttcaaggtataatgaatacaatctttgagccattcttgcgtaaaggtgtgttagtcttcattgatgacattttgatctatactcggactttggaggaacatgtgcgcttgttaagggctgtatttgatattctctctgccaatcagttgcaagttaagagatctaagtgtgtgtttgctcggtcatctctcacttatttgggacatgtcatcagtgctgaaggggtgtcaaccgatgctaagaacattcaggcagtactgcagtggccggtgccttctaatgtcaaggaggtcagaggatttcttgggttagcggggtattaccgcaaatttgttcgccattttgggattctgagtcgccccctgactaattttctcaagaagaatgttattttccattggactgctgaaactcaagcttcttttgatgccctaaagactgccttgacttcagctccagttctcgcattgccggatttctcaaagacatttgaaattgagacagatgcttcagctgtgggtgttggtgctgtacttatgcaggagggacatcctttggcatttttaagcaaagcgcttggtcctcgcaatcgtggcttgtcgacttatgagaaggaatgcttggcgattctcctagcaattgatcattggcgctcgtatctgcagggtgctgagtttgtgattcgaactgatcaacgtagtctcattcatctcggagatcaaaaattagccacaccttggcagcaaaaagccttaaccaagttgatgggactgcagtatcgtttggtttacaagaaaggtagtgagaacagcgccgctgatgcgttgtcccgacgagtggccgatgattcaacagaagtattgtctctttcagtttgtattccagcttggcttgaggaagttcaaaaggggtatgatcaagatcctcattcttctcagctggtggctcaactgacactcaaatctgacgcattacctcatttttccttggaatctggtattttgcgctataaggggtgagtttggattggtgctaacccgcacgtgcagtctcaaatcttacaatctttacatgttggggcagtgggtggacattcaggggtacaggttacctactcccgtgtcaagcgtttgtttgcttggacagggctcaggaaagcagtaaagacatatgtggccaattgcactgtttgtcaacaagcgaaaacagaacgggttcgctaccctggccttttgcagtcgcttcctgttccggatcatgcatggcaaatggtatccttggattttattgaaggtctgccgacttcctcgggttttgattgcattatggtggtcgttgataagttctctaaatatgcccattttgtgcctttagctcatccattctcagcttttgatgtggcacaagcttatctctctaacatttataagctccatggactgcctcagtctttgatctcagatcatgaccggatctttacaagcactctatggaccactttgtttaaattggcagacactcagctgtgtatgagtacggcctatcatcctcagactgacgggcagactgtacgcgtcaatcagtgtttggaaacattcttgcggtgctttgtgcatgcttgccctaagaaatggtctcaatggttggctcttgcggaattttggtataacacctctctgcactcagctttgggaacttctccttttgaggtattgtatggccatcctcctcggcactttggtattgttgatatcgcagcctgtgcagtgccggatttgcaagaatggttgaaggaatgcactgttattacttcgttgttgcatcaacatctccaccgcgctcgccagcgcatgaaacatcaagcagacaagaagcgtttggagcggcagtttgctgtcggagactgggtgtttatgaaagtgcaacctcatgcgcaatcctcggtggcggtgcgagttaatcagaagttggcctttcgattttttggtccctttcaggtgactgctcgggtgggggcggtggcttatcggttggcgctgcctgcttcttctatgattcacccggtggtgcatgtgtcccaacttcggaaggcatcggaaccagcttcttctacggtagctaccctacctccagcggtggaagaagcagatcctgttccagtgcgagtgctagcacgcagactgatacgtcggggatcagcggctgttgatcaagtcaaggtttgctggtcgggctgtccaacatcggaggcaacctgggaagatctggagcggctcaaggagcgttaccctgctgctccggcttggggacaagccggatgtgaaggaggggaggatgttaccaaccctgtcaagaccaggccgaagagctcaagacagcgacagcccaacactcgtataattgggccagactgggttgcgtaagagagtggctagcatgtgtatataaaggcctagccttatgggaatcggtatcgaaaaacattgtactgaaacctctctataattcaaatcccatcctcctcctaatcctttgttctttatgtcctgaactcttctattcttcctgtctccctctctcgctcttgctcaccaattgttcgacagaaatcccaggaagagttcgtaacacaaatcctaatcacgatacactagcgttatacaattaccacaatctcctactaattcatacagatgaacaaaagaaggccgacgccgtttgccaaactagaattactttagtacgataaagccacatacgcttttgtatactcttgcttttgtatactctttgctcccgtaattttgacaaattgacccgtctataaaacttatttccaaaataagccgcgtcaaaaactaatttcaaaactaggccgacctcagcgttaaccccaatggtgctgagataaaacgtaccagcgccaccctaagagcaagtacaataataggctataagtcagctgcaaacatattttaaggaaataaatgatgagagagaagagcagcgggctacagatttgtagccagctgtagcacggacttcaatacacaatgtgtgtatgacaggtgggaccaggtattaatagtataatatataactattatacgaatgagctattagattggctatagatgaattgaagctagtagttggctatactattaaacttgctctaattggcactaatatcacgttcaacgtggcacggattagccacaaaagaggagctcagcgtcatgtgtgctggcgctgatatttacatggtttaaaagaatgtgtgctggaagtgtcataacgcagaagctagctcagtggtcaggcccctctactccagcccacaggttcacagttcgaaccgggaaagccggttttcaggttttttcttacttcctctttgaatcttgttctattgaaattttttttccaaacaatcacatattttgtttgtagatttatttttatgttactttttaaggggattatttattttattttatgttcaatctggaataaataaatttgaaaacattaattaaaatgttaaatacttagctcaattattataattttgtatttttaattttatgttgtatgatttaggttctcagttcttaccaagaaacgaaccctggaactctggcttgcagccacactgaccaaccgctgagctagatttaacttgtgtcagttattgcccacactaattttaaaccttctaagaggtcagcgctaactcatttggcgcttagcccgtggctaatatgttccacgtcggatatgaccttagcgccaacaatgctggcgcttggacgttttagcttagctcagcgccaaccctaatggcgctaaggtcacggcctagtattgaaattaatttttgacccgacttattttgaaactaagttttatagaagggtcaatttgtcaaaattacggctctttgctctctctacttacagtcagaagttctgccctacaagttgattagcactgtgtttcttatatgcaggagcaagccaacattggtcctctaatttatgagatggcggtggcgcaggcagcatgagcaaatagcgacacgaaaataacggacacaatcacgacaaagtggcacaactgcaaagccgaacagagggaaaatggaaaaagaaagagagaaagaatacaaagcccatgagcccaaatagcgtagagtgctgcggacggcggagtgcggagagcggagagcccttgcgcctccaccaccgcgcctcttgctcggccgtcaactggtggccgcggtgtcgaggtgcggggggcgaaagggaggcctggtccgcctcggcggtcgggctcctcctcttccccggcgcgatcagaaggccggtgcctcccccaagcgcggaggccagcaggccgccactctggttgtctcgtctgttcgaaccgaaattggtgcgctcccttgtcaaacggcaatctccattgttttgcttggtgtgttagtggttgtgtgcataatctaggtttgaattctttttttaagtctaattgtactggtatggttaactccatagtcaaattatcaccattggtaaactaaactgtcttttgcaaagctagagaatttggagccaaagacaatagcatttttgtttgcagcataggtacttactactacttgtggtccggtttgctattgggatagagatggtgatggggtgtggagtgtggactgattctaacccttcacttttttcccttattcctcaatcaaaccataaattagatttcctctatatatatcccaattcctatgaccttatcccaccaaatccaaacaattttacagttcccattatgaatgcagggtttttggacaagtgatgaaataaaaaatttcaaccgtgccatttatactttgtgtaaaggcattcggaacgttctctgagttccaagttctgacttccgacaagctctataatactccgtattaacgatgtcactgctatgtggaaaaaaagatccagcatactacaaactgagttattagtcagatacctattggtgacccttactgagcaagacattggcaatggagtaataaaattattactgaacttgttcactttgccaccgtagcttaaatacaatattacaataccatgtcattccttacaaggatattgatcacaaataattatagtagaatacaactgtcattctatcaactcacatgggctacacatacatgctgcaagtatacaggaagtgaaacatgcaaaaactcttctctggactgaactacgtaacataacacttcgtagaaaatatgtgataactcaacactccatgttacatatatagctagcgtggcaaactgactgaggatgataattcttgctccaaactgtagcaactggagatcccttcatatgataaatcacctgcactggtatagttgttctgtgcttgggatttaccagtatctgggcttaaaaggtgctgaatctctccaccaattcctgggacggggagaaattggaattttcttagcctcttagttctcaggaattgcagcctcatctctacttctttcatagtaggtctatctcctcctctgagttttaaacatgcctctgtaagtgaggcaatatcatcaatgtcttccctgtgagcctcttcaagaacgtgagaatctattatttcgataagagatccctcacggagtctgtcaacgaaataatgagacaaactttgttttgtgcctacatcattgatgaaaatcggtttctttcttgtcaaaagttccaccagaatcactccaaaactatatacatcactcttttcagttagttgtccagtgtgataatactctgggtctaaataaccaaatgtaccttggacaatagtcaccacatgagtctcatcgagtgaaacagatcttgaagcaccaaagtcagagacctttgtagtaaagttgccatccaagagtatattggaagatttcacatctcgatggaaaataggtattgcagcagccgaatgcagataagcaagtgcccctgctgcttctgaagcaatcctaattcgatcatcccatgacaatgaggatttaacactaacatcagtatgaagacgatcatgcaatgtaccatttggtatgaactcatataccagtaagggcacctcagattcgagacagcaaccaaaaagcttcaccacattgcgatggataatttgagataaaatagcaacctcattgataaactgatctatctcagtttgttccacaatttttgattttttaatggccaccacactctggtcagatagaatccctttataaactgtgccatgtcctccacgaccaagaacacgagtagcatcaaagttgttggttgcctcttctagttcctccaaggaaaatatccttgttttattagtggcgctttcatctgagattagttgttccaagagtaggccctgatttttcttgaagtatgctcttctaattctcttttggatgcttttcttccacttattggctagaataatcgcacctaatgcaataattatggaaccaatgccacaactaataccagttgtaatacctacagccattcattatttttgtgccgtgaagccactttgcattatcttaatgcaataagattgactaatctgtcagctatgacttacctataataagattgtgttgcttagctgatgcaacacactgtcttgtaattggattaaactcctttctgcgggggcaactagtgcatgtaaaatttccaggaagattttgacatgtcccgttgcaatagtttggcagtaagcattcatcaatatctgcaattaacgcttcagttttttttttgtttatattggtacaatataaatgcacaggcactactacctgcttaaaggggaaatgccgtggttaaactatccacataaaatttctataaaattattaaacatttgcaaattggtgggaatgaagaggaacaaaccttcacatccatcttggatatatggattccctcgaaaaccgggaaggcacttgcaacgatatcccatgaatatgttcccatgggtgacgtttaggcaattgctgtggatactgcggcatgcatatgtagcatctttttttactgcggcatcacacgttaaattggctactgcccactttatttctgcaccaccatacacctgggatattatgtcctctcccccatattctgtgtcgttcaacaagttgctaaccaccattgtcccctcttcaattgacacatcagtcacattataacgtgcgtcccgtgggttgaaaagtgtgatgttacctgttgtacaattaagttggaacctttcacttgcgaaacaaccttcttcaagaccaaaagggaagggaattgccatgtttccgcatgatctccgacagtgttctttccgcttggggttgtaatctgctccacagagagagaaaaatgaacgaaaaaccgatacggaagacttttgtttgcgccttagaaagagagaaggaatgaaaattcgatatgcaaataaagctctctatatgtgtgtgccttagtagtatttaagtggagaaaggtagagaggaatcacctcggatgatgcatccttccaaaaggtaaggactttgttctgcataataataataaagatcataattggcgcactcacaggtgtaacctccagatgacatatttaggcagttgctgccggtgctacaagcataactcgtatttttcattcgagcaatttcacaacttggttggtccatgattgcaaactgaactaatgcttcctggatattgcttgtgttcgtccaactcaagaaaagatcagtcgcattatctacataatagtcattgtatgacataaaagccataacaccatggcgcagctgcagctgatatgattgtgctgcagtagcatcaacttggactagtgttgaccgaaatccccgcagatcccttgataacttgatggagcaacatcctttcccgttacaaggcccttctgttggtaccttttcaccatcgcatctactcacgcagtaaccaacagcgtctctcgtaccatactcgaacaaggtgacatcaatattacaaccaataatgtagaaggtgttacgctgagaaatagtaactcccttcctgggagacacccaggatatgttgtaggtatcagtacctggcttcattgtaatgttgaagtgcatgggtgcccaaagatcatcgtcacctacatataagatctgggtggtgccatctttcatatagagcttaggagttttggtgctggtgttgcacttaagctcgaagccttcccggaagcagcccggcccaatcccaaagggataggcgatgtcgtcaacatccccgcagctagaggggcagtgagcgagggaatcattagaagggatagacaagagccctccgccatctccatagactgcagctaatgctcgaggcgtagtagcagccgagcacactagcactaaggaaatggcacaagctgccacaaagctcgacctcatctttgcgccagccgagacttgcctttgtggtgcaggccggtgcctgttaactacacggtcaatttatattcagacgcaccatctctttgtgctcgtccgtggacttcgtaagtaaacgcgagattgacatcaactcccacaagcggtcggttgattagtgctcgatcggcagcaaacaattttcttgcaatttaccaagtctgtgtatttgttgacgctgtatcgacgaagtccaggggcactactcccatcagatatcacgtcgttgctggggccaacgactcacccaactgtcggtctctgctcgactcacccaacgactcaccctattcatccgattttttccacgcgttcagtagctatctaccggctggaaagactggtactgcccgaatgctattttgatcataatacacaaacgtgatacagatgctattgctaccatcttgcttcatattagatgatgaaaataatggccggcgttgcgaaactgactgtactacaactacaagacacgcacatagacttgtggttgtgggaggttgttctgctatcgtacaggttagaattcttgaaagaacgtaacatgtcaagtcgttcaaaactgcagttagcactccgttgcttctacccaacttgccaattcgcccactatattcttacttaaactattcgaaattcttaatatgcaaaacaaggacaagtaatggggtggagtatatccacagataaagaaatatatatgtgattgggatgaaatgagtccaatttaggtgggaacatgttcaaagtctggttcttcgcgtgtatgtatcactcttttagagctgccaaattatttctaagcatacttgtgtatggttactatttcatccaccgatgtggggcgttgattgatccgagtccacgtgtgatcaatgtaacacactgaaatgtactgtaataatcccttcgtcccaaataagttaacctagtacgagatctctttacatggcaataggatatattatatctcgtactgggttaatttattttgaaattgagagtagaaagagattacatagctaagcaagtccacatagatcgaaagcgtgcacctcaaccagctagaatgacaggagaaaaatttttagctgaaaatcttccgaagcttttcattaactttcagtttggacttgaagggcatgactacggcatgccatgtatgaccaggtatatgtgctttgtgctcatgctaagataatatgtgccttgtgccttgtgcagttgtgttcatgctaagataatacttcctccatccaaaaatgttatataacctaggattagatggagacggaggtagtacagtacttgcaagcaattaaccagaacgttcttcggcgatgactacagctgacagcttctccgtatgtgacattattcatctcccggacaaccggggcacccaacgagtcaatttcgatgtgaaccgggtcgtgcgtgtagactggagcaaccctgactttagtcaattccacacctctcgctgtactggaatctactccctccattcgaccaaaaatagatacctctgtagggtatcatatgcctgtttagttctctcgtatacgaacacgtatttaaagtattaaacgtagactaataataaaacaaattacagattctgcctgtaaactgcgagacgaatctattaagcctaattaattcgttattagcaaatgtttaattaggctcaaaaattcatctcgcaatttacatacaaactgtgcaattggttttttttcttccacatttaatgctccatgcatgtgtccaaacattttatgttacggaaaagttagaagtttgaaggaaactaaacacagccgtagctatgttgatgggcttgtagtaaatctgattaccaacagcataaacagtcctgtaataacgaatcacaaagtgtacaactagtctgtaatataaatcgtttgagagtgacgatatgcacaaatcaactaacactagagagcctagcgcatctgtctatagcagaaatgtactcattgggttagcaaagtaacgcttgttacacttggatggttctttacagcgatcttgcttcaaaatactctgcaaaagggtaggtgccgaaggggcacgttcatcaaacacccgagcataaaggtgtttatcaaacatcagcttttccaacaaggtccggcaggtctgcagaaaggagaaaacaaaccatgagtggaataatgtaaaatatttattttttttaagaagggtatttttcccagcctctacatccaaccggatatatacagcctttttgaattcgctcaaataacccaatctgagaatttcggccctcaaataacccaatctgaaatttgctactatggatatttgaactcaagactgtctttttaaattaggtacttaacctatcaaataggaaacttagccatcaaataacccaatctgaaattcgctcatatggaaaattgaactcaggaccttgaggtgctactcaggtcactgcaaccactaggctacatgccttttcacaaatatttattatttaaaccactatcattttaatatcgaatatacaggtacaaaaggagaaagtagaggggtgacgcacctgcgggttcaacacatccatccgatggatgatatcctcctggcataattagagcagaacaatagatcagaacttttaaaatattgttgctgataatggtaactccgtaactggaatcaccactaagtaggggaatcaaacgatcttagatctgtacattcaaaataactgcctgatcaatttaagacaaaccaactttaccacgcaaccggagggattcaaataacttgaacagtaagagatgagaaagtaagtaaaaagaagaatataaatgatatagaggaagcaaacacgggagtcacattcagaaagaaaacaggacatgctaaaccataacatacacaaacggaaatttccacaacacttaaatttagacaatagttgaattttccattgttcacttgtaccgtatcgatgaatcttttaatattgtagtgctagctataactaagatttaagtattccattcagatatttagaaataaaactaaaattacaattgtcaaactaccaaaataacacgaatttgaaaagaaaaggaatattttaaaatatggaatttcatgtctcaaccttgattttgaattcttgaatttccaaaccaaaaataagggatccggggaatttaaaattcagatttatgcttgaaaagttaagacttccaaagtttcaaatactgaagttctcgcataaaattttctttttaaaatgagacatttaaagaaaacaaggattaattagtaaagaatgccatataacattaatgcaaaacttttggagatatagatggataaacaaatcacaatttcagtggcatacatgaaactttcctaattcaaaacaaagagctacaaaaaataaaacaaacacgcacctccactactcctggatattgcatggtatatccaataatacgacgacttagaccttcgtagacagtgttattcatgcttccatcaccatttatccatggcaatattgggtgatatatatgcctttcgcaagcatgacaacaatcactgcccctgttgtcttgtgctggagtaaacgaccttttctgacctacaggactttgatagcgtatctgaggagagcttgacttgctttggacattaagaaccgtcacagtgtgcccgtcaccaagcatttttacactcccttgcacatcactagacattgcatgcttctctctcagtagattttctgtatctccagtctcggccatctcaaaagcagaagctcgcaaacaactgcaatgacttgaatctgcaagtgtagttatatgatattttgacttatgtatagagtcaacaatctgcacaccatcatatgcattgacctgtgaagcaagaaaatagagtgacacctatatatgagtagggaaataaaaaaatgtggacaagaaagcagcagtaagtgtagcatcttatatgcaagtattccactcttaatcagtttgacataaatatttaactatcccaatgatgttttaaatgtttatataaaattctacaagtgcagaaaaatatgtcagtaataacaagatctgtttgttaacaacaaaaaaccactggtaaattttgacaagcaaaagaatgaacagtgcaagtattcataattaggcagatatgaaaaacaaaagtgaattaagataattatatcgataaaccagtaaccaaatagaacaaataagtaggctactaatctaccatatgcatgcttgctcacagatttaccttaatgaccagctgaaatctcttgagagtatgaacaatcagatcgacaaactggatgcctgcaggggataagaatataaaaatgaactatacttacaaaataattgatgcatagtctaacaattctaagtttaacataagttacacaaatctaaagaatacctagaggatccagtgcctgtgacatctctctcaaattaactccttgttcgccagctttatgaacaacacaaaatgcatttctgaacaggtcagaagacaatatgtctggttcatttttgttacaacataatgatggtgactgttcagcatatgtttttatagcatcccaaggccacccactgtaagagttctccaaatgagattctgacagtaaacgccgacatgaactggagttgtttagatacaatgatgacatattgtggctttctacctgtgaatcaacatccttgctccccatttcccaggctgaagtaaaaataaggcattctttatcatgtaactcttgtgtaagattacttgttttaattctctcttgattcaaagccacttgaagaccagggaaacctttctctcggcgatagcaaaagtcgctttctatcttgggcaaaggtttgtgtttcttagtcttactgcttttaagtttaaccatatcagccttgcgtttgtgactactctcatccaattcactgttatcatcaacaaacaaactagagctattaggctcatcagcctcaccaactccttcacttggcaatgagggtgaaatgaacgactctccagacaaaacaagagaaaagagctggacaatttccccacattgtagatctggatacaaacaaactccatcatccatggtattcttttgctgccctacccattgagaaaattcagaagcttttttccctgaaccaaatgggaagggtgaattcgaagcattaaaaaagaatttcccagaaagagtgtatggctttgttccatctccagttacctgtaaaataggaggaaagtagatgaacagttgaaaaatgctgccttaaattgcaagcacactttaaaaaaaaaacataaagcttaactatactgactaagtaccaaaaattgagcatataatatcattccctttgtcttagagaggtacaatatcattcctaatagggttcaatgtatatatgccactaaggccaaatgattcttcctaatatcagcacaaacagaatgacagtagagatgccaaataaccacttcaacctttgcagcatttaaatgtaagagattatcaccatagctccactgcaaactcagatgcttgtactacaggacaagtaaaagctgaaaaatttatactccctccgtttcacaatgtaagactttctagcattgtacacatacatatagatgttaatgaatctaaacacatgcatatgtctagattcattaacatctaaatgaatgtgggcaatgctagaaagtcttacattgtgaaacggaggaagtattacacaacaagcatagattatagatatgtgtagttgcgagctccgagaactgcacaaagaaatccgcgatgcaggaatgcagcctcatcgcatttatacttcttgggttcacagccaaagaaatggagcagtgcacataggatcttaaaattcacagaatgttgttaatacatctattattctattgtgttttccaacaaatacagattcaaaagcctgaactggggagagcatactgaagaaataatcaaaagaaatttgatacattgatgggaagatgaattagcaaacactaaccatgaaatttttctctctgagaaaggaaaaggcagtaaaaatttcagtctctgaataaagctggagggttgctgctaacgaagcttgcacttctggtcctgatgaggtgctgagaaaagccagcttcagaagctctaatgcatttgcaactgccaatgatctgcatacatctcttttagcaatatcatctttattatggttaatggccttttcatgagatctgaagggaatgtccatgtttttacttgcatggattgcatttgacagcctataggattttgcatgttcacggagtccactttcttgaattgcagtgcttgcacaggttgcacgtgcacctaaaacctgattattacaaggtaaaacatcagcgttaaataaaatatgtgtttattgagattaaatgtatcagtacgtactggctgtttctgcccatttggaacttccttggtggcatcattatcatcattgttcctttcattcttagacccaactctcttggtctgctccattttttctactcgaatgaattcaaggacttcatcaagtgcactctttatctctggatcctcgaaattatcccaaaagaattgctcagaatctggatccacacagttgtcatgactagaatttgagatttcggaaggtaatcctctcaatttccatctcttttccttttcaaggtacctagcgtatcgtatccctaaaaggtcacagactcggctcacagctggtcttatgtttgtttttttcctcaagtatgctatccttctacggcatgcagctggtggagctggaagatcagaaagagagttccaatctacgcgatgagatactgctccaagtgttgcacgggatctagtgtatatcatcagcaattttctgtagataaaaataaccaatcaggttcccagcatcatggaaaacattgtctccagtaaagtgcattgaaacaaaataattgatgtacaaccaagaaatacctgtcagaatcgtatgtccacacaaatcgtttctctctcatgcagcttcctcttaagatggtagatcgactgatccttggactgcttatcgtatcttcatccacctgtgggagagaatcagtatggaatgtggatggagagattctctcagatacctcctcatgtgggatagactgtgctggtctcggttcagtggattcaatggtttcaacattccgtttgataaatttcagggtaatctcatcagcagaccttttcctttttttagaggttgatcctgaattaacttttcgccgttttcttgcagcagggacggtgggctgtccatgaagctgtctattctgagaggacgatacacagagcacctacataaatcagtccatccagtcagtgttactggatagaaaccatgtacataacagaaacataaagggccccgaacataaaaacagagttgaaacgatagcaagagtaaacaaaatcagccataacaatgttgcaactaagatgatgaaaataaggctaacattgcaactagatatgagatactattattatgtttcttggctatattgtatttatcactttgtttcctgctatatagtgtttaagcattatttcccttaagagctgccagtggagcttgtgcattcttccaaactttgtaaatattcctcacaatataatccaaatagcgtatgagactctgttactgctccccagtccaaaaagaaaaacgagtccagttattactattttaactggtccccataggcccagatgctatcgcataaaattattgtcgatcaattcaactcagaatagtatgagtacacctcatctatttgagatttcacgaatttgctaccagttagtcgattacatgtcacctttcccacacatgttctcggtcacatgtccactttacaacatgagttggaattcacaatacagcctatttgccaccttgattcaccacattcaagaaaaagaaagtaggcattaggacaacctcacgaacacactttgcatggtatttgctgatacattaaacattcccatcttgtcttgaaattccgttgatctgtttctggttttgtgtttaccctttacccttattttaattttaatactttgcatgggatataattaatctgttatagggttatctttccacaatatagaactgaaccagaaaaagaataggggtgcattagttggtatataagttgaagaaatatcaaatacagaagtaaggtcaaatactaattcctataatgagtgtttttatttcagtcccctccattattttaaaaaaaaaggtcaaataataaaacagagtagctcttcgtatctctaaggagcttggagggaaatatcgagatcagacacatacctgctgtacagagagattcaactccctggcaattatacgacaatctctaaaaggaagttttccattctcactggcattcataatgcgctgttgtaactccagtctttgttcagtagtcattactctaagtgaactccatgaacgaggatgagaaacctacaaaatatagggtatcatatagttaatctgtacaacagtacaagagaaaatcacaactgagatcgaatggtctaacattagcaaaatagccaatgccagtcaatattatttacactgggtgtaatgggcttcaataataactaaatggatattgaaacacatttacaactagtagcatgattgcagttgacaatatacagttaaaaacaaaatagaaacaagaaaacggtcacatatcaacatcaggattcaacaacggtgagctctttgcacatggtgttgcagtgttcaatcatgaatagtaatttaacagtaatggtagatcagatgccctgaaaatacaaataatatggatacaggccagcattggccattcaaaatagaacttcaccttttaaaataataggcagagtcattttttactacaaccagaaaagagagaagatatatccataaagtgcagagttatgtaaataaaggaactaaggttagcataaaacatacaggagagagagagagagagagagagaactaagaaagtatacataaacacattttattggagaggtgaataatgggataaaaaacgaaaatgaccattaaaaatagaacagataaatcaacagtaataagtcattattattaggtaacaatgcaataatgaatgttgacaatgacaaacctctggtacagaacagccaggaaaggcacttgatggctcagccaagccagctgttaaataacagtactctaacgtttcccagtaagcatcaacaaactcctgccttgaaagaacaaaatcatgccgaatttttggccgatggttcacattaacatgggatgatggaagaattcttggtgtaggctcttcaatgtaaggcctcagctctattgaatgtgtaggcaaagcatctgatggcgcaccagaatcatctacaagttcctttgcaagttggacaagctagcaaacaaaacgaaagaactaatcatttcaattcttctcaagctgaattacaataaacattaaccggaattcataagacagatatgcagcaggccaatatagacctaaaaaatgttaaagagcatgcctaaggttcaagactctcacaacgttaattccaacatcacagacaaaacattaccttgagcttatctagaatatttaccaagcgtgagagtcggcctttggcatgagtatccatgagttggttgtattcctcggtaggaatttctgaaagcgtttttccaagcctacacttagtaatcatgtgatcaatcttctttgctgatcccacaacttgcagaaagagttcaagaggcattttttttgtagctcccaccatagaaaacaacacagacgattgactaaggttcttgtcatgatgcccttctttgtcattatcaaatgggtcacaccaatttggcaaaccactaacatatacccacagaaatttatggaacagcttagctcgaatcatctttgcaccaatgaatccattggcatgcatagcttctaatattaatggtttgttatctttaactctgcgcggaatcctcaatccaagtatagcagtcgtgtgttgattttgcttcaatttagctgctgcacctgaacgagtttctgtatcaaagttcctttgtctattcctaatttgatccacaagttccggtgacaagtctccaacagaagaatgcagtattacatcaatgagacgactgcgggtgtagtctgtaaccagagggacactaactttgatgcatttacagctgccctcttcctgaagcttatttaaagtgcgagtcaatgtcttcctatccattatttttccattttctttttcaagtccctctaaccatttatgtaactccacctttagtacaaatttctttttctgcaaagggaaaaaggaaaggtgttatataacaatatgcagtcctacatgcaaggatgcacttacaccatgcatgcacatgataatgaaataaggtattttggcacattattcatattaaaaacttttgagtgttgtatactcaattagtaacctttagcatgtgaagaatcctcctatgccgtcgatcatcagaagtcaatggagggcagcgacgcctcttcctctgacccaaagcaagtttctctaaaacagaaataaggggctcactttggttaagctcattgattttaatggtgctcatatatgtcaacattcaaactttgtaattcttttttcaacatttaattacaactatgtaggttcacttgcaatgcagcataaaagttgtatcacagattcagttcaaaagtactttcatatgatcgccttttgtggtgataagaaatcctaaaagaaatttatggtcaaagttcaacttggatatcgtgctaactcaaagaattccttaagaaaaagaaacacagggagcacagatgacaagtacaaataactcgcagaactcaaagttagttcgcaagaagcttggcacatacagttctcaaaaaatgcactgtactaactggatgaaatataaatcactaactcagccgtataaatctctcaaactgtcagaacttgcctttacttttgatctttggaatactcgataaaaaaaaaggtgcagggtatgaaatagattacatacctggttatgagcctatgagcttattaaacagagcatatgactgcacatttacttggacgaaaatgtgaagccatttggatatatgcgactaagggtgttcaaaagtaaggtcaataagtgaagttttaagcagcataaaataccacaagctcctacaacagcatggcactcccccaaagaggtactaagcacaattttttgaaagaataaatagaaactaccaggaacatagatcactgtaccttgttcaacaatttgagaaaccccaacgcaagcttcatggttactctggaggggatgtcctgctggtttattgtggcattcttcttccaacaaaagcttgttattatcaacaaataaatcaacccgtgagattggagattctgatcctttagatggaactaatgaccacaaatcagaacacttctcgtggtcatctgggagtgcctccaaattatgcagagcagcaccagctttgtagtgtgaaaagttttttgaagtccaaactcggtattgtgatgtcttgtcttgaacttcagcttcccaagtcaaattgtattttttaagcatggatgacactcgcttatgaagcctttttgaattgttgtgcccaagacgtttgccaagctacatggaagttacatgaaaacatgagttgctaacttcaagaaatacagaacactaacatgctgcactaataaggtatcatgctttgcaacaagatattgcattaggatgggctattggatgctttataggcccatatggctgggaatgggctgggggtggggtgactgggaaaaggctgggcgttgggacagagtaaaaagcacatgattttctggtttcctcaagaggggcacgcagcgcacaacatgggggaaggggaggacagatgactgtgcttttaagtagtaagagactagatgacactgacaatattagtccatatcacactgacaatagcatgtgcattgccatggaactcaaataagtaaacgacagcttctaacctaagctttaaaaatgcaaaagcaattatatttaaatccagataaacaagttgatcatagtagagagataatgacactttactgcactatataatcatcaatgctagtctcatcatgacaggacattttgcacatgaagctctttttttttcattagggatttcaaccagaagaataatgtatcagaaaagattttatatcataaagaagctccagtaagttagtcaaaaatatagatatgttataggccatgctgctagagacaaaatttatgtatttacgctactagaaatgaaccagttacaacccacaagaagccgtacatatatgccattaagacaactattcatattcctgtataccaaaagaatagtttgtaggtttgtagaatatgtcattgaaaagcacagatgtataatttaactcctgaaaaagttacaagaagtacctcaacaagggttattccttttggcccttgagcgttgatcatatcgtatatacagttctctaatggaagctccatgacttgatcagttgcctggcctttcttgccaagtttgtagtttgaggttgtactttttggctgaaattcatttggatcgaatttcttcaacagacgtaaacagcgaataaactgaacaaaaggaatacctttatcacttgttggctcacaaagtatatgaccaggtgaaagataacagcacaagaggggtacatatggacatggtaaattataaagtcttttctaatttccagttcctgacaggaagcactgacaagcccaaaactattactgaatagagcatacattattaattgaaaatgccaacagaacaggaggaaagattaatgtcaccttatcatcaactttggcatcaaattcttcaataagttgtgcgtctcttagcctatgcagtacctaagcaaacagtgtctcagtaataccctataaggaggaaaaccagaagagcagaaactagagagcatatgcagtaagtgattctgagcaaacttacatttctccatgctctgtgcccatatgtcatcctgtaattgagatctacttttatatccgaaacaacaagagtctatcgatgaaataatagcagagagttagaaaactatagagaaaaaataaaatccaggagaataccaaatggaaaagaaaagaaggaacagttgacctttccactagcttcttctagtttatcgcatatggctttcattgctggaagataatcatgaatagatatatcatttttgtcatttacaccaaaagccccatcttcttgcaaaacatctccattgctctcttcattgctgcccagtagttcaggctttatgatctcaattctctgttgtgaattcatattcaggtttttggcatatcgcgagagatacaatgagttagtattgatgatttgtttattctgggaagcatcttcggcatcagctccatgatctttaacctttataatagttgactgcctaacgattaacttctgcgactgaaggctctttacaataaagtggaagttgtttcctttcatacggaaagttttgcatagatcattttgcgttacaccagaagtcctatgagaaacaaaggaaaataacatcacagtgcaaatattcaaaatcaatcatcttctctgcctatatatacattacggaacaatgtatatatggctaacagaaagataatgctattctatttgaccatgcttcttatgtaatttgcaaatgcatgctaattgctaatgatcagaatatatgcaggttcctgcattaaactcacgaaataataaaggtaagaccaaaatacatctaaggaaatggtgtttataactatgccaaattgtgagtaaccccacccaattttggtttgccaagacaatcatgcatagtagctcagcatttgggaaaaaacctcccagttcatagaaccaccagctcatatgatgatttgctcaacggttacgccagaacgcacctgcttgctccgacccgttcaagcgcccccttctggacggcgctcaactccgatttcgcgaacctgcggtcatacatcccgaggaagttgtccctgagcgcggcgctagcgaccaaccgcaccccccgccgctcggcctcctccacgtccttctccaccgggtcgacgggcgccccgtccccctctcccacaacgaggctgatgatggggagcgcgatgaggcgggcccagaggacgcgcttggcatcgaggccgggagagaggccggccgcctcgagcgcgccgcggagcgccggccagaggtcggtgaccgggaggccgggcgagaggcgggcgcacacctcctccagcgccgccgagacgagcgcgtccatgcccccgcggctcgtgtagggtggtgcgccccggtgtttcgggaggtttagggttttggctacggtcgcatctgcctctgcgctcgaggagggctctgtggtcggaggaagaggaggattactcgccacgcgaagcggagctcgccgcgcttgccggcggtgtggccgcggtggggagtagtggatcgccggctttggtccggtgatgaggcttgccgatgatacagaaagagtacgggttagattgcacggcccaataggcccattaacgttagaaatgctcggctcaataggcccagtaatggccgctccctagtccacaaaacctagtgacgcggcgaaacccaaaaacccttctgcactcgccgccgcctccgcaacgaaaatggcagcgctcgcctccctcctcctactccgccgccgcggcgggagccacgccgccgacgctctccttcgcgcgctcactaccgccgctggagagcagccactcacggcgtcggcggccaagacccgcctccgccgggagcacgaccccgaccgcgtcgtctccctcttcgaggccatcgacgacgcctccctctcggcctcctccacccgccacgcgctctccctcgccgcacgcaggctctcccgctcccgccgcttcgccgacgccgaggccctcctctcctcccacatcccggcctcccccaccgagccgcagctcgccgctgtcctctgctcctacgccgccgcgtccctccccgagaaggctctcgccgccttccgctccgccgcgccgtccctcccgtccccgatctccccgctccccttcaacgccgtcctctccgtgttcctccggtgccgccgccaccgccgcgtcccggtcctcttcgacgagctctccaaggagttctccatcacacctgacgcctcctcctacggcatcctggtcaaggcatactgcatgctgagcaaagacgccaaggcacacgaggtgttagatcaaatgcgtgggcagggtttcacgccgaccaatagtatctacaccacaatgatcgattccatgtataagcagaagaagatggagcaggcagagcgcttgtggaagcagatgttggagagcggacgcaagcctgaccaagctgtatataatacaaagatcatgcaccatagccttcacggcaagacggaagatgtgcttgaggtgatagcagaaatggaggaagctggagtgaagccggataccatcacttacaatttcctcatgactagctactgcaagcatggtaagatggagactgccaaggagctgtacagatcactaggcgagaaggggtgctcagcaaacgctgccacgtacaagcatatgatggcacagctgtgtgcccatggagatttggacggtgcattggtgatcttcaaggaaagctataggagcaacaaggtgccagattttaggacaatgagtggattggttgagggattgacaaaggctggcagggtggctgaggcaaagaatattgttgccaagatgaagaagaagttcccagagcaattgctgtcagggtggatgaaactcgagaaggagcttgggttgaactcagatagcggagatgcaggtactcgggcagaatgtatatctgaagaaactccttctgaggccgaggctgctatgccaaagacacttgagctggaagatccttcttctgatgaaacagaatgtatggcagaggcgtccactagtgaggaaatgccacgggattctgcttaatcagatgttatttatgtatttcaagtttaatttggttaggatgtttttacattgtgcattctctacaaaggaagaatttctaatgctcccaagtacagaggtaaacattagtttctagatgtggactcctgagccactaagagttatattgggctgacaatgcttataatttcgttgttatggatttattgtggtgttcaccttcagtaataattgttacaataatgtgatggctgatctatttggcgtggaagtgaatttcacaatgaaacacatcactgccggaagttcagctatcctggagctttcgtcatgttctgtactaactgttacaaacttacagtaagttgatgcctggattattcggcattgaagtgaatttcacaaggaaacacatcactgcctaaacttcagctatcctggagttctcatttcagttcctgctttggtttttttgagcaatagttcctggttgattccatgcatgcctatgcaagtaaagcattgaaagaaaatatgctgctggtgatgcttgtggtttcggaggttgtgctgctgtcatattgtttatcctatttcccaatacatcccactgaaattgctcataaatcatgttgacgaggttgtaatcttgtatgagtataacccttgtttgcagatttcagacgaaggtttgcagtgcatcagcaacaaggaagacatggcaaaaggccaaaagcaatgaaacaagttgccggtgccacctccatgctgcgggaacactcgttgatccccggtgattgatcgaaacattactgttgcattgcaagtctgaactctgaagtcactgaaatttcactttgtcatttcctggcaaccttcatcccagtatcaactatccacaggctgctgctatttggttgagacttgagactggggttttgtgaaatactacaacaagaaagcatggaggaattaagtgcaactaagatgcgtctcacccgtttgggagtagtatattttggaacggagggagtagtgtttaggatgtatacaaacattatgaaacggcacaccataatgcatacatacatcctatatgaagctcatggtgaccctcggtttgcggggatcatcgtccccaggatccgctagactagctggccgcagtttgcacaaaacgagaagctaagtaggagtaatcccctttcggcgatgcttgggagagctcacagtttcctgcataaatgcagcacgcaagttgaaactaactttacctctattccgtgaaagacataaacagtgttgcaagtcgcaaccccggttcatgaaatgtgcatggtgctgggatcctgttgataacgggattttggactatttgccatcttccccaatgccacactcctaaatgccatcttcccaaaaaacttgaataaattgccattggtccccctacattagttgattttctaccattttggtccattcttgacgccacatcagcagccacctcatgacaccatcaagaaaatgacattaatacccctgccctttcagtccaaatttaacatagtccacggcaaataatacacaaccaacataactaatagatgcacaataatttcacaagcaaacacagcttggaacatacagacaaaacctgcaaacgctagacagaccaatctaaaaaaagaatatcaggaaaaaatttgatgccaaaccaaagagagggaaagatgaaggatctattgttcttttacctgggattgtgtcatcgtttggacactgccggcggaatcgatgaagcaaggagcgatgcgaagtcgaacgaggagtagagacgcaaatcctggggcaggaagcgatgcaaatattggagtttttctcctactcccagtgcaaagggcaaaatagggatttcgccccatccaaagctgacgtggcatcaaaaagaaataaaatggctaggaatcaactaatatatggatccagtggcaatttatctaaactttttgggaagatggcatttgggagtgttgcattggggaagatggcaaatagtcaaaaatcccgttgataacacagtgcaatcagacactctcacatcgcaggtttctcttaatactgaactctactagcagagggccacatcttttaacctacaacatgtatgctaatgctaaaatttaaattttaaaatttaattttggagttaactttgatactttcatcgtagtttttttaacattgacgtcatcaagaccacatgtatgaaaatttcaaccctaaattacatttttatcgctaatatgttgtttggagtattatcagcaatcggtcaaccgatggcagccaaaattttcgctgaatcctgcactctactagagtactggtaactctgcactctactaaacttgccctgtctctctagagccagcaagagagaacaaatttccttctacaaacagggtttctagatagagagaacagacatactagtattacttccatgtaaaacggttgttcctatgacaggtatcggtctttcagatctgccatgaacggttgctttcagcagatcagatgcgtgaaagcaaccaagatccgtgtggaacggaggatgcatgcgcctcagcatgacacgatacttctacactattcatggtttagtgcttgagacgtatcgcttcagctgattcagacgtcccgtttcctgtagtacaaattgtccaccattataatactactaccatagtccacagcatatgctgtcatggggatatgcggtcatggattcctaacttgagtttaacatgaaaggtccatttaaaatagcataatgacaacttctcgataaactagagttagaccaccgttttgttgccgtcattcttatctgagattaagcagatgttgtcagcacgccaataacataattgagacagtgggtttcttttgtagcaacctctgtaaaaaggctccatatttcatttgttgatgtgagtcatgtttgtccactatcccgtgatgctggtacaaattctgtgcacatgttaaacctgaaatttatgcttccaagtttcaacgtcgcagaggctgaagaaccaagtttgtcctaaaggaaattcagttctctcagaaacaagggaatttcaacgtcgcagccccgttcgtttctactaaaaacagtggatgaaattttaaatattcgtggcacgctttttaaactactaaacggtgcgtttcatgcgaaaacttattatataaaagttcctctaaaatatcagattaatatattttccaagtttgtaataatgaaaattcaattaatcacacgttattatcatctcattttacgaggaacacttgatttttatctttatctttatcttcaaaagattcaaatactaaatctagctaaacaaagcgaatccttagcaaaagaatcttcttttaagccagcgtggccggcaatttatcatgcattagccatccactcatccatagtactactgatacagcagtattctgtcactcttcgtgagagatcacgatcatggacagcgtagcgttagcaccccgtgcctaactaggatccaaccgctgctgcttgatcgcattcacatgccaagctagccgctactaaacgatccaataaaacggagaattcaagagcgaaacacctcactcgtgatggacacgggctactcatatataaataatttgtaatatgttctaattcagctaaataaattaaattttatttttctttcgccgactaccaatgtatcatgcctctgtcaatactccaataccggagattattgttgtgttcgttcgtactgaagatgaaaatgaaggaaaaaaactattaccatataattaattgagttttaattattataagtttgtaaaaagatttacctaatatttttaagctttatctatatacaaagttcttgtacgaaatacatcgtttagcagtttaaaatgtgctaatggaaacaacataaaagatatactccctacatttcaggttacaagatgttttgactttggtcaaagtcaaactactttaagtttaactaaatttatagacaaatatagtaatatttacgttaccaaattagatttattaaattaataattaaatatatttttataataaatttatcttgggtcgaaaatattactatttttttctataaacttagctaaacttaaagcagtttaactttgatgaaagttaaaatatcttataacctgaattataatatctcaagcagcgatcaatgattcgatggcaattgcgtggcaaagaaactgagaaatcacacaaagttgtggtcactcacgcttggtgctagtgctagctgcggaatggggcagcagaaatgcgacgagctagctggatagcggcgcctgccaagagctagcgcgtggtggtccatgccaagtgatcgatacagcgagccacgcgcgccgaaactcggaaaaaggcggagagatatcacgagcttcgtttcgcgcggcaatccaccatgccacctcgcctcgcacaagcgatctcgctaagagaagtacaataacacaacgtactgtaaactagctataaacagataaaagaagagagagaaaagcagcgggctacatatctgtagccagctgcagcacgatctctaagacgtaatgtgtgtatgataaataggactagatattaatagtataggaatcaattattatatgaattagctagtattatattagcaatagatgatttatagctactagttggctatttgctctaataatcctcggcgagaaaatgacgtggtttttatataattgtttcgagcccaatcacacaacgatggagacctgggagcaataagagggagaaagactgccacttgatagacggaaacaaaaatccatgtaatgcaatttgctagtaccatcgcctcatcagagcaacttatccgtaacgagggatcatcatttttttaaaaaggacaagttgctaagcacgaccgatcgattctgattgggttaagattccgtttctgtccatatcagtgaatcatctaaaaacaactttgaaatactcttttgaaaatgtaatcccaataaattcatccagtacaactcctgccgttacggtttggtcaacagttcaaaaccgcacaccggatcctgctcctgcgccgttcgatctcatctcgacggataccagcagctttggcggtggggaccccacggctcagtagcagcacaccgcgtccgactgatcccgagccgtccgatcccatctcgacggctaccaaagaaggtgacggaggtgggccccacgggtcagtgtcacagcacccggtttctctgacacccgcacggaagtggggcccagccaaagcccccacaataaatttcgcacagcgcacaggcctctcccatcacccagcaaatttttttctcgcccaccatttcgaacgaaaaaaaatcaatcaccaaccgggaggccgaagcagccaacccaatggcgcagcacaccgccgcggcggcgggcggggacgaggaggtggcggaggctgaggcggcggcggcggcggcggcggggagcacgctccggcaccgccacgcgggcaagggcgcggaagagcacgaggcggcgggcggaggcggcggcgggcgcaatggcggcgccgacgacccggacgcgacgtcggtggagcgggtgttcgcggacaaggcggtgccgtcgtggagggagcagctgacgctgcgggcgttcgtggtgagcgcgctgctcgccgtcatgttcagcgtgatcgtcatgaagctgaacctcaccacggggatcatcccgtcgctcaacgtctccgcgggcttgcttggcttcttcttcgtccgcctctggacctccgccgtcgagcggattggcctcctcaagcagccgttcacgcgccaggagaacaccgtcatccagacctgcgtcgtctccgcctacggcatcgccttcagcggtaaacgtcttcgacgctttcggctttactctgacttctactgcaccacctttgttggattgggactcctcgttgcagcgagtgtactgtgtgtgcttatgtctacctccgaattgaatggagcgagtattagaggaatccatttggttagtgcgtcagcgtgttacaacgttactcttactggtggttgcgattttgggttgtggttatgtgggagtatgatgcagcagatctgatctgaatgtgggagagtcgctggggaagtgtagcatttcgcggtagtgggtagctgggagacatcacggaatcggttgttcttgtgcccctgaagaaaaaaacaacaactactacaacatcggtctcaaaagcggtttctgataagagaactgtactggaaaacttgaagaattgtcattcttggattcggacttgtcaacttgatgctgctttgtcgcagttgagtggactctgctgtttctaccttttctgatttcacgaaacagctgcttgacttcagtgcacctgatttgaattgtgtagcaacgggacgaatctttagaagattttggttttggaagttggtttattaggtgagctaagttgtggatatagatagtcaacactatatttttccctgtgctggtaagaaaatcgctgcattgctctcatttgatgggaaaagccatttgcgtttaggatgcgacgtttgcaggagtaaggacaagctgaagtggaccagcttgcttggtttgactcctcaccttaaaataaatgcatggcgcatgcttcttctttttttctttgcttaggcagacatgacacatgcatgtgaaagcatttggatcggcataaacaattataatggtctgcaggattatttgagaaccatgctacgtggtacactgatgatcattcgaataatttcatgtggcaaggcatgatgtttacttgcagatgcctagtatatgaggaatttcgtaaggatgtcccatgtgcatcagatggatataagttattcttaacaccagaattaagtttgtttactgttttctattccaaaacagcaaagaaaatcaagtaagtgtttccaagaaagtggtgaaccaatgattaactagttatctactatgtttttaagtggtaataatatgtcaatgcaccatgcatgagatagttgcttgattccttgcctcatttgcccaaagcatctcatattttcttttgatgtctgtttacctttatgaaactgtatcccttgctagaatgtcataatgtatgaacaaaaatttgtgccaattgacatatttttgtacctgtttattccaaattccaatgatcaggtgggtttggcagttatttatttggaatgagtgaaacaatagccaagcaagcaacagaggctaaagatgctcaaaatatcaaggatcctcaccttggatggatgattggttttcttttccttgtcagttttattgggctatttgcacttgtgcccctaagaaaagtatgccttaaacctgttaccttctagttttactgaattgctgtatatagggaaaacttatccatcctaacttaattgttgtttcagattatgattgttgattacaagctcacctatccaagtggcacagcaactgcttatctcatcaatggttttcacacaccagagggtgccaaactagcaaagtatatctataaaatgctactttcatgagtgccaattattagcccagtatatccgtaaatgttatgcaattcaactgacaaataaccatctttttcaggaaacaagtaaagacattgggcaagtactttctgtttagcttcttctggggttttttccagtggttctacactgctggtgatgactgtggattcaagaacttcccaacattgggccttgaagcttacaacaacaggtcagaactcagaagtatagcataacattggttttaacaacagtgttgactatgatgtccgttgcctcagcttaacctatagctaatatctggtgaaacactacctctgtcgtctttggctgtggtaaaaactgtagttactaatgtctagtgtctgaccatctggataatagttaattcttagttccaagccattggtctcccatatttgacttgacctgttacctttcaggtttttctttgatttctctcctacatatgttggagttggcatgatctgcccatatatcgtgaatgtgtcggttcttcttggcggtatcctctcatggggtgtgatgtggcctctcattgccaagaagaaaggaagttggtaccctgctgatatctcagacaacagtctccatgggctgcaggcttacagggttagcatccacctttccgctgattcccctttatgaagctaaatcatacaatacagaattcaaaaggctagagagcgctttgagtaatgttttaactgtaagttcattacctttgcaggttttcatatccattgctttgatccttggggatggtttatacaacttcctcaaggtgcttatccgcacaattgcaggctttatatcaatggttcagaacaattcaaaaggcatgcttcctgtttcagacaatggcatgtccatgtccactgctgaagaggtatccttcgatgatgagcgtcgcactgaaatcttcctgaaagatcaaattcctaagtcagttgcatatggaggctacgtcgtagttgctgctctatcgattggcacccttcctgagatcttcccgcagctcaagtggtactacattttggttgcctacatcgttgcacctgtgctggccttctgcaatgcctacggaagtggtctcactgattggtctcttgcctccacctatggcaagcttgctatcttcgtgttcggagcgtgggcgggcctttctcacggtggtgtgctcgtaggacttgccgcttgcggtgtcatgatgagcatcgtgtcgactgcctctgacctgatgcaagacttcaagactggatacttgactctggcatcaccgaggtccatgtttatcagccaggtgatcggcaccgggatgggctgtgtcatagctccctgtgtcttctggctcttctacaaggccttcagcaatattggcacaagcggcaccgagtacccggcgccatatgccatcgtgtaccgcaacatggccatcctgggtgtcgatggcttcaactcgcttccggagaactgcctcactctctgctacatcttcttcgccgcggcgatcgccatcaacctgatcagagacctggcgccgcacaaggtctccaggttcatcccgctccccatggcaatggcgatccctttctacattggatcgtacttcgcgatcgatatgttcctgggcagcgtgatcctctttgtgtgggagaagctgaacaaggccaaggcggatgcgtttggacctgcggtggcgtcagggttgatctgcggtgatgggatctggactcttccccagtccattcttgcccttgccaaggtgaagccccccatttgcatgaaatttttgtcgagggcagccaatgccaaagtggatagcttccttgccggttagtcgtgccatcgtgatcaattgatctttgaagagaacatttgcaaggagtgcgcgccatcctgtaattatctcctccaaatgtatttccagatcacttgttttgtagaaaagccaaatctgggtttcccgtaggaaagaagcatcccacaatccaaatgtaaaaacgaggaaaaatacagctgcaaccaacaaccgttttatcatttgctcgacacggattcctgtagagattatcctttttaacgaaaatggcatgttgaactgagaatccgtgaggtctagcaggtcaggtttcaaaactgagctgacttggaaactgccttttgagcttatgagtgcatctgacaggtttgccaatcaaaactacaagcgagctcattttacttgatcttctcttgagctaatttaccatcctatcctattgttggtttattaccagcataagtgcaacgagcattgaaaattttgaaaatacaaggcatggccaattgtagatcaagaccgacaaacagcgggatgagtaactttgcctgtactgtcataagaaaataagatgcttcaattgcaaacacgttcatagttgtttgaaacacaaaagaagctcctaaagatctaacatgctatcaagctactcgcctgactgccaagggagtagttatttagataaacaacttaattgaacagttaagctgattgcctggtgatctcctgtagaaaaatcacgcgaggcactctgcagtaactactctcgcggagtgcacacatttcttggctccatgcgaccttgaagctgtgaagcatacgtataatattgaatacgatcaaccattcattgtggacttgtaatggtggtcatcgatagtggcatacaaatgtcccagatcaacttggtctataatgattttcctgtgaaagaaagtaggattatgtaaataagcaaaatatatttcagacagtgtgatggggagggatatacccgactgtttcctctggtagattaagacgacggctcacataatctacgcctactccatggtcatcattcctgtatagcacaaattcagtattatctaaagcagagaaactacagaccatgttaaaacattgacagtaccaaacttgtatttggtattagcatggcgttatttttagaaggaaagaggtggccctctcccagattacgtaaaagttactgcatagatattgtagattatgtgtgccgtaaaattatgaagaaaatttaaggtattgcagaccttaaaattaagccctttgatgtgtgtgacatggagggtggagaaccatcggtacaaaactttgaaacatgtaaaagttactggcaaacatctatatgaaagactgaccactgaatcatgggaacttctatattgcagagaacgtaattttaaggtctggtggtatgaaggaaccaaatgtcaattcattattcatgtctacaacttatttatctgaccttttttttatcataagaagtaatgaaagcgtactgcatatctaattaacaattccacactagacagaaacggctgagtgttaaggacaaaaacatggaatattgttagctattctatagcaaagaaaaaaagtcagcagagtttatgcgtgtgaattataatagatcaaagagagaaaactggctagtcaagtgacatctatgggcagaattatcaacaattaacttacataactgctgggtcatgaaaaacattcaagaccaagtcgatcatatttgttccagtaccagtattttgtggtgcagaaaatgttgaggcctgagtagatatgaatgaaaaatttcagacagaaaagttggcatgtctttcttggtaaaataagaagaaatgtccaaaactacctgattagtaagtggactttggttatacgccatgctatccctaggcatagtttggttaggagttcctgttgctgtattagcatttacttgggactgtcaagtattaaaataactcagaaacatgacatcaccgtaaagctcaatagatattgtatggcacaagttaaacaccaacaaatgaaacctttaggatctcactaccttcggcctggtaagctccaagtgcacatgaacgcagtgaagaaagtgatgtgttacatcattgaagttggttatacgcctgacaagaaaccatgaacaaaagcataaattaagaaaaaatgcagaaaagtatttatctggtctggataagcctgtctctaaagcaatatagtattgagctatcctgattcatgagtttatctttgctattgcttttacacacgtcatatgacagacttccaatctaatatagtggtgtgcttgtaggaacaacaaagaatgttacacattaattaacaccaattaaatagccgttagtgattagttgtagttctgttcagcactcacaaacttctgcatgaatactaccccgtttctaaatacagggcacttttgaccactgttttgtacctataatacttggaacttaacaaatcccaatgcaatttgtactaaattcctctattagatatattcacctcaacccatctccatactccattcccgtgccttaattgttaataaggtgcatttttgccactttttgcacaaaatatgattgctttagcaagcatgttttaatcaaaagcgtcaagtacttagaaacagaaggagtattctacttacaaatcattgtagctaagggatcacatcagcattagctgttttattacggtactccctccatcccaaaatataagcatttccggttttgtcctaagtcaaactatcctaagtgtatataaaagtatttacagtatcaaatgagcatcattagattcatcatgaaatatattttcatagtttacttgtttgacgtggtaaatattaatactcttctgatcttcttgttcatctctagtttgacttaggacaaactagagatgcttatattttgggacggacggagtaccacagggtgacattattcaatataatgggccaaacaaattgcagacaattcgctatgctccaaagcaggcatcagtttttggaaatccacgttgcaggttattatctatggaagaccaaagtattcacctcacagagtaagcaaccacctgacgcttcccttgaaaaccttttagaccaccattgacaataacatagtcaccattccttgcaaatagaacaaagcaaacctatcaattttggggcgtagcaatttaaatttcaagacaagtcaaatactatgtaacccttactgaatgtcagccatctccttagtatcagtgctatcgttttccctgagaaaaaaatagaagtcagtacaaagccaagaaattatccaaagtttgttaagcacaataaagcggtacatggcatcccaccagcgattcacaggtaccctgcctgtaccatcatcaagagtgaatgatacatccgtaacccgatcaagcttatttaacatgcgtcctacaagcctaacctgcaatccagggtgataaaaattcaatacacaacatacgatatttgccaacatgtacagaaagcaaactgaccgaagcaaaaccaattcaaaccaagagaatttagattctaaaaaaggcaaaatacaattacataattacgctaaacaaaatcataaagaagatagcatcgtattttgaaaggaccatatacatatttaatattttcaaggagctagtttcagctccaaggagttttttttttttttgcccaactatattttctctaccactccgataggcaacctttggcccaaccagcgcaagtacaatgcatacaagaactgtttgtaatttcccaaaaaaaaatggagtctaatcaccacccaatcaatgttcatttccgaacaccaatcaccacacagaagtaggcaagatcgataccgtggacacctccatgccattgacagcaaaattcgacttgtcgtcgttggtctgggacgcgtccatgatctgcttcacggtgagcgggagcagcgcctgggcgttccgactctgaccacacccgcgagccccacaaggcgtcagtccgaggggagcgcaagagatatccaaaaaaaacaaacaaacgagaaatttgggtaggattaggaggggaaggaccttggggaagccgccgccgccgccgctggtcccctccgcggcgttggtcgcctgcgagggcatgaatccgccgccgccgaagagggagctggcgttccctcccccgccatcgtagttcccgccgccgccgccgccgacgccgacgccgtacatcggggattcgggagggccccgcgcctaaaccctagctgcccgccaaagcaaccggaacagacgacagacgaacggatgagcgcgggagaggagtgcggctgcggcggttcagtttttcggcggaaaaaaccctcgccaacttcgcgttggtatttgttccccgtgttgcgtggccaaaggcagggggggtgcagtgcaccgtgcgcgcgacgcgagccaggttaaacgttgacgtgggtgagcggccgtgcagtggtgcgtgcgtcgtgtggtttccactggggtttgacggatcgggcgggccgtgcgctgagcggggcgctgcggctgcagcctgcacggctgcgcgtaccggtggatcggattgtagcgcgatagccggtagccgggctaaggcggctagtggtggcgactagcgaacgcgagcggctcgtgcacggcacgagtgggttgggagtttgggacttgggacttgggggagttgggtggatgaaccggccccgggtgggatcggtcgcagcgcgagtccgcgactggggaaggtgccgcacgggccgatttgcaggttgggctacgcgatagcagccgaagtcttctcgcttggtttggggcacttgggaatcgttggcatccgcgtagcagccgaagtactcttttcgatatgtatgtgtagctaattgctccactagacatttgaaagcaagcaatcagtgggccgttacacctgatcacgttcttactatggcacccctcgtttcggctcaagaagcagcatgtggaaaataagaggattcagattcggtgacattgctatagcatggcacggtgtgatattggatcgatctggggcgttgaaaactaatccaacggtccgctgcactggcctacctgcaggactccgttttcaccccacgcgcctacccttcctgccagacgacgtctccttcaatctcgccccaatctcgcgtgctcgcatcgccgtttccccacgccaggccgaagaggcgccaggccaccgcgccgcagcgagtggggaggggaccgggcggctgcctcgtcgcttcgcctccccttgcccgcgtcaggccaccgccgcgagctagctgggagccgccgccgcgccaggccggagaggcgcccaccaccgcgccgctgcgactggggaggggaccgggcggccgcttcgcctcccctcgcccgcgttaggccgctgcgccaggccggagaggcgccaggccgccgcgccgccgcgagtgtggaggggaccgggcggcggctgcgcgaggaccctgatgtatctgaact

SEQ ID NO: 10324 - DNA, 56406 bp, Oryza sativa
  unsure (1)..(56406): unsure at all n locations
ctccccctagccacctcagcatcgccccgccacgtcggcagggggacggcgccaaagaggctggcgccagccactctggcgccccaaaaaggaccatttttgggataagtttttctaggggtctacttgcgaaacaagtttttcaaaaagaccaaaatgtgaaaaatccagcaggcctaggcatcagtgccgcagggcgatgctaagttgctaacgatacacacataattgataggttcagatgaaacaaacaactgcaaacaactcatggcagcaattagtaagtggatttcaaaatcgcacgataatggcatgcgggtatattgctcgaacgtgttattacatgtttgatgatggaggaaatgatacaaactttggtatatgaatgattgatgtatgctatatgctatgctacaactgttgtacaaagagtgatctgagaagactggcaagatcacacgagtacacgacagaagcgcaaaggtcagaccgtcagagattttatctcaccgtaataagatacaaatgtattcattctatataaactaaaaaaactggtacaactctatcagatacagacatttgcttactacaaacctgtgttcttgacatttcacctgcacaagcatgtccgttataatgtcagaagttgcaacaaagttaattactacaatcaattactggtacatatcaagatacactaatatgttcatgctaggaaaacgtcagtattgaacccacataagcgggaagacaccatccccaaatgagaccctttttcttaacaagtattcctattacaccactaagtaacaaaattcttcatgactagaaataacataaggcttcaagaaacaggcataaacaagctacttcatgaaatttcaggaaactgcaaagatcgatatctcctaaaaaggtttacttagggtatgcttgatcaaatatttagcatatgagatgtacttttatttctcagacatgaagacaatatcatattttgaaaacaagagaaggtttcaagcgttgaaaaggaaatgaaaaactggcatttgctagtaattgccaagataatattgtgaaaagcaattttactaatcttgatcataccttacaaataaaatgaacaaatcttcatcagttattgctccaagttccattcttctctctaaagcagtcaaccctccaccatctttaatggttgttcttgcacccctatggaacagaaatccatttaacattatccatgtagtcaaacaaaaattaacagtgactaattggttttttttgttgtcctgaggaaaatgggaggacaaacacaggattaaagggattgtaataatagcctgaggaaaggaaaatgcttttttgttgctgtttccctctctgttcctactaaactgttgaaatgcatcattgatgatctcgaaaaggcacaactcacagcacaagtggtatgccaaccaactgaatgccacctgataggcgctataggtatgatgagactgaaaatgagacaaacctccatagaccagtggaccttagacatgggatgagatgactagtatgaatccaagtgtttggcgaacaagtcatccaattgattttatacaattttggttatattgataagattactaaagacattgtcaggaccccagaacatatcatatatgcctcagtgtctcattctgtacttttatgctgaatgaaacaaaaaaaaaatagcctttatgtaaagagttcgatacttcagcttggcaacagtggaaggatagctgtaattatctatattccatactgctagaaattcaatcctacctctttagcagatgcttggtaagtgcatcatttttccttcggacacaatggtgcaacggtgtccgtccatggaagtcttgcttattaatatccgcaccaaaaagaagcagaagctctgccattatagaatggccatattggcaagcaatgtgcaacagggaacagccttgtagacaaccttctggtttcccagaatcatcctttacatcacaagatgctggatcaaataacttcccatctgttactgaaggatcatgatgaacatcattgtttaactcatcatatatcatgttagggctcacatcagccaacacaagaatgcgatatgctgccctcacatcattcgtccttacagcctccaatatatcaatggtaatttgattggtatctttggcaataagaagcttgtcgacatactgcatagatcatttacagtaattaatgatggcacaacaaacagaaggtcatcagaatcaagaaaacagggagctctaaatcttccattcatacatgaagttaatactatcaaaattagcaatagaaactatttgaagcaaaaaagaacttgagggttgttgcagcctgcattactcgacacttcgttgcatatggatcacactacaaaagcttgtggtttccggccagccattgatcaattatgcaagttttagagttgaaataccaagggttaattgttaagtatgcaattcattcatgttctatcaattatcttcagtatttgtaccctgaccgcaacagttccattcttggaagtctctctttacaaatgagattcttctgcatctctgcagaatgaaggatctcctgaagcaatctgttgttaattggttacaaactttatagggtcttttgtttttttctcttgtttcttcctgtaattatttcctataattattctttcaataattgaaaatcacactgctgggcaaagacctggcagtactttcagtcaaaaaaacagtacagtcagaaaataaaatgataaatcaaactacaaatctggttgtgaaccaatccatagactgagttctggctccaattatatctatgctcttataaaagaccatagtggtggtggtgagtttgcctccgccaccaccaactaacatgtgggcccatgagattggtggaccccacacgagcaatttgattgctctcttctgtttaccatccatttgaaatttgagcaagacataagctacactcttttaattttgccttttaagatgaagaacatcgcttcacccaagtagaggcaagatattcttttactaagagaactcataattatgttttatattaaataaactgctgcaacgcatggctattgtgctagtaaagtgtaaaatggttacatcataaagatttcccatgatccatacaactgctgctaactatatataatatatgtgcatgtgaacatccccagcctcccaaaagatttatgtgatatcagtcatgtgagtcgtagctacagaactgaagctggatagcaaaacaacacatttataaaataaaaggcaagggttacattggaattcaatcttcaactagcacatgactaacaaggatatacatcaatatcaagaaagcattgctaggttcagcatataaaaggatggacagaataatttacctttgtctgtatgtacctttcctttattgaaaaagcatcagtaggtttaggcttttcaatgaaaagaatagcatcattaaactcgtttattctgcatacacatcaagaagaaaatagataggagaaaggagcaaacttagtttttccacacacaatgaacatgtctgatgccaatgccattaatgtatgaaatatattcattggcactatcagattaaaagagagatcttccaactcatctgtagaagataataaagctaacctatcttgaacgtgtgaatgaaattattagcattaacatttctaaatgatagaacaccttccttagctacactgattatattcacctaccataatgaaactgatccatttcagtgcaagacagaatatcccattggaaatttcaagtctgagttaagtcaagaatgctatagtccattacaaatgcggtagtgcagtattatgctccttaaattgacaataatccaatgagtaaaataaaagaaaataaaatgactaaacaatacatgcagaagtacaaaactannnnnnnnnnnnnnnnnnnnttggcaaaaagcatattggctgatgtttgtattagtcaatataccactacttacaaatttcagaagagaggtgtaactaggaagaaaattgtctaaagcatgaaggcaaaacatagttaagaaaatatacatttacatacacttcaacatacccttgatcttctttcggaagcatagcttcccaaatggaattagtgtagtcatttccaagttcatggaacaagtccattatcactggctcccataccttgacatctaatcgcaaggatcgaacctacatcaaataagtacatcaaaagcaatccttaaatatggaccacactactgctaaatctgaaaatcaaatgatatttgaaatctacaaatcacaaagtcacaagagagtgtattgcaaaattaatgttcttagctctgaccatcttatatgcattagaaaatacaattgaaaggtacaacaagaaacacaaatgagcaaaaatctaaaataaaatagttaatctttccatcaaattatcattaaggtattatatcaagtacatatagcattatcacaagaaactgtgactgataactacatggagttggtaatagatgcataagtatcaggatatgtgaaaatggttttggtagattgttcatgaaaaaaaaaacactttcatacaattatgtttttaatatttctataaatatatagtcagaaaataatgataaaacatgtgaattagatactgtgaattgcctaggttggtaccacagcctggatctcattttaagagtcgaaggttaacagaggttggagtcgatattcttatgatcttatccaagctttctgcttctaatttgatttattaccaccaatccaccattcctttttactcgatgttttggacattgacaaagtttacaacattacattaagccccaatcatttcagtaatgattaatggcaatagcataagcattaaactttaaatggttccactattatattacagttttatactactaccgtggctaagttataacttttatgagtttaaaattttgaagtgctttcctgtgaaagacagggtcaggtcaccaaaaacgtaactttcaatgaagtagcataaattagactcaaaaagaaagaacaagtgacagagttcacaccttcgaaatatggactccaagattcctgtgagccccagaacactctatacaaataagaattcctaaatttagagatgcccaatcaggatccggtgaacgacattctgcacaactgtcatttccaggaatattcctgagatgattgaatatatcatcatgtccctctggacttttgttctcctcaagagagagagaatcaacagaatttgcagaaccatgatgttccgcctctagatttccatacgacacctgggattaactgaatcagcatacgattatactaaattatcctgaacaatcgatagctcgaatatatgattaaaatgcactaaaatggagctaattttaaggggcagaacaagcactattactatattaaatgattattatgcaatggagatgcaacttgcaagcagtgtagcatatcaaagtttttcttcaaaaagcacgaaagactagaaatgaagtgttgccataggaagtatcgaaacctgtcttgggaatggtaaattaagcagtgatgcaataactccagtaactttctcaatccaatccttttggtcagcaccagattctgcctgcgattgacaaagtctatagtattaatatataaaacaatgcatgtatcatcaaagactagaaatttggtgtcacagaaaatgtgacatccgagtaacagactaaggctgtgttcgctagaacacgttcccaccccggaacagtgatcacggaaaacggaacggtccattagcgcgtgattaattaagtatttgctaattttttttcaaaaacggattaatttgatttttttaagcaactttcatatagaaattttttacaaaaaacacaccgtttagcagtttgaaaagcgtgcgcgcggaatacgatggagaagggttgggaacccttgggtccgaacacaccctaaaagtgttccaattacctgtaaagtgtatgctttcatgggagagattactctgaagcaaaatcttaggtcattttcttctgcatcaatcttaattgttgaagttcttagatcaattttgtggcacgaaagtgcattgtcaccctgagttggagccttttggttcaagaatctgaaacgactaaaaacaccagtcccttcaccagctgtttgctgtgatgccgctccttgcttcccacatgaacaaagagataaatataaaatacagaacaaacaacatgcaattgttcaatatttcaggtatattatgtaacacaattaaggtataaattcccaaataatacattttaaacaatccatgacagcccacaaatcgctaacttttattgcataccgattgtcctttattcccgtagtagaaaagagtcccgtgactgtcgagaacaaagaaccttctcttccattctcgtgaattttcagaacgcttaaagagataaccttgtttgattatttgaacctgccagaaaaataaattagtgaaagaaagcaacaaagcttaactaaaaaaaaggttgcatgttatatataattaaaatgtagtctggtgaattataaatgggaataacagggcattataatactagaatttgaaccaaagggataacaccatcgatctctttgcctagatacctaatttaggaatacatgaagaagcaatcaccatcttagaaataaaaggtgcttcgctcttaaacatcatcaatccctctgaagcagaacattgaacagtgatgcagcaagcttagccgtccaggtatcctagcctattatttatgattgtttactcaacagtggataatggaagtacctcgccattggcagttgactgcattagggcttcaatctttttataggattgaagaccaacaacatggataccatcaccactggtagatgtgtccacattactagccattctcaagttcgcaatttcctcttgagtcctatattcttgaattctctttgcaagtttatcttgttcattgatagccatttcttttgattgctgtgcatatgttagaacctgtatcaaaaccttacagttagcatattaatggttaacttatggtcaatggatccatgctgattgaaataaatgttcatcggtttaagaccaataggtcagataagagattactaaacctggtgaatgaatggttccatttgactcagtagttcatatccctagatcataaagaacaaaatcaagaagaacccaataaaccaaacaataataatcaatcgaattatagagtgaccatgcctgcttgaaatatctcaaatgggcatccatcactgcacttattgattccaagaactcatacttcttctttgcttcaatatttgaaagtgcgtgcacctgaattccttacagccaaggagaattattggcttggcaaaatcaataaaattagcaacactatataaaaaaatgttcatacatactaggttaaagcggcatcgttcgaaagctgacttggcattgtgtagatcctgcaaatttggaattagagatgttgtatagaaattaaataaatgatcacttacggaaaaaaaaacaagttgtccctgttcacctcctcaagtcctgtcactacttctgctctagtccctttccgtactgatacaaatttttcacgtgcctgacaagcaagatagcaacatatattcttatagggcaccacatgccaaaatgaagaaatatgcaaattgaaaactaggtaatcacatagctagagtgcaagatatcacctgatcataccccactgtagccctatccaaacgctgacgacaatcctatatacagtgcaggatgttagcctatagtattaactaattaatgtgttaaaaacttccacatgaacatcaagacagtagggcaggtgtattgtatttaagacagaaggacatccatatattgttcccattacccaaaatggaagtcagtgaaactcgaactacatttctaagatcacttcatgcaattttttcattgtcagaagcaaaaggcttgaaattcggatccaacaaaaagtcaagcacgcaagcaagtatccatgaagaagagcaaaacctgaggtactacctacataaatacagatctcagtagtgtgcttaattttttggggcaggaggttgtcaccctcaccttcacgccatgcaaatccacatcaatgaattgcatcaaacgttcactaagcatatgatcaacctggttgaggacacatactgattagaatgatagagattcaatctgttaagctagtaaaaataaaaagaacaaaaacggttcttctttgcaaataacccttttacagtgtcacagtgttatttgcatcaaaagggaactcctagtcccattcagcaatcttacttttcaatttcattaccgatgagtgacatggacgtatgaaacaacatatggagaaggagaatcctatgtacctataaagttcattcccactaactgcaattaaagctattttcctctactctcatcgtgccatgtcacctcaatttgtatatgccatgcaaaaaacctacatgttccaaaaattcctgattaagtcatcaacctgcaaatgatccggcccaactaccacgcttccttacatgctccattctctcatcctctcactaatcaatcatcatcacatcctcttctgtaaccgctgatgcaatggcaaggaatctgagtggaccgcactggtgcagacaaggtaggatgtgaggaatttaatctgcatcttcagcgtccatcccctactatatgccttcctccgttcctcagcgcacacctgccctcactctggtgctccatgtctggcataatgcgtagcccacaagtcctccacaccttgacacccaacaccatgggtctaccagagaagtaccgcacgtatgcttgagtttatcatcccatcaaatactacaataatcacaggtcataatacccacctcattcctctcccctatgcttcctcccgttgaatgctttggtgagtcagaatcaactgagtcttgtcacaaaactacagatttggaaacaaacaattgaatatatcttacttatttttttcttgtttccaagtgtttgcattaagcaattgaaggaggtacattcacttcgatttgtatttcatggaacatttatgttatgatgaaactggacaatctttatgtagagtcctatttattgcagttcaaatttggacaggaagcattttttatctaaaattaaatgcacattctttcaccaatgcaatcagaatgtatcaaaatgaaaaatgttactatgctatgctctttttttcgttccatcacccagctaatttttcatattaacaattgatcagcgtgttgcagcgcacagggtgccaattactccctccgtcccacaaaaaggatttctggaggagggtcccagaaaaaaaaacgatctgtacacaaaaaagtgaaacattcaatgactgactacttcacatcggtggtcgagaaggaccttatctcttcccaggcacacacccatctcgctcgagtctctctcattcaccatcgtctcgcccgttcatcaatgcggcgctccaacgatctccatctccatctccatccccatgcccactgcgccactgtctcgcgctcccctctcgctcctcccgacgaccttatgcgtccaccctgatgctgcaacctggatgtgacggctgcatcggtggcggatggatgcggtgcagaggagattcgcaagaggcaaatccgatgctggcaacgacgttagatggaatgcagctcgggtgccgccgcggagagggaggcgcccgtggatctcccagcactgaggtggtcaatgagttcgagaagcgtgccattagaatgaaccccatttgtattctttttccatctattcttcttttccaccgaggtttctttctgcccttcgaccttgttaactgtattgaattcttcttgcccttaggcgcaccgtggatgactgccaccttggtgaaggcggacaacctttctcttctctgttcttggttcttgttaatttttgcaggttaaataagagcatttcttgccagcatttatttttttcagatgggagatgttctcttttctttctgcaggtactagaaaatttcaaatttttggcgcttatttttgtgccagatgcctctttttttttcttatagtatgtgctgtgtgaattaatgggtggatgaatgaatgtagtaatgagggcactttggtctttctatgttattactaaatttgcattgggaatccaggattccatattttgtgggacagagggagtagtacataaagaattcaatggcatagaatagattttacctgagaacgaaggagttccttgtatgttccaagctccctaaaagcagtagtgaacttggacattacaggccctgcaacagaattcagaatttggatcttccacattgaaagctgaatgtgttcatgaacttcactttattaacaaatttgcattccataatttcagtgaaatggcattgcattaaaccattacagttaagaaacattgtgttatcatactacaagcctacaacatattaataagtaaaataaaagaagtacatagtatgtgcttgcttatgtctgcatttatatatattctaatgatctgttactgtgatctttccttaagagagggaacagacataaaattaaagatgtggtacataatcgataggagacaaaaggacaccaacgtggcaagatgtttagcaattggcaaggatggactcagttgtttagctatctatggatgggaaaccaggaaaaattaagcaacagatataacagagatttgatgaaattaacctccaatggcaacactaacaggatcatcttgaccagcaccaaatgcttctagagcatcggcaaatgttagatctcccgcgtatccttcatcaagtgatcccctgaaactaaggttatcagcaatactataacaaaacaatatatcgaacatatggttttttattatcgttgtctatcctaggaacaataggaactacaaattattacatgtaacatggtaacaaaaaaatattaatcctgaactagaaaagtaagaaagaagaatgcaaagtcatttattgacacaattttatccaataaacatttttgtcgatataaacttgcagacaattcatattggaccatagaaacagaaacaagttttgaaatcgtgtaattgtgtgcattgcagtaaaaggttgtatgctacagaaacttgatattgacttacatcggcataaacctagagtgatgtctttcttaaaccaaaaataataataataatcatgctacgcattctgcatcgagtgtacgcctgtgctgcaaagttagtagctcgcccaaaaaaaacagtagttgggagcttaatgtacatgaatcttttgcatcctttatgaagatttgaacaccgttgtttcagttcatcgcttagctgttccatagaattgacctgcaaatcaatggaaataagccgcaatcaatagcatatatgcatgtaaaggtctgtttaagatgaaaacaaaaggatttatcaggaaaaagagaagattcaacttgatagcacaagcaggaagcttgcagtccaaattatatattaaaactactaaaaccaatctacacacagccttcgagtctaaggcactgtttgattcagcttagaattattataatctggattattaggaataagctgaaacaaacagatagcttattatgatagattattacaatctataagccagattactataatctagtaatccactctaaaggtgtttttttagattattggatggctaacagctaacgaacagcttataatccagagaaacaaacagctcacagcttattctatgtcggcttattataattcagcttacagtaatctggctcaataatgtagattacaataaacttaagctgaaacaaacagggcctaaataataggtcactattttttctatggcttctaataacccaaaccagccatttgaactggaaaagaaaatcgtctagcttatttcgtccctaagtttttacaggattttatctcgagaaattagacgatgaattaaaaaattgttcaagtgtgtgatgcagcaataaaaataaaatggcaccattacaatcagaaatgcagcactgctcaaagatgaaaacgatcgggaaaggaacagagaacacacaataaatgtaaaataatattccttttgcaacctacaatgcactcatgccggcaaatcaaaaccaacctacggtattcgtcgaaaccaaagcggaatttgatatccattctactcaggaacaatcgcatttccgaaccaatcaacggccaataaagcatgcaatcaggtcgagatctcgccacacagaatgcgcccaacctcccaaatcccagcccaaagctaccacaatcaccccaacctccagctccaccccccctaaatcccccaccacgtacgatccaaataccaacgacgcggagccggaggcgagatctcgcccgaaagcaacgaaccctgagaggaccggatcaaaaggtgacacctcccgcgggcagggagagaagagagggttcggcggggcggcgcacctgcttgcggaacatgggggagtcctcgagcttggtgaaggccgccatgcctggcgtcgcgcgggggatgacgctgcttgctgcggcggcggtcgcggtggcggtcgaagctcgcggagatctggaggcgtgggcgggaggtgggaaggaggaggaagaggaggcgatcggtcgggtagttgctgcctgcctgtctgtcgcggtggcgctgttccgctttcgcgtaggcagcctgcacggttccggggtgcacgggctccgggctcggctgggccggctgcgtttctaacgaaggaataagttcagtttgactcctttaactagtgaccgaatctgatttgtatccctaaatagggatggcaacgggtcgggttggtcacgggtagagcaaaaccatgcctgaccccatgcccgtcgtcgcccgcccaaatcctacccactagggttagtgggtaaaactctatgcccgtacccatgcccgacgggcacgggtatgcccgtcgggtacccaatggatctcacatgaataataactcgaaagatatataatttaacaaagaaaaataaaatcaacaatttaccaaattatcaattatcaataataatttgaattacatcgcaacttattattagttagtatcacaaatgaaccaagagaagggggtataataattaagagataaatcgaaattagctaatacaaatgtatcgggtcaggcatgggttacccacaggtaaaaaatgaagcccggctgttgcccacgatgtctacgggtcttgggcggacaagcccacgggtaaaattttacacccatgcccgtgcccattgggtcgggtatccgcggatacccgaacccatgggcaaaactgccatccctatccctaaaccacaataccggatatctcaacccccgactattaaaaccggtgcaattgattccctcgatggttttgaaggacggtttcgctgacgtgatgcgtacgtggcggtgttgacttgggcttcgttccacgtggcgttgatgtggcacttatgtggcagtagaattaaaaaaaatatgtgggacccatttttcatccaaaaaaaatattgtaggacccacttatatgtgaagcccacatgtcatcctctctccttcccttcttcctcctccctttatctcccttccctccctttctatcctcctttctattcccctacggatgtacgcggggaacgggggccaaatcggtcgtggcggcggcgagcgggggccggaggggtggcggcaggtgctatagcagcgacggcgtgtgtgcgggcgtccggtatggggccatcaagtgagttgtgtgagagctcaaagacgacaaggttgtagctcctgctgaagccgaagcaggactgcaccgtagcaggtgaggagtgggtcggcggcgagctcgcggaggtgtacttgataaccgtgttggcatccgaggagcggtcgtcgagggggacggagtactgcacctggcgtctgagcttgacgcgcatgtcggccgcggcgcgggtcgccgcgagcaccgcggtgaggcctgcctcttgccctgaccctaaactagctccaccaccgcgattagaagggagaagcagggatgagaagaggagaagaggggagagaggagctgggctcctgtcgcccttacttgtcgccgagccaccaccaggattgagggagagagtcgcgccgccgccatcgtcctccttcttcgtcccctcccccctcagggccagggtgagaggaagagggagggagggagggagggagggagtcgcgccgccgctaccgtgccttcagggaggggcgccattgctgtcgacggcctcccttcgggcagatctaagatgaaaagggagagaggccggggaggaggctgcgccgaggagtggcgcgcctgccacaccaggggctcggagaaagcagcggctccggcaactccgccgctccgcctacttcccttcccttccgcccacgacaccgctccccgtttttcatccgctccgccgctccccatttttcatcggcatttcgttttccttccgcccacgatgctggcctccgtactcgaaaaagtgatgggaaggatggaaagagtgacgggaaggacgaaaaatgtgatggagtggcatggatctaatttctcaaaattccagtggcacctagccgttatcgcgaatagtagtgacatttttctaatttatcacatttccagtggcatagatccaattaaccatatatttttgtgtggatgacaaattggtcccacatataattttaattatactgccacatcaatgccacgtggaatgaagaccgagtcaacaccgccacgtaagcgccatgttagcgaaactacccttcaaaaccatcgtgggagtcaaattccaccggttttaatagttagggggttgagatatccggaattgtggtttagggatacgaatcagatttggcccctagttaagggagtcaaagtgtagttattgctctaacaaacccgaaactaattgggccatacttgtaggctgtgtatgaacgtgcaactactcattgtctacccctcattctccgtgcgtaccttgttcgagcggttaaacgatgtgtttttaaaatatatatatataaaagttgctttaaaaattatattttttttaaaaaaagctaaaacctaattaactatgtggtaataagttgctccattttacgtgcacgggaagagagttcccaaacctagctaccgaacatagcctaaagaatccgataacattttgatagttgggaacattgttttctagtttttcttttagaactcatgcactttatttgtttgaaagttttaaaaacacaaggcaagagtgattcttacatctccttttcttgatcggacatacactttgttggcaaatatgagtactattactacagtcaaaggccatctgattttgctctgaagtttgtctagttgctctcgcaggaccatcagcaaccttgttcatttctctaggaatccatttgatttgatttgcatatgttgaccctacagaatgttatttattttgtaaaatgcaggccttagggtccaatgtcctagctcattgatgaagtcatctattcgaattgcttcggccaccgtctgtcatcagatagaaatataggttgatgataatgatgaatatttggagcttcagacagaccttatatttctgtaacaagaggagctcctgctttggagctgtcttcttcgagggatgtgaataaaattccaagcggccttttttccttctcctttcttctgcgacaacctttttcggcttttcctctcagaaacaaagctcacaacttatgcggaaagcctctcaaatcccagtccaagtacttcctaggcctcattcggctcagccagacagccattatgcccctgtagccacgcccacgtggacgatggaggacgcgtgtccgccggcgacaagctctggggtgggacgtggatggtgggcccgctgccaccaaagcttcagcgtgaggcgtgacggtgaagaacctgctcaacatggaggacattgccaccagtgacgacgtctcgatgcccaactccttatacttaggtcctgtttgggggagcttctctcagctgcagcttttctcaaaaattgcttctgctagaaactgatccagacagtccacagcttctgagaatctgtagttacatattctgaaaaataaactacgaagccagaagctatagaagctgggtttcagagcttttccagattctcagaagctggctaccaaacagctgcttctcagaatttaaagctcccccaaacagggccttagtaagaatcacatgatatctggtaggtattgctctggtatcgacgagtattaggtgatatcgacgagtatgaacatatggtaccaactaagtatcatcaatacctataggtatcacctaatacttggtaggaatcgcctgatacctctcaagtatgatttgatacgtgataaaaatcgtttgatacctaataggtatcgtgtaataccggttagatatctggatagggaaggatatgataccttgtcaggacctcacttcgatgatctgttcactgtccaataacaaattgacacaagtagtggtgactttgtgggccataagcaggatcaatagtatagccagttgatagccccaaaaatttccatatcatttagagctatggttagagatacatggtacaatagtaagggtgtatgggtggtggatgagtccctttcacttagatatttatgggtggtctagcatcgcatcggattttttcagacgggcgtcataagcagcccttctgcccttctgtaataattcatatattttcgcaagtggatggcttaaggttccgtatgctaaaatatatcacagacggacaacttaagttgttcacatgcgaagttgcattttcgcagatggatatccattgtatccccgttcataactatacaggcaaacgtaacgtttgtggccgaaaatgtggcctgcctatataatgatatgggcctccttgggaaaaatcttttttctattagtgtatgcagcatcttctcagaggagttgggaacttgtcccattactcttttttttttctttcgttttcatttaaaaaacattggtgaggcggagatgtaaaccattttcattatctaaacaaaaaggtaagcaacaaataggggaactattctaaactcttaaggggttcttcgttgtttgcttgtcacccacatggttatgataaattagaaaaaaaaacaagataaattaataagtgataaattactccacaaacatgcaatgtcaaattttaatttatacaagttgcaataaaaataaatttaattgtgaatatatgttaagtagacattttttttcaacttgtaaaagttgaattttaacttacctgtttgtagagtgatctatcacatattaatctattttgttgattttttaaaaagaaattcataactatttggatataataggtaaacatggagagatgttcccgtacgtgagaatatataatccactctcgcagcagatattggcttatggatttgaaaattctggcacgataaatgtgatttgcaacaaacgaaggaactgtatgccgcggctcgcatgacccatcgacgagtaacgcggtaacgccgctccgtaccccggcgacctgcctcgacagcgccgcagcttcggagcacagcagttcccgttacccatcggcaagcaacaacgcctcatcccgtggaagtcaccgtgagcactacgatcctacgatccattcccatggcttgctcctagagtacagcaagatccgcaagatgtgctctgtggcttaattttctgggagttggatagagagaaaagaaaggcatgaagagggggataagacaggtataataagaagtttaaaccagcgatagcgcaaccaacctgacaaaactgatgagctgaatgaaaaaaaccagaaaagagagtgcaagccgacgataaaattatcgccaactaaacacaagctccaagactagagaaaccatagaaaatcttatccaacacaaacgtgggctccacacacgagatgatgtgcagtaatgagcgagtgatggtctggtggaaagttaaattagtaaaaagaaagagaaaatccatgaaataccattgacaagcactctaatcccagaaatgccattgacaagcgcaatttactcaaaatgccatcgtacaagcgtttttctcccagaaatgccatcacaaccatactgctgttaactcctctccgttaagttgtatgagaagacaatcttacccctgggcaaactttttgctcaaacaacatcattattttgtattgtttgctcacacaatatcattttgaattgatgcatatttaaattcacatatgtgtattattttgctatcaatcaaattatttcaaaattaaattcacaaatttttgcatcaaaattatttcagaaattttgctatcaattatttcagcctggggccgatgcgcgctgcctggagctgccgtgccgccacctgggagcaccacatcgcagttgagggccgctgcaccgccgcctgggagccccgcgccgtcgctgggggccgctgcaccgtcgcttggagccgccgcaccgccgcctgggggccgcgcgccgccgccgggggacccccgcgccgccgcccgggagcgccgcctcgccgcctgcaagcgccgccgtgtcgccgctggggaccctcgcgccgccgcccgagagcacctccacgccgccgccggggacccccgtgctgccgcccgggagcaccgcctcgccgcctgcgaccgtcaccgcgccgtcgcatggggacaccgcatcgccgccgtcgtcgccccccatcggttaggtttagggttgtcttttcttttccccaatttcttttcttttaccctctggatagtaaaatttggagcgagggtaatcttgtcattctggtaaaaaaaattctaacggtgtggactaaacggtaagttgactgtgatggcatttcagggagaaaaacgcttgtacgatggcattttgaggaagttgcgcttgtcaatggcatttctgggattagagttcttgtcaatggcatttcatagattttctcaaaaagaaaagataaattaattcattgaagcttgtatgtatagccatcttctgtacgtacaccatcttttggttatctgatgccgctgacatgttcttttttatcgccggtagctatctacacatgttaaacttgctctaagagtgagttcaatagagcatgttcagccggtgatagacgtacatgttaacatgattgatgagcttgagagaaaaatacatgaaagagagtgttagtcgatgatagattaagcgctcgcttttacacaggctctaacacagagcgctactttctacagttggctgagagagtggcaaaagggaatggtgggccctaataaaataaaatagtgcttctgttatcatcgtactgtagatttctgttctagtgatcgtttattcctccatctcaagatgacatggtaaaaattatagctcgctgttggttatattattgtattggctctaagaagcgatgaaatgagctaggagagagaagtagtgattgggtggtgctaccttaacgggtgtcatgatgtgatttggcatgtattttactatgtgcagtgcggtgcccttgcacctaagccgaacaacggtactaatacgtctatacattatcaccagtccaccacctcaattctcaaatgtcaccatacaagcacaatgataatatattgctctacagatacaacatggaagtagagaaaaccaagatacacatattcagggcctctttgaatcaaaggatttatgtaggaatttcataggatttaaatcctataggaaattttcctatttggccctttgattcaaaggattgaagctttccaaatcctatgaaattcctatggaatgacacattgtatgtagattttggaggaaatttagcaagagctccaacctcttggaaaatttcctttgagtctatctctctcatccgattcctgcgtttttcctgcgctccaatcaaacgaccattcctgtgtttttcctgtgttttgcaatcctctgttttacacttcaattcctgtcagaatcctatgtttttcctattcctccgttttttctaccctgcgattcaaaggggccctcagtatactttttttttacaacaccataaagacagatacataaattaaataaaaatagggtatgaaaatataggaaaaataatttagatgccttctaacaagcttcaaggagtcgaccatgctgttgcgcaaatttttatcgtggcaaaccaactgaggacgagagttcctgctccaacctgtaacttcttgtgctatattctgatgtaaaaccagcagtatggatgaaactgctttgagcatcagagctaatggtctttggacaaataaaaggctcaatctcttcatccattacagaaatgggttggcacttttttagtctggtagttctaagaaactgcaatctcatttctacttctttcatagtaggtctctctcctcctttagctttcaagcatgcttgtgcaattgaagcgatatcatcaatttcttcctgtccagcctcttccaaaacttgggaatccaagatttccatcagaactccctgctgaagtccttctaggaagcattgtgataagttttgttttgtacctacatcatttattaaaattggcttctttcttgtcagaagctcaacaagtatcactccaaaactatacacgtcacttttccccgttagttggctagtgttgtagtactctggatctaagtaaccaaatgtgccttgtaccattgttaccacatgagtttgatcgagtggtatggatctcgaagcaccaaagtcagaaacctttgcagtaaagttgtcatctaggagtatgttggaagatttaacatctctatgaaaaattggtattgcagcagccgagtggagataagcaagagctcctgcagtttcgattgcaatcctaatacgatcatcccatgatagaaggcatttagcacttacatcattgtgaagaagttcacatagtgtcccattagatatgaactcgtaaaccaataaaggtacctctgtttcaagacaacaaccaaaaagcttcaccacattacgatgaatgatttgcgacaagatggcaacctcattaacaaattgatctatctcagcttgctccactattttagacatcttaacagccaccacacgttgatcggataaaattcctttataaactgtgccatgtcctccatgaccaagaactcgagtagcatcaaagttatatgttgccttctctagttcctccaatgagaatatccttgttttgtctttagtattttcatctataattagttgttccaagagtaggccttggtttttcttgaaatatgcccttcgaattctcctctgtatacctctcttccacttggtgataagtatagttgcaccaagtgcaagcattacaaagccaagaccacaactaattccaagtgccatacctacaacaattatatatcgacaatagtcagaacatcacctataaattgcctcaggtagattttttagagtaattaagtattaaccactgagggcaattcaatagtatatataacttactaatgagcttagctgatgtcacacattcccttcttgttgggtcgaactctttcccgcgagggcaacttgtgcaattatagcctccaataaaattttgacatctcccattgcagtagttcggtagcaagcactcattgacatcttcaaacaaaagaaaaagtcagcatgcacttctcgaaacctttaaagtccttcgaattaattgctatgttactgtggtgacatatcacgtctacatgcaaactactccacgccaataatgcattattttatttttctcaaataaggcttaagagagataaaagtaacataacatggtataaaatggacagctagcccacaaatttggatgatccgtaagaaataatcatcttaaaacgatggtaagagagagagtttccgcacccgtgcaaccatcttcgatgtatggatttcctccgaagccaggagagcacttacaacggtagccaagctgtgtcccatgtgttacattgacatcgatgcattcgctatggacactacggcatgcataggaattgttattgatgtcttgcgtagcttcctggcaagtaaaactcacgacagcccaccacatcttcatatcattttcttgagttaaatcaaaaagatctaactgagggtcatcttccgaggagccatgcatagtacgagcaactaccatgatctctgtgccgttagaagttgaattgttctgctcgttggttacgctcatatatccattgtccactgaaatgttcctcacgagatagtctacatctcctcgatccagaaatagttttcctgctctgcagttaagtcgaaacttttctagcgcgtagcaaccttcttcaagcccaaatgggaagggcacatttgtatttccacaaaatctgttacatattcctttcggaaagggattgtaacctgctcaatgatacaggaaattaaactattatattatgagcaatgttcttttcacaaaaggagcatatatatatatatatatatatatatatatatatatatgggtttggttatctaaatttagtggatgccttaggctccgttcggtagtttgtttagttttcacaactctctcgtttactttgagcatattttttaaaatgctaaaattgtatttttcttaaaactatatataacttaaaaaaaagatttgctccagtccaacaaaaagtacctcgaggtccgtgaggtaccggtacctcgaggtactttttgttggactgagaaaatctcttaaaaataatatcatcttttaagttataataattaatactcaatttattatgtgctaatggttacctctgcgtgctgaaaaaaaaaactactactacttatattcaaacagagccttagactgaagatgcaacatgcatgtgtaaagttttcttcacttaagaattaaaaataaacaaatttggtaaaaccactgatattttgatcttgcaaaactacaacttttatacatcgtattagaaaactacggatttagcactaatttatcatgaaaatatataatttaaaatagggtatcgcaaaagtataaatagatttactaatgaagttatcataaaactacatatgcgcttcagagtttagacccttagcactaatgttctactggagttataaacattatatattttttagttaaatgagcactaactctgaaaacttttattacaaaatatatagttttaacatactacatcttaatatttttttgataaatttgatgttaaatttgtggttttgtaatggatcattttaaatttgtaactttgtgatagtttagtcaaattatctatagttttgtgaaatttatgcttttaaatttgtatggaactgatagaatatcaatactacctaaaatgttactcctccatttcatattataagaccttctagcattgcccatattcatatatatatgttaatgaatctaaacatttatatgtgactagattcattaacatctatatgaatatgggcaatgttagaaagtcttataacctgaaacggagggagcagtagtgatgattgttatgccgcaccacccctatcagcgatatttggacctcacaatggacaatctatactattacaccatcaccaccgacctggcaaataggctccattagttagcccgcaccccgagtcctctgtcgtttcactgttagatctccccaaaatttttaaccaatatttttttttcgaaatcattatgacagacaagagatccaaatagtgcaatttgatgatcatgtaactaatcaattcaatgtatgcacaacaaaaaatcataaaagtactaattatacttaattgacttaataaggtagaagctctacataaaaaaaacttctgcagcctttggtttggttagaagtctcaccagtacagccttcttgagtgtaaggaatcccattgggattaccatcggggcaatagcagtaatagccacccctgtccgcattgaagcattgagagtttctactgcaagcataggttgctttgttcttggatgcgctgtgacagtttggctggtccatgatggcaccgtagatcgtagtatagagaaagttgcttccgttgatccaaggggaggaaagatcttccgtgcgaaactaataagagtcatacgtcaagcaagccttgacactggattgttcttgcggcaccacctggccgatgccatcttgacggacaatccttagccgaaagccctgcacttccctcatcgtctcgatcgtgcagcaacctatgccgtcacaggtcccatttgcttgcatcatgtccaccgggtctttgaagcatagagtcgtgcaagaacccatggtatcgttcgaacagtgtcttcgtaatagatgaagaataaatatgataggtagagaagagagatgatgtatttattaatggcccactttaagaaatcatgggttgtagagtgtagtttctattatgatgtcctattgacatggcaccatagacactacttatggacactatgggttgggactacccttaggcaaaagaactactttaaataattgaagtggtcaaggtgatagttttgcacccacccctttcacataattaattaattacccaatttcccatgcaattatttggagtcaaattaaacttaagaaaatcattagaattgtattttgttatgcggctcttgtttctaattttgtaaatacaaagaatcgataaaaaaaaagacatatcagaatcttttttgaagggaaaacaatagagattgtgcttttcattaaatatagcgggagaaaaatacagccccttagggcaagaaaagggaaaaagctatatgcactatacagtgtgaggcaaaagtaagcgctttgctcctgccgttgcccatgtccacgcctcttccttgattttggcaaaaatgaaagacaacgtagcctcattatgctcaaagattcgttggtacctctccttccagatctcccaaacgacaaggaggatgagagtgcacagtcccttttttggaactcgcattgtgtttgctagagcttcccaccagtcttttatggtatgggtcgcctcccattgtccaagggtcaagctattggtaacactactacaaaaaccatctttcgtggcggccattttagattttcgctagcggaatttggagccgccacaaagtaaaggccagtgaagatctaatattttcgctgacggtttcgttccgcttgcgaaaatctattttcaaaagcggacacacgattttcgctagcggttgcggtccgcttgcgaaagtaaattttcgcaagcggacaaacgatttttgctagcggttgagtgtcacttgcgaaaacccattttctctggcggttgtttaaagagaaccgccaatgaaaatcaacccaccccgccaaaaattccctaccccaaattcaaaattccccacccggccaaattcaaaacaatccatatttagaaatgggcataaacatcatttaaacacaatccaaatccagagcatcacaaatacgtacataatattggcatcaatccaaatacaacattgacataatcaacagaacaaacacagattaacctaacaaacatccttacaaaccaaaacacacaaaaaaaacacagagaaccctagtcgccgaagccatcgggatgagccaccgccgctgccatctgccggtcgcggaaccaaaacacacaaaaacacgcttgccggcagcatcgcggtcatcgtcgtcaccacggtcacggtcgtcgtcgtcagctccgctgccggggacgagccgctgttgtcgccgccatccgctgccggggacgagccgccgccgccgacggggacgagccgccgccgccgacggggacgagccgccgcctcccgcgccatgtgctccccgcgccaccgccggggcagatttgcacgtcctccccgtcgccgcctctgttgtgccaccggcggcggcctcctcccctcagacagataggagaggaggggatgggagggcaggggcgacgcagggagccgccgccgctggtcgtcgttgccagagccgtcaccagtcatcgccgccagagccgccgccactgccgtcgctggtcgtcgcctccagagccgccgccgccgcagtcgccggtcgtcgccgccagagccatcgcctccatcgcaggtggagaggctgggagggaggagagggaggagagagaagaggagtggatgtgttgtgttttaatgtggagaagaggatgaggatgggtaggtgggtgttttaatgtgacagatatttttggttggattttcactggcggttctatttattggccgccatgaaaaattgcaccgccagcaaaaattatctattttcgctggcggcgcacctaattgaccgccagcaaaaatagacatactttcgctggcggctgcattagatgggccgccagcgaaaatgcattttcgttggcggccggtgcccctcaccccctcgttacaagtttgctggcggttttcacatttttccgccagcgaaatagaccaacgtcatgaaaaatcgtttttctagtagtgtaagccacccggattgctaccatgctacatattctttttgtgtatctgcaactgacaacaagatgtaaagccgtttcgccttctctatgttagaggggccaaaacccattattttgccattctctaatcgcgagccggtcgaaggtccaaaccctgttttggatgactagccatgcgtggaatttgcatttccccggtatccaaactttccaaatgagagagatgaaaatcttgtttggtgccccaaggtgcctgataagctgacgacgccgagtattggccatggcttgtgaacttataggtaatttgatcaggatcctcgtttaattggatgtcccgcacaacagtccataaggtgactaactgacctataaggtccaccgagattggtgggttggcttcaaggtctaagtcattgatccaagcattatttttcattccctgatgtaaggactttcttcgagattgcgttgaccaatggcatgaggtcttttggcctacgcccttctatccaaacggagtcccaaaaacgcatagtgtttccgtcgccgatggttacttttgttgacgcaaatcaacacatgaacatgataacttcttttagctttaatttgataacaatatgttagacagccgatacaacatccattgttttttcgcttgatgcgttttgaacatcgtcacggtcttcaatttaattcatatgtttttatccttacctcttatgctatgcgtgttttcataaaaaattaaaataaaatacaactatatgaaagactttttcataaaaaaaatcctataatatatttttttgcattttaatccgtaatatgttccatctattaatgatttaagagttattgattaaactctaatcattatgtcgttctattgagaacaaatttaataacatgcgggtcctctctcctctcccagctaatatatcttatttcccatggacgaacttaaagcataatattacgtttgtttgttcttacttataatgtaggatactgccatggtctccattatacttgtttgattgttttgcctatcctataatcatatatcataaaaatattgaaaatataacaacattaaagtattttatcacaaaactatagatacgttaaccaaactatcacaaaactacatatttaaggtgttgtatcagaaaactatagatttaacaccgaatttatcactaaaatatatatttaatgataagtaacacaaaactacatatttaaatactaaagttatcataaaactacatatttcgaagtttaaatccctagtactaccgttatgttagagctataaacattgtagttttgtgattaaattggcactaaacttatagctttgtgataaatttgttatctaatctatagttttatggtgttccatcctaaatatgtagttttgtcataaattagacgctaaatctgtagttttatgaaaatttggttaaagtatctgtagttttgtgaaatttctaatgatgttattttcatgtgccaaatattaacattttttatatattcgtaataaaaaaacttcaagattcgactatgcacatttaaatatatcatttgtttgagaatgaagttggtagagagaaattcggttatgcttaagaacagtgatgacgtaggctagattttaacttggtgatttgaaaagtaactgcaaaaatattgaacttgaacgatctatgaaaactcttaggatgcgtagacctttttcctcctcacatttttctagtgaacatccttatgttaccttgatgtgatttcatatgcaaaacaaatgttttctccggcccgtgagtcaaataacagatcgatgtaaaagccggtatatatgtcgagtgtaagaaatttaccctcactccatgatagaaagcaaaattttgtaaagagaaatatgtaatttcatactgtccaatgagttcaacataaagtttttacagattttgaaagcctagaaacaagttttgaagttctaaaattctggaccagccggcactaaacaatttctagaggaggctatgctcattcattccccttggtaatttttctggaggtcactaactataccaggaagccccacaaaaatacgaaaaatttcatctcctctgtggcccctctaaaatttatgaaatggttgatgtcctattgttctaaaaatcccaaattctagtcttctgaaatataaagtgtgcatcaaattgaacggaaatataagatgttataatttcttcaaatactagtttattttccatgaattaatatgctttagttttttatgttggtttttcaagatgttttttttcattttttgagtttttttagaaggggagcagttttttaagaagagaaaggaggacaactgtgtttctaaagcagttaagaataagaagataccgcgttcacgcttaatgtcgcctagtagctagttctgacgtcgggcctcatgtaattttcaaatacgacacttagtactatcatttgtactaggcgagttggcatattgcaaggaggacgacgttgatttgtgcagtttgtcgtactaaacagggttatgtaaatgaaaaaaaattcaatgacagcattgccaccatacgatgttaactatagccgtttggccaggtcatatcgactcgatcaaaccggcgtggtcagtacgtacggtgcacttctgttaacacagctatctctaggtgaaagcctatataaaccatgttttaggacggatggtttatcatttaaaccagctattcgtattgaagttatagattttaccggatgtgctaggcaacagggaagcataattaatgtagatcagcccttgcctctcccaaataaatcgagtccctacttcccaagaaaaattttacaaggttgggaaaaaggaaattgtcccttgttaatagaataaaagtagtagtattagtgagcgggtagatatggagaattgaagtactaaaacttctcgatttatagactaatgatagttataagttaaaaaaatcaacttatcttggaacatattttaaaccgtagaaattaacttaggctctgtttgattcagcttagaattattataatctggattattatgagtaaactgaaacaacgagatagcttattatgatagattattacagtctataagtcaaattactataatacgataatccactctaaaggtgtttcttttagattattactccctccgtcccataaaaaacgaatctagaaccggatgtaacatattctagtattacgaagctggacatatattcagattcataattctaagattctagtattatgtatgtccagattcataatactaagatgtatcatatcaggtactaggttggttttttatgggacggagggagtaggtggctaacagctaataaagagaaacaaacaactaacagcttattctatgtcggcttattataatccagcttatagtaatctagctcagtaatctagattacaataatcttgggacatatggagtacttcctaaactgacgattcgttcgcatactgattacttcatttctaaatgtaagtattgctaggttttcttacaaagatttagacagaaatattcatcttattggtcaaattacaaaaatttaattgtttaaattccccttctaagcacccaaatgctttgattcacttgcattaaaattggtgtcgaagaaatagttgtattgtgtacaaatttgaattataggaatgtttttaatggactgatataaggtgtggaaatttcattgaatataggagtgcaaagggagctttacaagtatggtgtggaactgtacaaaaggggaaagggagaaactagggaataatatctgtcgttttactgctattagagccgattaatttttacggccaaagatggcaccaatagctcttgtgatgaaccactctatgtttcctcttcttccatattttccatacaattagtaggacgagtgtacgaacatgcctttggcggggcttgtcattgtcggttgctagtgttacccaccatttgtgcgctatgttggttttgctccaccatctccatgtttttgggtttaattgtgcaagaggccggtagtgtgctgtgtgcggaggatcatcttccacttccttggtgttctcctcctcttcgctacttgggcctttctctttttttttcgaggaagagtagaaatatattactcaaccaaagtgccagtacaaactaactgagagataaaattacaggtttctcctaaccaaaaatcagaaacaaactctgaacaagccttattggctagcgcatggcttgcatatatggttctgggagcggtgtatcttctgaatgatgatttccctttccccagcgcggaggcgtttaacttcttgaatggtgtgagctagtgctgatagatacttctctttagactgaatgagctaagaggccaccaaacaatcagtctctactacaatagacagcaaagtccattggatcgccaaagcaatttcctccgcgcaggataggagttctacttgggcctttcttgaccccgtagtcatcaagagtgatcttgcccctaccgaaaagggaagagctctcctctgccaacgtcaagtcaaccccccccccccccccccaacacacacacacaccgtagagttcagccaactcaacgtgacaaacaaaatggtagatcctggcaccactagaaaaacagttttctacagcagaacacataatttttgtatgtgaacttatttttgactatgattgtccgcctccctagttgtatggagagatgtctaatagccacccgcctaggaaataaatctattttcgcaggcggatggcttaagaggtgcgtatgcaaaaatacctttattttttcaggcggacctcttaagtcgtccgcttgtgaaaattggttgtggcatttaaatagatgctagaggaaactgaaacatcagatatttctaagtcccaaccccctctcttctccttagttcggcgatgagggtggcgagggcggcggtggtggggaagggagcagcggtggctctccaaggccgtggcgcgcgggataatagacggcaacgcacctgggaggcggggatccagcgacgatggcatgcgtgggcagcaaatatggtaaaggcgacgcgcggcgaggaggattcggcgacggcgacacacgtgagttgtggatccagcgacagcgacacgcatgggtggcgggggcgcaccctcctcgcattgctcatggttgtcttcctcgtcatcatggtggaggaagccggcttccggatcggctcctcggcagcgacggtggcatccttcctacgacgatgaccaccaccacaacgtccaacttgatgttttttttcttttttgttgagaacttccaacttgctatgaaaaatacgggtgtggatttgaatgtgattttgaacgtgaacttccacatattttttgagaacttccaccacggatgtgtctttcaatgtgaatttgcatgccatgaataatatattgctttttatttttctttttgcacacaattcttttggcaagagttcctcttaatgggtccttctgcaaaaattgacttttgcaggcagacccatgaccgtctgcaaaaatcgacgattttcacatcttgctataggcagagtatttggccacatgcgaaaatgtgttttggccgcctgcaaaaatagcttttctagtagtgcggacaaaccttggatagggcaatggctcatccatggtaacggcaaagcttccttccacgtagccaggccgaatataatatcgaggcatgaaaatgggaagcgactcatttgtgcttcatgcgacccactaacagactgggggtctgtttggggagcatctagcagttatagcttctcacagaatctttaggaccccaaacagtccagattttacccagattctaggaatctgtagttgtagaatccggaaaatgaactagaacccagaagctagaaaacccggcttctctagattctcagaagttggctaccaaccagcggattctcaaagtcttaagctccctcaaacatggcctagaaacgttgtggcaagtatcccgattcgcgccatttcgcactaaatcgacgaatttgatacatgttgtgtgattatattattggattttgatgcacgtaatataatcggacatgcaacatcacattgggggacaatgtctattcgcacaaggaatccccctacgcatatagacttggactcgaaaaaagtcctccgccccctcaccgaagggggaagggaggttcggagtactgtttacaattccgataccacttttcatgccggacgctagtggcacatcgattttcgtgaagtccgatcgaaaaccgatagattctgaacaatatttgtaggcaaaaaaatgaattcgaatgccctattttggtcggtctgaaaatcaatgggctttaccgaaatttcgaagaggaaacaaggcgttgttcagctccctttgttgcagatttgtgggctatagcatcaatccaacacatcagtttttttttttggtgcctatcgctagcgagatgcaattgatagtgtagtggtaaaaggtgtgcggtttcaatcttaaggtcccgtattcaatccccatcctatcagataggatgactcctgaactattaaaaccaatgcaatttgactctcttagctgttgacctggtcttcatcccacgtggtgcttgtgtggtattagaattaaaaaaatatatatgtgggacttatttatcattcacacaaaaatatataaggaaattttgctacaaggcactgctattgtgtggttttagccctaggacaccgcaaaaactaacttttggaggaaaacaatccataattgtggtattttgccagtggacaccgtgcctggttttagccctaggacaccgcaaaaactaacttttggaggaaaacaatccataattgtggtattttgccagtggacaccgtgccgactaaaataataacttccaattgaagaggagagagaaatcgtgtgaaatgtcaaaaatgccaaataatatattatgggacccactgtcatcctctctctatctccaacccttcttccttcctctctctcttccttatctctctctctcttcttttggcaaaatttgctacaggacactcaaagattatggtctttgctgtgagacactcgaagatcgtgtatttgctcgtggacactgtaaaaatatggtaattagctgctggacacccctcccattattttattattttttggctgaactggagagagaaaggacgttgaaagtaccaaaatgcccccgtgccgttttgcttgtaaacgctggttgaaccagacccaatcccctctcattggaaacggaggcaatgagccggctgtcaggggagaagacgaggtcgaagacaccctcgccgtcatcgtcgtcgcacggtaagccgcgaccactgcatcccggtcgccgtgccgcatctggccaccgcgccatgccgcaccacactgcccgctggatggccggaatcgtgcatgccccgccaccacccagccgccgcacggccggtccgcgctgctccaccgcccctcggccggccactacaccgctgggctgcgtcattaccatcctcgtcgggtcgcttccatatccgcgttaccgtgccagcctgcacctgcgccacgcctggccacgaccgccgtatcccggtcgtcacgccgtgccacgcctgcaaagccgcaccgccaccgcacgacgctcacctagccgcgccacctagccgccgcgcacgcggtcctggcgatagcatcctatggcgtgtcggcggtgaaggcaacgtacaagcagctccagcagacgcaacatccctatgacgccgaggcgattcagtccgcggatgccgcgttgtcctccattgccattgccgcgacaatcggagacgaagacgggaggggcacgagcggcggcacacatagcagcacaaggaagaagaggaagagagagaggatacgtgagaatgacaagtgggcccatgggcaaacttgtctttaaccaaagtttatctctccgttttcatcaaaaataataaaataatggaaggagtgtccagcagccaattaccacttttttacagtgtccacgagcaaatacacgatcttcgggtatctcacagcaaagaccacaatctttgagtgttctgtagcaaattttgccttttcttttctcggctgtggcggcagcgggtgggacgacaggtgctggagcagcggcggcgaggaacagggcatcgcagatgggcgcgacggaggaggggcaatgaaacgaatttgggacgccgagatgaccaggccccaatcgaggggagaagaggcgaggcaaggcgaggctggcgtggtggtcgacggggaggagacgatatcgattcagcgtactggtgggaccacgtggtgctgctggtgaggagggcgtggctcggcgtcgctgcctgattcgaggttcgccaaacatgtaaggcgacgagagggggttctggtggggtggaggcggcgtacgtgggtataactctgacgatgtttttggtttttatggtcttaagtctctggaggttgcggcagaggtgagcacgtgatgtgggagatgctgagccgcaccagcacggctagggcagcgaggcgggccgcgggcgctaccactggccaggaagcacagccggttccggcagccgcgactgtggaccgagagtatctggctctgcgggggcttatagaaggtctctgccacggcctagtcgtcttggccctggggatgtggaaacagagctggcgagggcgcccttcctcgcgtgtacaaactcgtctcgccgcccctcctacatcacgctcatcggcgacggcccgctccaacatcccgttccgcttgctgccaccacggcccaaggggaaaagaaaagagagagatatataagggagagagggatgaggaagaagggttggagagagtggatgataatgggtcccacaatatatttttgtatgtgaataacaaatgggtcccacatatatactccctccgtttcaggttataagatgttttgactttggtcaaaatcaaactgttttaaatttgactaagtttatagacaaatatagcaatatttgtaaaaccaaattagtttcattaaatcaataatttaatatattttcataataaatttgtctttggttgaaaatattattttttttctacaaacttagttaaactttaagcagattgactttaaccaaagttaaaatatcttataacctgaaacggaggaaatatttttttttaattctaataccacataagccccatgtgggacaaagaggtcaacactaccgcgtgagtgccacgttagcaaaactgctctccaaaacctcttggagtcgttgtatccggttttctgatttgagaaggggtgaactagatttcggcctattaaagggagtcaaagtgcactttttccatctacaaaaatacgccagtgggctttcatcctaggagtggtccgtgaaaactggatccaacagcccaactgtgcttacgtttcggcctttccccgccatttgcgctactggccgtgctccccgcccccacgccggcgagcgcgttgcagccttgcaggcgaggcaagaaccaacctatcgccatctatcttcaagaaaaaagaagcatatcgccatcgccaccgtcgccgccggggccgagcgcgcgcagctccttcacggtggagccgacggtagctagcttacgctcgccgccgctcatgagcaaaagaagcaatgtgcgtgcgtcgtcggtgcgcggacctgcatcctggcgtccaaggtgtcgccgcgaacagctgcagctgcaaatctgcaggtgccgcatcacgtgtacggtgtacccggtactgggctatactactggctaacaggccggtgagctgaaacaactacttcctctatcaaaaaaaaaaaaaaaggataaaccttgagtttccgtgtctaattttgactgtccgtcttatataatttttttttataattcgtattttcattattgttagatgataaaacatgattaatattttatgcgtgacttgtttttttaattttttttataatttttttaaataagacggatgatccaatgttacaaacggaaatcagggtttgtcttttttttagagacggagagagtataaaatccaaactggccagtgcatcaagaatcaaacgtactacggggcaccggatgcctgagacacggcaatgccggagtagatataccgtcggcgtcgaccattgtctcagggagtcacagatgtgtagatttgttgcgtgttgtcaggcggtcaagatcctcgcttatccctgcctctgctgctgctacagtgctctgcacccatccaatgtctgcatccataagatttgctccccaggccggcaccaatctctgacgatctacgagcttcaacagcaagcagggctagcattcatcaattcaacccctcactcatagagtcctaggactactacactaccactgttcctgtcctgaaccgtaaggattttcttttgtttgcaagtcgattctactacggtcgcctattgaatttcggaagatcgaaattacatttcgtcaaggcagacacgttgctcactgtacatagatttgactctttaattcgcccccagcgaaggcttcctgtgcgttccattatgcgtgtacttgttcggtggatcctgcatttctgctatgctgttggacatgagagaaaaatggcgcgagccgaaaatttttagctgcggctccaccaccatgtggaggttaatcctggacgctagtagcaatccagttcttccccatggcgcgccaaaaatgcacaaccaagagtagtagtagtagtattctgcgccattacgccgatacggttggtagcttttctgtcaatgcatgcacgagattgcacttggcaacacagcaaaaggcagctatttctctctctccctctctctcacactaggaatcgagcaaaacgtttatggcacatgtaaacatgaatcatatactcctagctgatgaatcactggtggggttcacgcatttaggctttgttcgctagctgtgggaattaatcccagggaaaagcctcccacgtggggtttgggttgtcccctcaccccacacccaatccctccccgcgaatccccccctctcatccctctgtttggacagaggtgggattagaagggatcactaccattcactacacttcaaattcagaatgagtacaacatttttgaaaattcggataaaataaaaaaaactggaagaaaggtcacgaacgtcaaaataatctagaaatgataagaaaaaaattgatcatgaaaacaaaacaaaaattaaacgtggaaaataattctaaaaatccccaaaaaaataaaattgtagaattacaacatatgcactctaaacatagtccagaatttttaaacaatcataattttggatagattaaattctacaagcagtaaaacatccaaaataatcacaagttttccaatagatatgctaggaaccaacttaacattgatactacaaaaatctctcttcgttttcaaagaatctaactttcaaaatcagtctaaaactgaccactcttaacatcgtactcgcatacaatttctattgaaggggcactgcactattgcaacaatcaaaattcagtgaaaacagctttgttcaaatcagatctctctcattgagctaactggaagaataaaagttccaattgccattgtgcaaagcaagacaaaaattggttcttggaacttaataaatctctgtccaatcaaactcaataatatatctctgtctgatcaaacaagtgataattctgtagaaaaaattggttcctgcaaccataatagctacatgaattaagcagttaaggaaaaattatctttcatccatcgcatttcacaattcaaggagtctctaagaatcttgcaaaacaatccttccaatgggcacagctagcaaatgggccatggaaccctgtaactacacatccaaaaagaaacaagtgttagacactagacaatggtgattgctaatatgtaaactaattaagcaacaggtaaaataaacttgagcacaggcaataatacaattacacatcaaacacactgacacacacggagagaattactatactttaaactatgtgtgagaacataataatatgcatatgttttacaagattattaaacatgaaattagaggcattcaaggtggctacatgcataaatacttttaatctttcagcaaataaacagtctgcaatgggaggagggggatcaataatatgttcagattttgactagttccagaagtactttgtgtacttagttttgtttaaacctcaggtttgaagacataatttcctactcgatcattccacagaaaaataatatttttatcttttgaaggcatgcttttttgatgtaaagcttgtatctctattgctagaagctggacatgttatgtcagatcaaactgtatagcatgtttacttaaaaaggttgcatcctgaaagggtgatagttgtcacgcccagaaattcccgaatagaattccaagcagaatgtgcattaaaatccccgtccaggaccagccggggtacacaaacgacaatgttgacatacagatccacgtcttacaaacattgtaaaatcttacagaaatgcagcggaaaacaaaagataactggagctaagccttgacttgaacggcagcgggaacaccactccacaggcatcctcgacggcacggacgaagcctactcctcggagaacccgccatcggacacatactcgagctctgaggttggggggaaaagtagagcaagactgagtactacccactgtactcagcaagtcataccggaataggggtatgatgcatggatttaacaagggatagctaagcaggttcatttgcataaatactggcatttataaacaggaatttaatgcgaaaacagttgtaaaaattaaacagtattaaacatccgctgtccaacgctaacccacgttgcgacaggcccaaccatccacctaaactatccaaattcaacagattacactagggtgagactaatcacggtgaatctggttgaccgcccataaccgcgggcacggctattcgaatagttttactctgatcagaggtgtacaactgtacccacaagacacagccccacgacacgtttccgtgcgccgacatgtcaccacgacataccggaaagaggccgtgacaggacccttcgcataaccccctctaaccaagcacaccacacctcaggtttcacccccactcctcgcaaggcagcgggcagtcccctctcgtgcctaggtgaatccggaagccgcatagaccgtcgcagggcccatccaaactccatcacgcccacccttgcctggatgcgtcggctagaggaaagctacactacaagcccagccgttgcccacgctggcttgtggtaagtacgataaattcttccagggcatcccgcgaaccggtccttaactgccatgggtgcgactagcaaaaccatgcacccacagcccaccatgtggttcattttatttaaccaacaccagagcggtggtattaaaccaacattatcatataaacctatagtctaggttttaaatgagatccccaatgtgtgctagttgaactaagcatggctaagcaagtcctagtccaaagtctaatcatgttataacccaagctaacaaaggagcatgatatccaaaagcatggctgtaacaataggtatccatcccatagtgatattataaaacagtgcaatatttgaaagaaaacaatggagcatttgcaatataggatcaacatgttcaagtgacaagcatgacttgccttgctctgctgctggaggtacctcggcgactatttcgaagtacaccggagcgtcgaaagaaccggaatctagcgacatacaaagcaaacattgcaaacaggctataagactactgaaacagagaacaaaaccatttttaatggattctacacatttttcttgatttactgagacttgaatgggcttaaacggagctcggatgatttagttatgaattttagaagattcactgtgtttattactataaaagaaatccttaaataatttattgcgcaatattaaccagggctgacgtcagcgagggggcgcggcgccgacaggcggggcccaccggtcagcgaccgggagagagagaaagagggtggcggcttgcgggcccaccggtcagcggcacgggaaaaggatggggcggcggcgccacgtggcgaccggaccgacggccccgatctacccaagggtagatcggacggcggcgcgggacctcgcggccggggcgcgcgggcgcggcgcgagacggcggcgaccatggcgccggcggcgcggcgctcacacggcggcggcgcacatgcggcagcggcgcaaagcgacgaccgacggcggcggagagcgcggctagaggagaggaaggggaaaagaagggaggggatgcctcaccgagggtggccggcgcggaggaaggcgatggcggacggcgacggcaagccacgggaggacggcgtcggctagcggacgagcttcggcgtgccctaaggaaggagaagatagggattagagagagagagatggaccatggcgatcgggatccatggccgaaggcggcggtagaggtggcgctcacccgtgcgcgtggagatgagggttccggcgacgaacctcgacggaggaggggtggacgaggtggacctcggccgcgcgaagctaacggcggcgacggcgtgagacggcggcgagcctagcggcggctagcggcggccggagtagcaaaagcggcggcggcgggtggttgcacggcgcgggagcgatggggagctcgggagaggtcggcgaaatggggaaaaagcgagagggggtgccgcgatgcttaaatagggggagagggaaccggacgtgccgggagcggcgggaatcgccggccgacgcgggggagtggggaggagagagaggcgggattcggttttcgaatcccggccatctcgggcgcgggcgcgagcgggacaggtaggggaacgggcgcggggaatgcggcgcacgcgcgggcgtggtcgacgtggcccgggagagacggaggcgtgggcgcggcgtcggttgcggcggtggcggcgcgagcgggatcggcgggaggagggagacgggtccgacaggtgggccccacctgtcggcgaccccgagaggagggaggcgggcggccggctgtcgggctgggcctcggcctgcggccggcccagtaagggaggggaaggaagggagaagtgggccgacggcccacttgacaaaaaggagggaaaagagaggaaaaagaaaaagaaaaggaaaaaggattttccctggaattaacaattgcactttagtgatttttaattggttaaaattatttctagagctctgaaaattccactaaaaatcctgttaatgaatttcgacatgtagaattcaagaaaaattccacatgtcagatccgattattatttgcattactttcttagggttttctcctgatttcaccagcattttcttagggtcaattataaattacaattttgacttgggaggaaaacttcggggtgtgacaaacctaccccccttaaacggaatctcggccccgagattcggtggagctggtgaagaggtacggatgggcggccttcaactcatcttccctttcccaggttgcttcctcttctgaatgatgactccactgaacacggcaaaacctggtgaccttgtttctggttctcctttcgctagtgtcaagtatgcgaaccggcttctccacatatgttaggtcctcttggatatcaatgtgttccgaattagcctgttcttcaggtacccttaaacacttctttaattgggacacatggaacacgtcatggatgccgatcatagtggatggaagttctagctgataggcaacttctccccttcgttccaaaattttgtacggtcccacgaagcgtggtgccaacttgccttttgtctgaaagcggtgtactccccggagcggggtgacacgaagatacacgtaatctccggcctcaaaagttagctcccttcgacggttatccgcgtagctcttctgtcgagactgagcaatcctcaatctctccctgatgattctgactttctcttctgcttccgctaatacttctgttccgaacagctgacgttcgcctgtctgatcccagaagagaggtgtgcggcacttccggccgtatagagcttcaaacggtgccatctgtagactggcctggtagctgttgttatacgagaattccgcatatggtaagcttttgtcccaagctccaccaaaatcaagagcgcaagctctcaacatatcttccaagatttgattgactcgctctgtctgaccatcagtttgcgggtgataggccgtgctgaaatttaaacgggtcccatttcttcctgcagcttctgccagaactttgaggtgaactgactacctcggtcggagactatcttcttgggtaccccatgcaaacacatgatccttgcgaggtacaattctgccaatctctttcccgtataggtggtatgtactggtataaagtgagccaccttggtgagtcgatccacgactacccagattgaatcatgtcccgatgatgtccggggcagtcctgtgataaagtccattccaatctcctcccatttccattccgggatttggagaggttggagtaaacctgctggtctttggtgctctgctttcactcgttggcaaacatcgcagagtgcgacgaattcagctatttctctcctcatgctgacccaccaaaacttttctttgaggtcttgatacattttagtgctgcctggatgaatggagtactgggtctgatgagcttcggtgagtatcagatccttcaattccttgtcgtccggtacgcacaatctttctcccatccagattgtgccatgctcatcctcaaggaaatcccgagcctttccgactctcatgttctttttcaattctgctatttccggatcatttacttgagcggctctgacttgatccacgagcgtaggccgtgcctccaaagcggctacaaacccgtgttcaacaattcccatgttgagatgttcaaattcctgccgcagttcctcacacatgccctcgatgcatagggcagtgcagtaacttttccggcttaaagcgtctgccaccacattggctttacccgggtggtagtgaatactcatgtcatagtctttgattagttccaaccatcttcgttgtcgaaggtttagatccggttgggtgaagatgtatttcagactcttatggtccgtatatacttcgcagcggtttccaatcagataatgcctccagatcttcaaagcatgaaccactgctgccaattccaagtcatgagttggataatttccttcgtgtggacgcaactgccgcgaggcatacgcaaccactctgccctcttgcattaggacacatccaagtccgtgacgggatgcattacaatagacttggaagtctttcgtcgggtcgggcagaatcaatactggtgcggatactaatttctttttgagctcctcaaagctcttatcgcactcagctgtccatttaaacttctcatccttcttaagcaactgagtcatgggtcgggcgattctggagaagttttcgatgaatcggcggtaataacctgccagtcctagaaaactccgaatctgcgacacggtctttggtggggtccattttgtaactgactccacgttcgatggatcaactgctacaccctgggctgtaatgacatggcccagaaatttgacttccgtcaaccagaagtcacacttgctgaacttggcgtatagctggtgctccttcaacttctcgagtaccagacggagatgttgttcatgttcttcctcggactttgaatagataagaatgtcgtcgatgaataccacaacaaacttgtccagaaatttcatgaacactttgttcatcagattcatgaagaatgcgggtgcgttggtaagtccgaaagacataaccgtgcactcatatagcccgtaccgagtggtgaaggccgtcttcggaatatcctcttcccggattctcagctggtggtagcctgatcgcaggtctatcttagagaacactttagctcctttcagttgatcaaataaatcgtcgattcgcggtaagggatatttattcttgattgtgacctcgttaagtgcgcgataatcgacgcacatcctcttcgtcttatcctttttctccacaaaaatgaccggagcgccccaaggtgaagtgcttggtcgtatgtaccctttctgcagctgctcatcaacttgcttcttgacctctgctaattcgttggccgccatcctgtatggtctcttgtaaattggagcggttcccggtgccaagtcaatccggaattcaatctccctcttgggtggcatggtagtgaggttttcggggaacacttccggatactcgcagactatgggtatatcttccaattttctcaagttcttccccacggtgtccactgggatttccgtttcaatctgattcaacgaggctcctttctttggcgagactagggatttgtacaccacggtttctcctttctcattggtcagggtgactgtgcgattcgcacaatcgatgactcccttaaacttggtcagccaatccatcccaagaatgacatctaggtctttggattcgagaaggatgaggttggctagaaatggtgatctttggatttctattagcactgaagggctaaaactgactgaggttgaactatttcccggggtacgaaccctcattggtgtgctaagctcttctttccttagcccatacattcccacgaatttctttgaaatgaaagaatgcgttgcaccagaatcaaaaagtactgttgcagggattgagttaacagggaacgtacccagtacgacctctggtgctgcttgtgcctcctccgcagacgcgtggttgacacgagcctggataaaccttggcccggcacgcctgggcttcgggcatttgtcagcgaagtggccaagctcgccacagttgaagcaggaccctggttttgctcccgtctccttcttggcttgcgcgggctgggctgactgtgccggtgccattggtgggcgtggagctgcaccgcggttgggctggcctccctggtggttctgactgccactagtgccctggtggaagttgctggagttgaacgggcggtgctggcggacgatcatggtggtaggtccaccctgctgtccgggagtgaagcgcggtcggtgctgactgccttggttggaccggaactgcgccgcctttcttttcctgtccattttgttgcgctgatcctcctggcggattgccttgtcaaccagcctctcaaagtcggcgtagtccccagatatcagttggttggtcagctcatcatccagacccgccatgaacttctcctgcttctcggcgtcggtgcggacatcctctggtgcatatcgcgcgaggcgattgaactcatggaggtactctgtcacagtcctgttgccctgatggagcgcacggaattccctcttcttttgtgccacgaccccatctggcacctgtgccttcctgaagctacggcagaactctgcccatgtgacttcagtacccggtgggcgggtggccatgtggttgtcccaccaagctgacgcaggaccctgaagctggtgtgtggcgaaagcgaccttctcctggtcattgcactgcaggagattcagcttcttctctatcgcatggagccagtcatttgcctccatagggttggtggtgctggagaaggtgggtggcctgacacgtagaaactcaggcaacttggactgggggggagggggaccaactgctggtgctgctgttcggcgtgctgcatcatcctctgatgcatctgctgcatcatggctgccatcatctgagtctgatgtgccataacttgggcaagcgtcggattctcgggaagtggtggcggaccattgccagaatcaccgttggggtgcacaccatcagcgcgttcttcgccgttgctgccctcgcctgttgcgcggctaccagtcctggtgtagaccatctggagggaagagcagacggggaaaagaagaaaaacagatgctcaagaactaagctttattacaaaggaattaaaactgtaattgttctgatctgaattaaaacacttaaaaaggcaagcaaaaatccttattaagacagccatatcataggcacatgatatcgaccgtcgtctgaccccaaacaagcaacctacacacacaaactaacaaacaaaaactagacagtcgatgaactagtggaaaaacgagcctaatgctcggaacggctcctgcggtcggtggagtcgaaggcgtcctcctgctcgtcacccggtccctctaagcgactcctggagcctgacggatcggtctcgccgctgccgctgggagtagcagacagccaacctccggtaccactggctgaacctctggcggctgatgctggagcgaaggagagagtgaacgcgggagctggagctggagctgcaggaactgcgggcggaactggagctgctgcgggagctgctggtggaggtgggttcctgggcgcaagctggatgcgcacaggtgcagtcgtcctcttacggggcgtagtgcggatccggactcctcctggcgctggaaggcccttcaactgagcattctccttcttcaggcgcgctacctcgtccttcagagcgacgatcctcatgagcttcccatcgttcaaggccttggtcgccttgtgcaggtccgagtgcatcctatccaatcccctcatcacagcacacatgtgaccgaaggtggtgtcgttctcgccagctgtcggacggaaggagctgacgccatcaccatgggctcgacgggggtggtagcggtacgccgtgtcgtggaagatgtagtcgtggcgctcccgtagcctggccatcatcaagtaggctgcctcctgacaggcgtgatctgctgtgcctcctgacgcctccaccgccatgttagcgaggcaagtccccacgtagccatggacctccaagcggacacggtaaggaagctcgccactgagcggtgggatggtcgtgtactccggcgcgtcggggtagcccactaccagtgtcatgcgtgccagctctgccacaaagtcgatcatgccttctccgcggtggttgggtgggtgaccggccatctagagaagacaaaggagtaggatcaatgcatgctcaaatccaaatttaaataaagcaataaagactcaaataaaggaatcaaataagagcaaaattttatgcatagatcattttacatgagcgcgaataaataagacagactcacataacgataaaataatgggaaattagatacataataataataacgaacaaagcataaataccttgcaacccatgataccgagctaggaccgaatgcatttcacccatcaaatcccaactgactgacgaataaatcccaataattttactaaaaccctagactgactcgttttgaaaaactcactttaaacgagcgaccaagatttttcccttgaaccacaagaacagatccccattttcccggaacaaatccaattgcgaagaacatatgcaatgaaaaaggattcagagggctcttaggtttttccatttggcttgccctacggtcaaggtcggttctgataccaacttgtcacgcccagaaattcccgaatagaattccaagcagaatgtgcattaaaatccccgtccaggaccagccggggtacacaaacgacaatgttgacatacagatccacgtcttacaaacattgtaaaatcttacagaaatgcagcggaaaacaaaagataactggagctaagccttgacttgaacggcagcgggaacaccactccacaggcatcctcgacggcacggacgaagcctactcctcggagaacccgccatcggacacatactcgagctctgaggttggggggaaaagtagagcaagactgagtactacccactgtactcagcaagtcataccggaataggggtatgatgcatggatttaacaagggatagctaagcaggttcatttgcataaatactggcatttataaacaggaatttaatgcgaaaacagttgtaaaaattaaacagtattaaacatccgctgtccaacgctaacccacgttgcgacaggcccaaccatccacctaaactatccaaattcaacagattacactagggtgagactaatcacggtgaatctggttgaccgcccataaccgcgggcacggctattcgaatagttttactctgatcagaggtgtacaactgtacccacaagacacagccccacgacacgtttccgtgcgccgacatgtcaccacgacataccggaaagaggccgtgacaggacccttcgcataaccccctctaaccaagcacaccacacctcaggtttcacccccactcctcgcaaggcagcgggcagtcccctctcgtgcctaggtgaatccggaagccgcatagaccgtcgcagggcccatccaaactccatcacgcccacccttgcctggatgcgtcggctagaggaaagctacactacaagcccagccgttgcccacgctggcttgtggtaagtacgataaattcttccagggcatcccgcgaaccggtccttaactgccatgggtgcgactagcaaaaccatgcacccacagcccaccatgtggttcattttatttaaccaacatcagagtggtggtattaaaccaacattatcatataaacctatagtctaggttttaaatgagatccccaatgtgtgctagttgaactaagcatggctaagcaagtcctagtccaaagtctaatcatgttataacccaagctaacaaaggagcatgatatccaaaagcatggctgtaacaataggtatccatcccatagtgatattataaaacagtgcaatatttgaaagaaaacaatggagcatttgcaatataggatcaacatgttcaagtgacaagcatgacttgccttgctctgctgctggaggtacctcggcgactatttcgaagtacaccggagcgtcgaaagaaccggaatctagcgacatacaaagcaaacattgcaaacaggctataagactactgaaacagagaacaaaaccatttttaatggattctacacatttttcttgatttactgagacttgaatgggcttaaacggagctcggatgatttagttatgaattttagaagattcactgtgtttattactataaaagaaatccttaaataatttattgcgcaatattaaccagggctgacgtcagcgagggggcgcggcgccgacaggcggggcccaccggtcagcgaccgggagagagagaaagagggtggcggcttgcgggcccaccggtcagcggcacgggaaaaggatggggcggcggcgccacgtggcgaccggaccgacggccccgatctacccaagggtagatcggacggcggcgcgggacctcgcggccggggcgcgcgggcgcggcgcgagacggcggcgaccatggcgccggcggcgcggcgctcacacggcggcggcgcacatgcggcagcggcgcaaagcgacgaccgacggcggcggagagcggcggctagaggagaggaaggggaaaagaagggaggggatgcctcaccgagggtggccggcgcggaggaaggcgatggcggacggcgacggcaagccacgggaggacggcgtcggctagcggacgagcttcggcgtgccctaaggaaggagaagatagggattagagagagagagatggaccatggcgatcgggatccatggccgaaggcggcggtagaggtggcgctcacccgtgcgcgtggagatgagggttccggcgacgaacctcgacggaggaggggtggacgaggtggacctcggccgcgcgaagctaatggcggcgacggcgtgagacggcggcgagcctagcggcggctagcggcggccggagtagcaaaagcggcggcggcgggtggttgcacggcgcgggagcgatggggagctcgggagaggtcggcgaaatggggaaaaagcgagagggggtgccggcgatgcttaaatagggggagagggaaccggacgtggccgggagcggcgggaatcgccggccgacgcgggggagtggggaggagagagaggcgggattcggttttcgaatcccggccatcttgggcgcgggcgcgagcgggagagggaggggaacgggcgcggggaatgcggcgcacgcgcgggcgtggtcgacgtggcccgggagagacggaggcgtgggcgcggcgtcggttgcggcggtggcggcgcgagcgggatcggcgggaggagggagacgggtccgacaggtgggccccacctgtcggcgaccccgagaggagggaggcgggcggccggctgtcgggctgggcctcggcctgcggccggcccagtaagggaggggaaggaagggagaagtgggccgacggcccacttgacaaaaaggagggaaaagagaggaaaaagaaaaagaaaaggaaaaaggattttccctggaattaacaattgcactttagtgatttttaattggttaaaattatttctagagctctgaaaattccactaaaaatcctgttaatgaatttcgacatgtagaattcaagaaaaattccacatgtcagatccgattattatttgcattactttcttagggttttctcctgatttcaccagcattttcttagggtcaattataaattacaattttgacttgggaggaaaacttcggggtgtgacaatagtgtaatgataaactgtgggagccttatataccttgttatggacagctacatttctcaagttttaacaaattttgctaaacaaaaagccatggagaaagattacctaaaaaaaatatcaataacagggtatgatctactgaagaagtgaagctaaatttttgcagagaattaactttgtcctcagcattcttataaagtgaaagtttgcaaaattgcagggtatgtttgcattcatgaaaaatgtacgggtagtgaaatcattgagaagcttgactgcctcatgtagaaagctacacaaaccactacaatataatttggaaaagagaaacacagtggaaattattgtgctctattatacctcactgtaaatcctgctgcagaaagataattcttcttctcaactgcctcaagccctaacgacttaaactctgcaattttccttcgattcacagctttgtcctgataaagtgagccataaaaaatatcaaataaatgaaatccttgcagaatacatgggaaagatatatactaactgtaaagaaaatattgtgaatattccaggaaagatacatttgattactcaaacgtgacattttaagcactcatggtattctacaagtattcatcttcagcattgtcaattgactttgtcctctgagcattcttgtaaactgaaagtttgcaaaattatatactaaggatcactaaatcggctgaacatttctatagagagcacaatatatatcatcagctgcctactatttctcttgctgcattccctatcaaccttaattctcaacataattccttaatccatacaaccactccatacatcaactagcaacaaatccatccactagataagtcacaaatcttttcagagtgggaaaaaaggagatcaagaatcagacctgcttcttgatgtccaggctattgtcctcgaccttgccatctcccgcaatcggtgaatccgaagcgagaaggagagatggcaagcagcggtgactgagggcgggatggagagcgggaaggagagcggcggcggctgaagcgggatggagaccggcggcgaccgagggcgggatggacacagtcggcggccgaggacgggatggagaccggcggcgactgaagcgggatgaagaccggcggcgaccgagggcgggatggggggcggcggctgctggagatatgctactcctagatctctgccctagagccgcctcccggacctcgcgccgcctccaaaccctagcgccatgggagtcgaggaagacgagcgctgtctctgctcggggaaaaaaaaatcgtctcggagatgatttttctttacccgggggtttggcgtggatcgggcggagaattgcccccaccccggcccaggcgaacgcgtatatggcccacggaagaaaattacacccggccgggatggcacacggggatttcaggccattcccccccaaacccagcctaaaagaacaaggccttaagggacaagatctcggtccttggctgtgacaggcacgcagggggggagggatgaggaggaggagtaaatacctgaccccctttggctcctccgtttgcagcaacaaaagatcgccgattcgccgcgcgtacagcgcgatcgcggcacgtgtgcgccgttccgtatccaaatcccgtggattcgatcaatcgatcgatctctgcactgcacagctgcgcctgcagaatctcgcgacaccttgtacttccatttttttttcctctcctaaactgcatggtgacctcaccggcaactacagccacctgtgtatatatatagacgccccaccgtggtggtgatggatgtgaggttttgtgcggcgcgcttgctcagcgtatcgatcgatcccacgagagtctgcgagagagagagagagagagcacgtaggagaggttgagaagttgagatgtcgtcgatcggcgccggcgcaggaggagccgtggtgggggcggccgtggcggcggtggcggtgggcggcggggcgccgccgcacgtcctcgccgtggacgacagctcggtcgaccgcgccgtcatcgccggcatcctccggagctcccggtttcgtggtacatgtgtggttgatgcatatcagttttgttttttgttctgtttgtggttgctgctgttgaaaatgttgttttggacgtttttctggtgcagtgacggctgtggatagcgggaagagggccctggaactgctaggctcggtacgcctttgtttttttcctgaacttttggccttgttttgcatgtcaggttgcggtgatatgcagccgcaattttctcatgttcctttggctcgctcatcatcttgcaggaaccaaatgtgagcatgataatcacggactactggatgccggagatgacgggatacgagctcctgaagaaagtcaaggtatacatgcatgatcttagattgtcctgcagaaagcttaattactttgattaacaggagaatcaatctgacgacgcaaaatcatgaatcgtatatgcatgcaggagtcatccaagctgaagaagatccccgtggtgatcatgtcctcggagaatgtgccaacaagaatcagcaggtatttttatccgtttataatatctctattgattagagcattcttatgtcttatccatacagattaccgagcacttaaccattgttcttccatctttgctctgttcgattggtttattaaccagatgccttgaggaaggcgcggaggatttcttggtgaagcccgtccggccatccgacgtgtcgcggctcttcagccgcgtgctaccatgagcctcgccgccgccgctgccgactcaccggccagccggcggcgcagtcacgcacggcggcggacgcattgtttgtttcggagacttttgaaagagcaggagaaacggtgcaaccctgccttgatcacttgacgaatgaattctccattttttttctcgttggggtcgtcttcttgtctttgtgtaacttgttgcaagctagtattaagacagagggaactactgaactattgaacagagcatatggtctctgtttctctctttttttttctcctttttgttgctttcagtttcttgaagttaatttaaaggcggtgacaatggagttcctaacttgagcctaaatattttcctgtcagtcaagtcccgtttgtgatgtgtgtgtacgtgtatcgatgagcgtatgcaatacgtcgcgcgtacggtgggagccctggggggatcttgtccccgtcacaggccgttggtgttcttgtgcaaagcgtatccggcgatatcgttctcgttccagtacagactcggggcttgcagagccatgtgcgatgtgcccatgtcgtcgcagtaatgtacagtagatagtagcaacaagttctggtaattctggctggctcatccgctgtggtgatacggtccattaattcctgccatttcaagttcataaaaccatcggccagctggggattgggattcggcagcgtacttgccaaatgcaacctggattttgttcttcaggacatttaatactccctccgttctaaaaaaaactcaattcctgggtttctgttaggtccgtatctaacgtgttcgtcttatttgaaaaagttatgaaaaaaattaaaaagataagttatgcataaagtattattaatgttttatcatctaacaataatgaaaatactaatcataaaaaaagcattattaagtctttttaggacagagggagtaagtttgatgatgtcgattggcgaatccgctactgtttatttgccgctacacttcgtagtggcaggttcatttatactcggaataagatcactttgactccctcaactgaccaccgaatctaaatcgtatccctcaatcgcaatactagaaatctcgaccccctgaacttgcaaaaccggtgcaatttgactccctcaccggttttgggaggtggtttcgccgatgtagcgccatgtggcgcctatgtggtga

SEQ ID NO: 10325 - DNA, 2956 bp, Oryza sativa
  unsure (1)..(2956): unsure at all n locations
cgcatatcaattatatgcaatgatctagatcataaactatacaaggcggctctgataccactgttgggatacgcgtaggctatgatagcatagatcaaaattttctatcgcgtaaaccaggaaccatgaagtgttagatcatagatcgttaccactcgacgtgctgcgcagcggaagaagacactgagaagttgaaggaactctcgcgaagtagcgcgcgtcgatgtagaggaagtagtcgatcgcaccggctcgaccttctcctcctcgtgcgttctcctcgccgtactcccacgccgatcagcaccgcaaaccagcggcgcctctaccggtatccacacatacagggacggaacgccacgcgcagatgtgctagcacccgcgcgtggctagggtttttctcggggagggaagtgatggctagggtttctcacgtgatgcaatgtatccgccggtcacacccctcacgaatatataggatccatcactcgggcctccaaggcccgtaggactcctattcggatccctatccgaattaagctcatattggatctctatccaatccccttattccggcccattaagcatgcgacccttggaggttcatatatactcgggtgaaacccgaaaactcctttttgtccacgcgtaaacagcagccnctagcataacgtattgacccaccgggcatacataaaaatcatattttctgaacctctagtgtatacttgtatgaacccctttgcatcacgattatcgattaagctcaaggctagatatgtgccatcctctaatagctcaatcattcactcgaatctgttgatggattatataacttgtgattgactcctcattcacctttggcatggccatgcacttccataatctacaacattgaggggcccagagatatctctccataggaggggcaaatcccatcttgattattcatatcccactacatgtttcatagcatacccgaaaactacttttataactacccaattatggagtagcgtttagcagtccctaagtaagctactacacatgttgagaaccatgataatctcaggtctaaggattcaacatcaacactcaatgagatcactgatgacacaatacatatggctcttgcagtgtctcatgttgggtctatccaacaacatattcaccaacatgtgtccacattattaatttggtatctttataccatgatccatgagacatgatcatcaattaatacatgtgctgatcatataaacacatttgttccacatatgatatttgatttgggatcctttagaaatagtaacaaacaacataaagagtctcatgaaagaatcacatattcattaaccaataaggagttatctatttcaaggaacaatgtcggataaatatgtaaacatagtatgtgatacaatcatctctatgattgcaactagggcatatcactaacagtctcccacttgcactagagtcaatcatgaatgtatcttacgcccattgccctagtgtgtgcctgatgcttaggttgagggagtggctttgtcaacggatctgcaacattgaaatccgtatgtattttgcatatcttcacaactcctcttcccactatctcgcgaatgaggtgataccgccataaaatgttggacttttgatgcgatctaggctccttggcttgcgcaatagcaccactattatcgcaatagaggtccatagggctagaagcactagtcatcacacctagttgagaaacgaatttctttatccaaacagcctcctttgctgcttcagaagcggcaatgtattcggcttctgttatagaatcaaccactgtatcttgcttggaactcttccaactcacagcgcctccattcaggcagaacacaaatccagactgcgatctaaaatcatctttgtcggtttggaagcttgcgtcagtgtaaccttttacaacgagctcttcctgtcctccatagactaggaacatatccttagttcttctcaagtacttcaggatattctttacagctatccagtgactctcacctggatctgattggtatcggcttgttgcactaagtgcatatgaaacatctggatgtgtacatagcatagcatacataatggatccgattgccgaggcatatggaatcacactcatcttgtttcgctcatcagtcgtttgaggacactgattcttgccaagattaatgccatgtgacatcggtaagaaacctttcttagaatcttgcatattgaacctcttcaacaccttgtcaatatatgtactctggcttaatccaattagcctctttgatctatctctatagatccttatgcccagaatatatgctgcttcccctaagtccttcattgaaaaactatttttcaacgatgtcttaacggattcaagcataggaatatcattcccaatcaataatatgtcatctacatataggacaaggcttttcttcgtttttgacaaagcccacgccttgactacttcgtcaaaacgaatattccaactccgagatgcttgctttaacccataaatggatttttgcaatttgcatatctttttagctgattgtggatcaacaaatcccttgagttgtgtcatgtacacatcctcatcgatatttccattgacgaaagctgttttgacatccatttgccatatctcataatcgaaataggcagttatcgctaaaacaatctgaatagattttagcatggcgactagcgagaaagtttcatcataatcaacaccttgaatttgtctgaaacctttcgccaccaatcgtgccttgtagatgtgaacatttccatctacatctgtctttttcttaaagacccatttccactcaatggcttttacaccatcaggtggatcaaccaagttccaaacttgattgacatgcatggattctatttcggatttcatggctcc

SEQ ID NO: 10326 - DNA, 23126 bp, Oryza sativa
ttgggaaggattaatatttaaacatttaactgtctgactgtctgttttggataatctccataataaaatctaagaacgagacttctgcagacacaaaagaagaatctaagcacgccttatctgtagttaagcatgaaatttccaagcgatctggttaattgtcttcccaaatggttaattgatccttaatttacttcgtccgaaatcaacgaagtctcctgttcagctcggacgtcgtccgttgttgccgcgatcgctaattagcgcatacgcgctagttatttttggcacacatgtacacgtggagcgaactatcttactggcagtgtcgtcagaaacggaaaaaaaacgtgattagcacctaattagacccagatcagtaacatcattcattccgataattttccttctccgggtaattaaccgtatcacgttcacttgctctttttttttacttttcaaatatatttaagactttcaattaaaatttttaaaaactctatccaaaatttaaaactttggacacaaattcaaaaacattcaactcaaaatttaaaaacattcaactcaaatttcaaaaagtttcaactcaaattacgaaaactttcaaatcaaatttcaaaattttcaactcaattttgagatggaagttttaaaatctaggttgaaagtttcaaaatctttagtagaattattttcaagtctggatttgaaagtttcaaaatctgagttgaattttttaaaaaaatttaagttgaaagtattcaaatcttgacttgaatttcaaatctgagttaaaaatttaaaacaaattttcagttaatagttttcaaatccaagcaaagagtttttaaatctaacttgaaagttttcaaatataaatttaaactttaaaatatgtacttaaaaaaatgtcgaacctaggttgaaaagatttcaaatctcgatttagaaattttcaactatgtttgttttagtaaaaaaaaagaagaagagaagaaaaaacacgcgtagaaggaattgtttctggaaaaaaatgaaaagaaaaaacgaaagaggcacggaggttttttttttctgatacggaacgaaaaacggggaaaaaaatccatagctttcttccttccccccgtgctcgcgacttccgtaatcggtgtgtatgcgctaattagccagccgccagagatctcaactattaatgccgcccgagttgtagggataacagagggtgcaggctgcacagtcgatatttcaggtagtaaacgtcccaaaataactcaacctacgatttttatgatgggtttccagatttgttgttgatgggtcatatctcataggtaaatccatcctaaaaataaaatcgaaggttgagttattttgggacgaagagagtaatttagaagcggggtcggctagagttgggatgaagataagcttatttatgtcgtggaggagaggtgatgtcatcgcggcgccattctttctctgtggaagttgtgcatgcgtttactgacagcctgactgataatagttgttcaaattaatcaggattgttggatcttgaaccatcacggataaaatttatgaagaatgagaaggttttttgaaaaaaaaaaatatatatgtaatgtaacatcccggcctagggcttaataagattaatagaatacttatatcaacaagttgcaacttcttttcgggaagccaatctccaaagaactctagggttaagcgtgcttggcctggagcaatttgggatgggtggccgaccgagaaattctttccgggtgcacacgagtgaggacaaagtgttgcagaaaagacatgtgttggtctgtgagggcagtttatgacctatgaaagtctcctatcctacgacttatagaatatacgagtatggtatacctttacgtacacaggttgtttccgtatgcgttgtaggaatctgttacgaattatagaaaatatctctacgggccgggtgatttacaaagtcctacacggaggggatacagcttctattgtgttgtacgggatccgatgtctccaagtcttacttggagatcaagatgatccacggtataaaagggacccccgtggagggggtgcaaggcatcgaatctcatcgccaacacacctaccatagtttacgaagccgaagtatgcggagccaagtcgccgggagatctcgtcgaatatatcgactacgatctcgtcggtatcatcgaattcgtctacttccattgtattatgtggttttccataatcaatcccatgtaaactagattagggctattacccgataaggggcctgaaccagtataatccttgtcttttgtttgcttgatgtcgtattatgtagatcctcattccaactaccccaatacccaactcatccggtctacgagtatcactcgtcgacagtggcgagccaggtagggggccttggtgcccaaggttatgctagtatgacttcaagccatgccgacaacaatgtcaacactggtgtcaatcaagaagcttctatctcgacatcgctggtgtggactcaagtcggatctattgtctttctagtctacaccgttatgccaatctcaactggcccaaaattactatcgggaacgagaacggtgcggttacgacttcgagaaatgacatcttgccgacaattccttccacacaagtggagaacggaatatcgacgaccccaacacctagaaaaaatcctcaagcggccgaattctgtgccccgcatagaaactaagagccgacaaggatatccatcaagaagccgagatcttcgtgtcctatccataaggcatccaagcatactctagaggactacccagtgatactacacgtgaaggctgagttctacgcttgtagagaacatagaattcagcgcacttcaccaaccaatatcacctattgtccaatccataagtctagatctcacaatttcacgagctgaatcttccttaggacgatcaagtgccatgctcttagatccaacaaccacgagttcaacctcagtgtgttgccgaggaacgggacgcagcgacaacctcagatcggttcgtgggatttgtcgatgttgaccccgacgagtcacccgtgttgcatattttggaagaccaagagtcctctccgtcgatttcaccgcgagacgtcaacgtgatcaatacagctgagaccagcacgtccgcggcagctaggacgcctgctcaatagctacaagccctcaactcgatattgagagagccctttcgatcctgccctgaaccctgatgttgattagtaggcagtacgactataagagaccatggccaacctcaatagcgcatttgtagaggcagcaactgagcccccgctgcgagatccaccacgaggaaatagagaactagctaatgggaacgcagaagtataaatccctactggtgaacgttccccctatgctcaatcgccacgagcaacctgagatcccactccaccacctcgcgaaaatcacgatcttcgtgagcatctggacgaccgacggagagaacgtcgggatcagaacaacactgatcgccatcgacatcgttctccctcacgacgaagagagaacaccaattgacaccaacatcagcgtcattctccttcgcgacgaggagagaacaacgatcgaggaggacgctcgaacgaagatcgagactagcaagcccgcaacgaccatcatgacaatggcaataacgttcgtcgtgacggtggcgacaacaatcagttagatcagggagccgacggtcgagctcagggtggcaatggttgagatcaggggcgaggcagtgatgatagacgaggacgtaatcctcgattcccaggatcggaacgggaccgacgatgcgagcatcgttctagaagtcgagctcctgacccaagcaacccctgctcatcatcctcgccatcctcttcatcaggcagacctccttgatgacaccacgggcgcgaacaacccttcgctctaggtggcgggtgtagagcgtccacccctacattgcgagacgtgcggcggcccaaggagttccgaccaggagcaatcgagaagtacggtggaagcacggaccccgaagaatttcttcaggtctaccccacgatcctgtacactgctggtgcagatgacaacgcgttggcaaattacttaccagccacgttgaaaggatctgctcgttcatggctggttcatcttccgccccactcaatctcctcatgggaagacttgttgatgagagatgttttgtcccgatcttccgataggtactgataaatagtcgatataggcggagtcgcgacacaactcgatccggcttctgaatgtacacgctactaagccccgcaattgcagcaccatgtctcctctagttatcaaccgtgccgaaacccggttgacctcaccaagaaggctaatccctgcatgtgaatcgaagaacacaagtaataacaagatagattgcaacacaattgcatatgaatgattaagcactcgaacttagggttccacaaaccgatctagcggtgaaactgttcttgacagattaatctaagcaacacccaaatctaaacgatgacggatgctgaataaatatgattaaggatgtcctagggttgccgtagggcgcacacccccttgggctaaggccacgacacaattacaaggcccaaaacacaaatcagattcggactggatgagatacgttgcttgttttgcagattcccggcagctcggttggaattttgacgtgggaccaaaaccatctgaaagtagactccatatgctttccaacaagtctaatgggccccaaaattccttctcgatcagtggctaggtccgtttgaagttggtgctgtcaaaaggcccgaatccgaatccaaaacgtgtagaactttatctcttatcttctatatatggaccaaaagtgacatggtgagatgtaagtggacttggagaagatcttggtttggtccccaatcaacttttttaatcatccatatattccttacgcttggtcccttttctttcgcccaagcaagtacctctgcaaacgaaaacacacgaaactcattgtgtagcaatgttgttcaaatatataacaaataaatctaatagagaatatatgcacctttggttgattaatacataaggtagtcatggttatatctgagctagttgtgtcctcatcacttgtggcagcaattcatcaccaatttccaagggacatacaagcgtcacgcaatcgaggacgacctgcacgctctaactcagaacccaggtgaatcattgagggactatatccggtgtttcaatgagtacaggaatacgatccccgaaatcaccgatgcttctgttatccacgcattcaagtcgagcgtctgagatcgttacatcacctaggaactggcgacacgatggattatgtctgctcgcaagctgtttgaaattatcgacagatgcgctcatgcagacgatgcctttagacgaaaagaatgaaagagcaagacaggcgaaaagaagaagccagccaataaagacgcactggaatcaagcaagaggagaagtcataagagtgggaagcgcaaatcttcgggagaggttctcgctactgatcaaacagacccacccaagcgtccaaacccccaaaacgatgactcacgaaaacaatgttgccctatacacaaaatgaacgaccactccttggaggattgtcacgtcttcaagaaggagcttgcgcgacatataggaatcgagaaggggaagcgagtatgcggttgtcgaagcgaataccgaagcagccactcctgacttcgactccacattcccggactatgacctcgacgtcacacacatcttcggcggttcttgtcacgaccggaattaacccaacgggcgttcctttcgtgcgtgtattattccttgtcccaggaggcaaggtacaccaagagttgatacaattcagagtttaacaagcggaagcgtaaatagataatttattacatgggcgacgaaggcccagcacacacaaagacaaacgagaaacagcggaagactagggcgacgaccacaggcacttgacggcaggcacgagctagacaccaaagccttcatcatccaggggctcctcttctgtgttgggaaaaaattgagcaagactgagtacaaccaccgtactcaacaagacacacccacaagtgcataataaatgcaagggagtacaagggagttataatataaagggttagggttgcagtaaacagcatttaaagatgcttagttgctcaaagctattttgtaaacacgattctagaactatgcaatattatttatcaaggccgtgaacccacacaaacctgccttaacccaaggcctacgatgattcagaccgaaccggcaacccgaccctgggtcccagctcgtcctaagccaacccaggccaaccattccacattttagttgttaagcaggttttaagaattaaaacactaacttgggtacattgctcggcttgcccataaccgagggcgcggctattcgaatagattatactctgatcagaggtgtacatctttacctacaagacacatcttcctcacgtgcaaccacgtgccacataccaccacggtatacagacggaagacgtgacatagtttccaacctatcctagccatagacaagagtaccgacccaattccacctacggccggaacccccgggacaggcaggcaggactgagcccctagcagcaggacaccggccctgtgccacgacatctcgactaccgggccgcagctcgtgtagccttcatttgccctggagatgtccatcgacccccgacttcgtccatctccatccgtgtacttttgtttataaccagactgagccacaaactaagccttacccactagacatgtggaagtacggtagtgctttgcaacagaggcccgaagaccggtccttatatggccgaggtgctactatcaaaaccatgcaccccgagcccagcctaaaaccattttggggattttgaatagagggggcggtgtgaatccaattccacaatactccaacaattccaaagtgtccaggtgatatgaatatcccaaagtctagagttgtaaaaccgcctaatgttacctaattaaatagcgaagcatccacctaacatcatactagaggtaccatgagtagagtgtccactagttggggttttgtttaatctagggtgaacaaggaaataataacaataacaataataaggtcataacaaaggtaaataggcatggctaaataaaacagtgataacgcgggaatttaaataaagcgataatgcaataatttaaatcaacataattttataaactgggattcaatatgttcaaagatgatgtgacttgccttgctcgctttcccaaacgtcggcttcaacctccacgaagagcggatcttccgaagctgcagcgtctacacgaccaacggaaaagaaaaggcttttactctaataaactccatataacaagcagaaacaaagcacaaaaatgggttcttgacttcttaaggaaaaattagagacttgaacggtccaattccgagttcaaatggccaagttatggccatttgaaggttatatgctctttaaatgaatatttgcgaatttcttcatttaaattttaatttaaaatttggatttattgcgtcagccgaggggaggggcgcgcggaccgggtccacgggagtggggcccacgcggcagcctcacggtccacggtggaccgggtgcacccggctcacaccggccggcgccgtgggtcccacgcgtcagccgcacccgagggcgcgggcggctgacggccgggccccacatggcagccgcggggcgcgcccgaaggcggccacgccggcacagccgacgggaggcggcgcacccgcgccccgatggtcgccgccggcgaccaccggcgcggcggagcggcgcccgagagaggggagggaagggggaaacgaatcggcggtccacagctcaccccgggtcgacggcgacgacgggaacggcgaccggagcggaggaaggcggcggcgcggctcgggtagacggggacggcggcgttccggcggtcggcgggcgaaacggaggggtggacgaggtcggcaaggttgcggcgaaaccaaaggaggcggcgccgaagcgggagaaggtccggggcgacgacggcggcggactggagctcggcggtgacggcggagagagagagcgacggcgcgagctcgattccggcggagagagagagcggcgagtggcggaaacggtggagggaggcacggggagtgtttatatagggttgggagtgagagagggcggccggatgagggggaaacgggcgcggaagatccggccgccattgatgcgccggcgaggtttagggggaaagattccgaacgaatccgagggagagagggagggaaaaaatggggggaaagagggagggaatcacggggaatatttcccccctcttgattgcacgcggggcggacgggagcggcgggatttgcggcggcggcggcgctagggcacgggcgaggcggcgggagcggcgggaggaaggggatgacgggtgggccccacccgtcagcgagggtggcgggcgggcccgcccgtcagcggcgcgcgcgcgggaaggaggccgaatgggccgcggggaggaggagagagagggaaggagatgggccgagccggctcaagagggggagggggggaaagactttttaggatttttctttttataaaatcattttaactttgtttatttcttaataattattatttgtgctctgaaaattccactaaaatttatttacgcattttaggcttttaggaaatatacaaaaatcctccaagccttatttgacttttaactttgcacattttaattgtgggaggctttcacaaggattttaattattctaggcataatttcgaggatgtattttagagtcattttgggacgcgacaaacctaccccccttaaacggaatctcgaccccgagattcggaagaactgatgaagagatcgggatgggctgccttcagctcgtcttcacgctcccaagtagcttcttcctcggcgtggttgctccattggaccttgcaaaaacggattacccggttcctggtccttcgctccatggtgtccaggattttcactggcctctccacgtaggtcaagtcttcgcgaacttcaatttgctctgagtcggcctgctgggatggcactcgaagacatttcttgagttgcgacacatggaacacatcatgcacgttgcccaaggaggcgggcagctccaactggtaagcgacttctccgcgccgagcaatcatacggaaaggacccacaaaccgaggtgcgagcttcccctttgtctgaaacctgtgtacacctcgcaagggcgtgacccgaagatacacaaagtcatccactgcgaattccaggtcacggcgtcggttgtctgcataactcttctgccgagactgggccacctttagattatcccgaatggttctgactttagcttcagcttctctcaggatatcggtcccgaacacttggctttccccaacttggtcccacaatagcggtgtccggcatttacgcccatacaacgcttcataaggtgccatttgtatgctggcttggtagctgttattgtaggagaactcggcataggggagactcttatcccaggtcttcccgaaatctaggacacatgcgcgaagcatatcttctaggatctgatttagacgctcggtctgtccatctgtctgcgggtgatacgcggtgctgaaatttaatcgggtacccagctcttcttggagcttcttccaaaagtgagaggtgaattagcttcccctatcggatacaattttcttaggaacgccatggagactcacgatcctagcgaagtagagctcggctagtttgttccctccataggtggtcttcacaggaataaatcgagctaccttggttaatcgatccacaactacccatatagaatcatatccaccttgggtttttggaagtccggtgatgaaatccatcccaatttcatcccatttccattctggtacttggagaggttggagaagtccggccggtcgttggtgctctgccttgacacgctggcacacatcacaaagggccacgaactctgcaatttcccgcttcatactaacccaccagtatttctccttcaagtctaagtacatcttcgtactgccagggtggatggaataaggactttcgtgagcttcctgaagtatcagctgtttaagttctctgttatctggaacgcatacccgatttccgttccatagggttccgtgttcatcctctgtgaaaccagcggctttaccttgtttcatattcttgaggagtccatgcatgtccggatcgttcttctgagcctcgcggatttgatcgagcaaggtgggcttggcttccaacgcagccaagaatccgcgacccactatgcttagattcagggcttccatctgttgattaagttcgggtggaatgccacggacgttaagagtgttgcaatggctttttcgactttgagcatcggcgaccacgttggccttaccaggatgatagtgaattcccacatcataatccttgatgagttctaaccatctcctctgccgaagattcagatccgactgggtgaagatgtatttcaaactcttatgatcagtatatatttcacagcgattcccaatgagatagtgccgccagatttttagagcatgaaccaccgcggctaactccaaatcatgggtagggtagttgccttcatgaggctgtagctggcgtgaggcataggccaccacatgaccgtcctgcatgagcacgcaccccaatccttggcgcgaagcgtcacaatacaccatgaagtccttgcgagtatccggcaagattaacactggcgaggaaaccagcttttctttgagagttttgaacgccttctcgcattgcggactccacacaaatttctcctctttcttcaacaactgtgtcatgggtcgagcgattttggagaagttctcgatgaacctccggtagtatcctgccaaacctaagaaactgcgaatttgagtgactgtcttgggttgcttccaatcggtgacggcggtcactgtttcgggatccacagcaactcctttagcggatatcacgtgccctaagaatttgacttcggacaaccagaactcatacttgctaagtttggcatacaattgatgtttccgcaactttcccaacaccagacggagatggtgctgatggtcttcctctgattgtgagtataccagaatgtcatcaatgaaaaccacaacaaacttatccaagtatttcatgaacactttgttcattaagttcatgaagaaggcaggagcattggttaaaccgaacgacatcaccgtgaattcatacagtccgtatcgcgtggtgaatgcggtcttcggaatatcttcttcacggatgcgcaactggtgatatccagaacgaagatcaatcttggagaataccgtggcacctttaagctgatcgaacagatcatcgatccggggaagagggtacttgtttttgatggtgacttcattgagagctctgtagtcaacgcacatcctcttcgtcttgtctttcttctccacaaaaatcacaggagcaccccagggggaagtactcggacgtatataccccttttctttcaactcttccaactgtttcttaacttcggccagttcatttgctgccatacggtagggtcgcttgtacagaggagtggttcctggagcaagatctatccggaactcaatctctcgcttgggcggcataccgggtagttcttccggaaacacgtctccgaactctctgacaatggggatttctgacagtcctatctgatgaagttctgaactactgacagaggttgggggtgcaaagaaaacaaccggttgtttcggccctcggtacagagtgacagtgcgtcttgcacaatccactactccttggaattgagccaaccaattcatcccaaggatcacatccaagttcttggtgtctagaagaatcagatccgagggaaaaggaatcccctgaatttctatagggacggcaggactataatactttgctgtcataacccctccaggggtggtgatgagtagagggttcctaagcctttctacccccaactgatttctccccacgaatggcacagatataaacgagtgggaagctccagagtcgaacaaaatggtagcagggatggaatggatgaggaacgtaccaacgatgacgtctggaggcgcttggccttgctggcgcctcgacttcgggcatttatccgcaaagtgcccgggctcgaagcagttgaagcacagacgctgcggaccttgaacgtccctgcggccttgaccagactgcgcggctggcgtaggaggacggggcgcatgggtcccttgctggctctgctgttgctgcggctgtgggacgcgcaccacgaattgaggtcgaggcgcggagcgaggttgctgctgctgcgaggaagatccccctggatagggattggtgtagcggatcctttggttagcaccctgttggttgcggaaattcgccaagcgacgcttgtgcgactcaagttccttgtgcttggcttccaagcggatgctcttgtccaccagacgttggaaatccggatagtcaccggagactagacggacagacagctccgggtccattcctgccaagaacttctcttgcttctcctcatcttcccgcacatcctccggggcgtaccgggccaagttgttaaactcatgcaaatactccatcacggagcggttgccttgcttcaactctcggaactcccttttcttaagggccatgactccggcgggcacatgggtcctccggaaggcggcggtgaagcgggcccaagtaataggctgcccctctggctgcgtagcctggaaatgatcccaccatagagatgcgggtccctgcagttggtgggcggcgaagacgactttctcctcatcgctgcactgcacagtgtctagctttttccccacggcatgcaaccaatccaacacatccacggggttgttggagctagagaaggtaggtggacggatgcgtaggaactcggcgagtttagagtgttgtgggggtggtggtggagcattatgttgtggcggattttggatgtggtggaggaaagcagccatcatgttggcctgctaggcgaggatttgggtgagaatggcgttggtgtctggtggtggtggtggaggcggtggaggaggtggaggtaggctgccatggttgttgtggttgctgccttcaggttggttgccatcactggtggcagcatttctcctggtcgtcaccatctgaaaaccccacatagaaccagcaaacagagagagctgacaattaaagctaaccatccacgactaccataactcttgaatttattactgctattaaattggttcattaaagttcaagttgcttaagcaaataaaataaagacaggctccgacacagttatgccacacaccggcataaccatgccccacaagatcccaacaagaagacaaacgagaaagaacacacgcgcaagcctactaactgctcgtctaccgctgcgacgggccaggacggaaggtgagcaacagcgcatcctccgtgctaccgacgccggaggcttccccctcctgaggaaccacgggcgcgggctcggcacgaggggtctccacgaagcaagtccacgccagggactgacgaacaagctcgggcctggaggtgctctttcgggcggtgatcttctggctgcggcagacgcggcgacgcttggggtgacagacctctccctgggcgatcttgagctgatgcagctgtgcctccactgcgtctaggtccttcttcagctgcagattctcctgacgcagctctaggatcttcaggttgttctcgaccatcccacggcgcaccatctgatggaagtcgatacgagccgcgtcgtacgcctccaccatgcgcgccaggtgcatgatggtagcgtcatcctccgagctagcatcccggaaggtggcgtagtcgcgggctcctccgcgacgagggtggtagcggtagggcgagtgctgcagctcgtccgggtagcgctggtgaagagtgctgatggcgaggagagcggcgctctggcaagcggcggagaaagaatctccacccgcggtgactgccaacgaagtccgctcgggtgagccagtgaggatcactgcagtaacctcccaagcagcgtgggctctgcatcgtcaccctcctgctccgggagcggcctgccctggtagtccagtccatgcggataccccaggacaacgcacataccccgcagctccaagacgaaaccagtcatgtccagaccacgacgactgacgctgccggccatctacaaacaaaaacaaaaagaaaagcaacatttaaaagtcagattttggcgataaatgaagcagcaggacagagagagactagagagttttcacaaatagcaaaggatttttatttttgataatattgctaaggcttgggatctacggctcatcctagggtcaagggggctctgataccaacttgtcacgaccggaattaacccaacgggcgttcctttcgtgcgtgtattattccttgtcccaggaggcaaggtacaccaagagttgatacaattcagagtttaacaagcggaagcgtaaatagataatttattacatgggcgacgaaggcccagcacacacaaagacaaacgagaaacagcgtaagactagggcgacgaccacaggcgcttgacggcaggcacgagctagacaccaaagccttcatcatccaggggctcctcttctgggttgggaaatgtcgcgaccgagaaacttgcattttcccgaacgctagtgtattaatccctgtcccaggaaaagccggggtacaccatacaaacatgatataaaagacacatctttattatatcgataatatttacattattacaaaggcacttaaggcctgacaatcaaaaataaacagcagcggactagcggtcctacggcttcatcttcacaggcgctcaactggggtgtaagccaagactccacctaagacttcttctccaaagcttctcttactgaaggggggagaaagatagagcaagaatgagtacaaccacagtactcagcaagccacaccggcggatgcacgattaatgcaagggggtacaaggggtaatgatataggggttaagttttgcagaaaacagcatttaaaagtcacttagttgcccaaagccattttaaaaagacgatcctagagctacacagtattatcaatcaaggtcgtgaacctgcacgaacctgccttaacccaaggcctacgatgattcagaccgaactggcaacccgaccctgggtcccagctcgtcccaagccaacccaggccaaccattccacattttcgttgttgagcaaattttaagaattaaaacactaacttgggtacattgcttggcttgcccataaccgagggcgcggctattcgaatagattatactctgatcagaggtgtacatctttacccacaagacacatcttcctcacgtgtaaccacgtgccacataccaccacggtatacggacggaagacgtgacatagttcccaacccatcctagccatagacaagagtaccgacccaatcccacctacggccggaacctccgggacaggtaggcaggattgagcccctagcagcaggacaccagccctgtgccatgacatctcgactaccgggccgcagctcgtgtagccttcatttgtcctagagatgtccatcaacccccgacttcgtccatctccatccgtgtacttttgtttataaccagactgagccacaaactaagccttacccactagacatgtggaagtacggtagtgctttgcaacagaggcccgaagaccggtccttatatggccgaggtgctactatcaaaaccatgcaccccgagcccagcctaaaaccattttggggattttgaatacagggggcggcgtgaatccaattccacaataaaccaacaattccaaagtgtccaggtgttatgaatatcccaaagtctagagttgtaaaaccgcctaatgttacctaattaatcagcgaagcatctacctaaaattatactagtggtactatgagtagagtgtccactagttggggttttgtttaatctagggtgaacaaggtaaaaataacaataacaataataataaggtcagaacaaaggtagataggcatggctagataaaacagtgataacgcgggaatttaaataaagcgataatgcaataatttaaagcaacataattttataaactgggattcaatatgttcaaggatgatgtgacttgccttgctcgctttcccaaacgccggcttcaacttccacgaagagcggatcctccgaagctgcagcgtctacacgaccaacggaaaagaaaaggcttttactctaataaactccatataacaagcagaaacaaagcacaaaaatgggttcttgacttcttagggaaaaattagagacttgaacggtccaattccgagttcaaatggccaagttacggccatttgaagtttatatgctctttaaatgaatatttgcgaatttcttcattcaaattttaatttaaaatggatttattgcgtcagccgaggggagcggcgcgcggaccgagtccacgggggtggggcccacgcggcagccccacggtccacggtggaccgggcgcacccgggctcacaccggccggcgccgtgggtcccacgcgtcagccgcacccgagggcgcgggcggctgatagccgggccccacgcggtagccgcacggtgcgcccgaaggcggccacgccggcgcagcggcgggaggcggcacgcccgcgcccctatggtcgccggcggcggccataggcacggcggagcggcggccgagagaggggaagggaagggggaaaagaagcggcggtccacgactcaccccgggtcgacggcaacgacggaaacggcgaccggtgcggaggaaggcggtggcgcggctcgggtggatggggtcgacggtgctccggcggtcggcgagcgaaacggaggggtggacaaggtcgccggggatgcggcgaagccgaaggaggcggcgccgaggggagaggtggtccggggcgacaacggcggcggaccggagctcggcggcgacgacggagagagagggcgacggcgcgagctcgattccggcggggagagagagcggcgagtggcgaaaacggtggagggaggcacggggagggtttatatagggtcgggagggggacagagcggccggacgagggggaaacggcgcggaagatccggccgccattgatggcgccggcgaggttaggggagaggtttccaaacgaatccgagggagagagggagggaaaaatggggggaaagagagagggaatcacggggaataattcccccctattgattgcacgcggggacgacgggatgcggcggattcggcgacggcggcggcgctagggcgcgggcgaggcggcgggagcggcgggaggacagggatgacaggtgggccccacccgtcagcgagggtggcgggcgggcccgcccgtcagcggcgcgcgcgcggagagagggccgaatgggccgcggggaagaggagagagagggggagggatgggccgagccggtccaagagggggaggagggggaaaaaggactttttagagcttttcgttttataaaatcattttaactttgtttatttcttaataattattatttgtgctctgaaaattccactaaaatttgagggctctttttagaccaaggagaatttaacaaaaattctccgggccacctttgaatttttcttgtacgtattttagtgtttgccaatttcttttcgaattttaattaattatattattccttttagaaaatgatttttatttcgggatgaatttatcaggacgtgacaaatccaccccccttacaagaatctcgtccccgagattcgaggaggctagcaagaagataggttgggcagtcttctcttcttgtttgacttcttccgctccgtcttcacaaactttcagcaaaacttcaccactcggaactgcttggcttgaccttctgttgcggatggaatcttctcttcacctgacttgaaccagggtgcaccttttagctgactcagactaggttgcggtagtttaatgatgcttccgttccagaacttctcatgattcatatcttcggagtcaacctcatacaagttaccacttcatgtcatgcgtcaacactagcttgtcattactaggataccatgtttgtcatcataagaatatcatgcttgtcatttacttctaacctgccaccaactgcctcatattagctttcctggtctccgggtgatagctacttctgctatttgatgcaagggtcgataactttgcctttgaattatgcttcccaagagaaccaacttatcccacttgacatactttgacgtcttcccaaatggctttactgctggatttgttattgtctaatcattatcctgccaaatctgaggcttcgttgttagatgtgattttaatctgacctctgtagattatcttcgaacatatcacttgattcataactgggaatagctctcacgaacaagcaactcggattcactttctttatgttcagtttactttccactattctcttcatgttgtcatcatttagcattcaacgtattcctttacaccttcagccttgatgtgttctttctcgatggatcgattgctaggaaagtgcgttgaacgatactagtgcaagtgcttttattctagtagcatctgatacaaagcccaaggttgaaccgagctttagattccactgttccggttttacttcttgacttcttggtcatgtcacaaaagtttccatccttgtccccatagaagtacttctacctgtggtcatctctcttactcgtgaattcacctactttaatgacagggcaactgttgtagggttgattgctatcgggagtcttcctcgagtgacacaaatcatggttctcgttatcctttatcaatcacctttcgtcctacttcttttcccagtaaccaaacatcttttccgatctcttccattaatcacctttcgacctttctcaaccaggtactcttcgctccgggtgttgaggatgcttctggggcaatgaggtccttgggcgtgctgtctttcagagaaaccttgaagtagttcgtcaaaagctagactgacgattgttgcctttgatccaaagaagacacatctgaaacacttagtccaaacatatgtctctttggttaatcacttgattttcttttccatcatcaggttggttattaactcaaggttcgaacatagttcctctgaaatgagaccctaggtctcctttatcagcaagcaattatacacataatcacatatccgcatcttccaaaagaatcctcatagaacttgtctgtattacacatttctccctcattacatgaatactaagcactgcctaaaaggaaaggtgcttagcatcggtacattgtttctgctatgggttctgattaacacgaggcctcacgggtacggcgtttgctccagtgaccacaatacgattgggatgtctgcttcgtgtaaattggcggtaatgtggaggtcgactttgccttgattgcaggcagtccctcgagtaatgccctggttctttgcaattgtagcaaatcaacgtcttctttgctgagctatccatctggggacgatcattctgacttggagttggaattggtggttggaaatccttgctaacattggcatcagtggtaccatagttgctatcaccattggagtctttctcagagtcacaattgctagggttgtcattttgggtgccatcattgatactatcgtcgacaccttggtgaatgatgttgacattgcacgcttgatttgagtggtcactaatggggcaagaagcatggttggtgggggtatcatcatcattagtattgctaatgtggttgtctgcattgtgtccatcttcttggggcggaaactcttgatgcgcaacagaagatccggtgatctgaagtggctccgtgcgctgtctttggttaccactgggaatactgggatgctgacaatccttctcttacagttcttcatccgattatgctcactttcgagttgtatggctttgtccacaagtttctcaaaatcttcatattcctctaggagtagttgcactgcgatctcatcttttaacccctggagatacttctcttgtttgtcttcatcattttccacatcttctggtgcatagtgagccaaacgatggaactcgtgcaggtactctgtgacggtcaaatcttcttgcttcaggtagcggaactctcgttttctcagtgtgatcattcctgcgggaacatgggatctcttgaatacagatgaaaactcgtcccaggtgatggtatgtccttctggccgtgatgcttcgtagctatcccaccattctgaagccagtccaaccaactgatgagttgcgaagacaacccgctcctggtctgtgcactgaatcaaccccagcttcttctcgactgtgcgcaaccaatcactggcttccataggttcgacgacaatggcaaaggttggagtctcagttttgagaaattctgataacttgcactgttgctggactgtaggtacttgaacgttggttgcccctgctgggtagttccaattctgtaatagttgaaaggctgttgccaacatgttggtttggttaaccacaatttggattagctctggtgaggtttcgttgatgcttttctcattcccattggcttgggttcttcatcttgtacttgatttcttggctactgtgctggaacatccaaaggtacaatgccgatactggcctctgtcttgtcaactggtggctggggctgaaattgagcattgacaccttgtggtaatgcactcgctggagttggagctgttgcaacgcgggctataggactgcttcgggatgcatggatgacaattcgctgaggagcaagcttctgattgcagggagttgcgtggactgacgtgctggcagctatgtctctcggttttgggcacttgtcggcgaaatgacccattccttgacaattgaagcaacagatatcttcccggactcggcattttcttttctcattttgattcctctgtcctggcactggagttaggctgaaactgtaatcttggcgaggatttgtgttgccttgatgcttctctccgttggaactggcgggttggttggccatcttcttcgtcagcagcaaactgaattgacaatcttttggtacatgatcagttccttcacaaaagaaacaagtgatcctgctcgttggacacctgtcgggtggatggtcttcctcacaatgaacgcatgtagtggcacacgagctggcaacatgaccgatttctccacaacgagagcatgccttacgttccattttattctggttgaaaccttggggagacttctcatcttcatcatctgaggagacttgatctgaatcttcactatcagacactctacctccattagctaaaagatgctctgtcaactgtggtgcacctcggaaggtatttcttctctgacgttttgtcattcctggtggaggccattctgtgctggtaatgatcatcttacggacttcatctttggttcgcattggtgtttttcttttctgctgaggacactcccttgcatagtgcccttgctcatcacacataaaacaaatgatacttgcttcttttgagtcaacatgtggcacgtcaccatgggtccttcgggatgctggcggcatgctgactcgtggtgtgagtgcttggactgcctccaactgcacttgaggttgtatctgactcaggttcagaattggcgtctgatgctgctgtagtatctctataagcaatcggttatggttaatcaggtgttggaccagtgtcacacaactggtgtctggtgcttcattcactcgggagcttgaggtaccgatgtcctgacttctgaccttattgcctttctcattgtcagccatctgttgcaaaggtttggagagggagagaggaaaacaaaggggagagacagattagaaactaaggataggaccttaacagatctaagtcttttgctgttatgatgtatgttaggcttattctgcaagttgattaagcaaacaacttagcatggttacatcacaacccactgatgcaaaccacgcgctacacacacaagcaaggaaacacacgacaaacgaaacactagagggtggcttaggttctgcgacgggttctccaagatcttcactcctgcttcacagctggcttcactgcttccttcacttcactagcggatcctgcagccttctggagcttcggcagacaattgacgacatcttcttcttcacaaagctgaccaactagtactaattgaaatccgaagaaggaagaagggagtaaacattttgcaaatagcattaggggaaggagaaaaaaaggaactttcgcaaatagttttatttataaaatatgtccttaggttttatccacttggcttatcctacagtcgagatggctctgataccatcttgtcgcgaccgagaaaattgcattttcccgaacgctagtgtattaatccccgtcctagaaaaagccagggtacaccatacaaacatgatataaaagacacatctttattatatcgataatatttacattattacaaaggcacttaaggcctgacaatcaaaaataaacagcagcagactagcgggcctacggctccatcttcacaggcgctcaactggggtgtaagccaagactccacctaagacttcttcttcaaagcttctctt

SEQ ID NO: 10327 - DNA, 20997 bp, Oryza sativa
cctcgccggcgcatcaatggcggccggatcttccgctcccgttcccccctcatcggccgccctctctcactcccaaccctatataaacactccccgtgcctccctccaccgtttccgccactcgccgctctctctctccgccggaatcgagctcgcgccgtcgctctctctctccgccgtcaccgccgagctccagtccgccgccgtcgtcgccccggaccttctcccgcttcggcgccgcctcctttggtttcgccgcaaccttgccgacctcgtccacccctccgtttcgcccgccgaccgccggaacgccgccgtccccgtctacccgagccgcgccgccgccttcctccgctccggtcgccgttcccgtcgtcgccgtcgacccggggtgagctgtggaccgccgattcgtttcccccttccctcccctctctcgggcgccgctccgccgcgccggtggtcgccggcggcgaccatcggggcgcgggtgcgccgcctcccgtcggctgtgccggcgtggccgccttcgggcgcgccccgcggctgccatgtggggcccggccgtcagccgcccgcgccctcgggtgcggctgacgcgtgggacccacggcgccggccggtgtgagccgggtgcacccggtccaccgtggaccgtgaggctgccgcgtgggccctactcccgtggacccggtccgcgcgcccctcccctcggctgacgcaataaatccaaattttaaattaaaatttaaatgaagaaattcgcaaatattcatttaaagagcatataaccttcaaatggccataacttggccatttgaactcggaattggaccgttcaagtctctaatttttccttaagaagtcaagaacccatttttgtgctttgtttctgcttgttatatggagtttattagagtaaaagccttttcttttccgttggtcatgtagacgctgcagcttcggaagatctgctcttcgtggaggttgaactcggaatatgttcacatcatctttgaacatattgaatcccggtttataaaattatgttgatttaaattattgcattatcgctttatttaaattcccgcgttatcactgttttatttagccatgcctatttacctttgttatgaccttattattgttattgttattatttccttgttcaccctagattaaacaaaaccccaactagtggacactctactcatggtacctctagtatgatgttaggtagatgcttcgctatttaattaggtaacattaggcggttttacaactctagactttgggatattcatatcacctggacactttggaattgttggagtattgtggaattggattcacaccgccccctctattcaaaatccccaaaatggttttaggctgggctcggggtgcatggttttgatagtagcacctcggccatataaggaccggtcttcgggcctctgttgcaaagcactaccgtacttccacatgtctagtgggtaaggcttagtttgtggctcagtctggttataaacaaaagtacacggatggagatggacgaagtcgggggtcgatggacatctccagggcaaatgaaggctacacgagctgcggcccggtagtcgagatgtcgtggcacagggccggtgtcctgctgctaggggctcagtcctgcctgcctgtcccgggggttccggccgtaggtgggattgggtcggtactcttgtctatggctaggatgggttggaaactatgtcacgtctttcgtctgtataccgtggtggtatgtggcacgtggttgtacgtgaggaagatgtgtcttgtgggtaaagatgtacacctctgatcagagtataatctattcgaatagccgcgccctcggttatgggcaagccgagcaatgtacccaagttagtgttttaattcttaaaacctgcttaacaactaaaatgtggaatggttggcctgggatggcttgggacgagctgggacccagggtcgggttgccggttcggtctgaatcatcgtaggccttgggttaaggcagattcgtgtgggttcacggccttgataaataatattgcatagttctagaatcgtgtttacaaaatagctttgagcaactaagcatctttaaatgctgtttactgcaaccctaaccctttatattataactcccttgtactcccttgcatttattatgcacttgtgggtgtgtcttgttgagtacggtggttgtactcagtcttgctcaattttttcccaacccagaagaggagcccctagatgatgaaggctttggtgtctagctcgtgcctgccgtcaagcgcctgtggtcgtcgccctagtcttccgttgtttctcgtttgtctttgtgtgtgctgggccttcgtcgcccatgtaataaattatctatttacgcttccgcttgttaaactctgaattgtatcaactcttggtgtaccttgcctcctgggacaaggaataatacacgcacgaaaggaacgcccgttgggttaattccggtcgtgacatgtgaagaccatatttgtgtcatttttttatgtcaattgaatatgacaattaagaaaaaagtgtaatgctttgaacagatgcttgaagtgtaagttgtgtttgtacagattgaaattggtttttgctgcttgaaatgtcatggtctgtacagttttagactgatatgcagtatgtcacttggaacaaatatatatgtacatcactttgcatactgtttcaccaggaaacttactggattacccaaaaaacagaagtaaaatattttctcttctcctgaaatttttgacccaactgcttcacatattgttaggaatatgagttagcaccatgaacctgggaaagaaatcaaataaatgcaaatcattgctggtaacaactctgttcttaaaattgctagctcagaatctcgatgtgtttcagatatacaatggcaaatgagttcacagaataaatcagttgtgacatctcagttacataacacaaaataaatgagtttatagctcatcccaattacatatgacatatcagatagatgacacaactcaagatataatttaatcatcatcggtgtcttccggcatgtcatcttcagcgttcccattgccaatgtcactacagtactgcaatattgtgtcatcttcatctgcatcatccctactgtcttcagtcaagttagcttggttgttaaggtcttctaaattagcttcaataatagtaacttctccatcttcctgcaaatggtctagatcctcatcagcattaccttcatgcacttcatgttctgtatcagaacaattatcatcttggtgtacatcaaaaatgtggtcatctttttcagacacattatacatgttcctatgttcgaatttctgcacaattcgccattcgttgcccaaagaggtgtcctgcaagtaaaatatcttcttcgattgagttgctaaaatgaaagggtcatccttgtaccaaaatgattggatgttgatggatttgaaatgcccgtcatccctaactcctcttgtcttgccaacttgattgaaccaatcacaacggaaaagaaccaccgatcgatagatatctagatcagagttatactgcaactcaagaatctccctaaggacaccataaaattcaatgttatccccttcatgtgtaccatcaaccattacaccactattctgcgtttggaggtatttctcacggtcaacagtgctatacctgactccgttgacaatgcaagatgcacaactctttactcggagatcaggaccacatgacaatgcaaatagtgcttcactgaccacccctggattttctttcctcagcttcctgatctgatatatatatatatatatatatatatatatatatatatatatatatatatatatatatatatatacaagaaaaatacacatgttattcccaatttgaaatttcatcaccaaaaaatgatatttttgtaagtgtgtgtcacttacatgagtcttaaaccacctagcaaatcctttttcaagtcttctgtcaacatcatgtgcatcttctttctccaactcttctctatgcatgctgtagcatattatgactcaacaattaggaaaatattatatttaatacaatacatgtgaaataaacctacataaatggtgcttactccaaatatggttgaacctcctcacagttatttagcacataccaaactagcttatccatgatttcatcctccatgtactgtatcctagtggatcctatgagtttaacatcatgcataaaaacagagctgttaccatccaatggcccatccccatgacgggcgtcccgattaaatctagtgtcaacatcctccatgtaccttgaacaaaatgtcaaggtgtcacttgctacataggcctcagcaattgatccttcaggcctagccctgttccgcatggaattcttaaaggtgccaagtcatctttctattgggtacatccatccatattgtacaggacctctaagtagtgcctcatcaggtagatgtacggccaagtgcaccatcacgtcaaagaaggctagaggaaaaattttctcaagtttgcataggatcagcgggatgtcttttttcagtcgtttgaggacatctatccttagatttctactacacaattccctgaagaagttaccaagctctgcaattgcttcgtatatatccttgtccacaaatcctcttatgccggcaggtataattctttggagaaggacatggcagtcatgagttttgagcccctgcaccttggaaccatctgaacttatgcatcttgctaggttggctgcatatccatgtggatacttgacacctttgaggaagttacaaaactcaattctttgttccttcttcaagacatagcgagcttgtgggatgcgaactgagttgccatcctgctgtaagtgcaagttatgtcttatgttcatatcatgcaaatctatcctcgaattgactgtgtcctttgtcttgccctcgattttgagcaatgtgcccaaaatgttgtcacatatgtttttctcaatgtgcatcacatcaagattttgtggcagcaacaaatctttccaatatgggagcttgcacagacttactttgcggctataaattagtggcccttcatcctctccacgttttcttttcttacttgtatcatgcttacccggtctaacatctttcaccttctctaactgctcgaggacctcatctgtgctgaattttcctggctcaacctggttttcatggtgtccatcaaaagcatggcttcttcgccaagcgtgtgtccttggaaggaaacaacggtggccaaagtagcctatcttatttcttagtgctcgtgacaacgaatttttgtcacaatgaatgcatgcataataaccttttgtagttcgccctgacaaggtgcttagagctggataatcatgtatgcaccatagcatggcggcacgaagattgaactttctagcactgaatgcatcataagtactaacacctatccataattcaagcaattcttctatcagaggctccaagaataaatcaaaatcctttcctggagatgttggacctgggatcagtaatgacataatgcagttcgatggatcgacagattcccatggtggtagattcaaaggcataacaagggcaggccacatgctatacgaattgctcaccttgccaaatggattgaatccatctgtagctatggcaagcctcatattccttgcatcttctgcgaaagttcgatactttctgtcgaagtccttccaagcctccccatctgctgcatggctcatttcattatccactggcttccgcttgattttgtgccactgtgtgtcttcagctgttcgttttgatgcaaatatcctctttaaccttgggataagtggaaaatgcctcaaaactttgcgaggaaccttcctgtcgccaaccccatcttcccatctggattcaccacatattgggcatagatccatattggcatattccttccgaaatagcacacaattattcttgcacacatggatcgacacatatccaaggcccaattcacgaagatatttctttgcctcatcataagattttggtaattgacattgagggaatgccgaggacaacaacttcaataattcagtgaaagctgtattgctgattcgataatatgacttgatatggagcagcctcacaagaaaggaaaatcttgaatggttagatcctgggcaaagtacctgcttcgcatcttcaagaattctagcaaaccttggtggctgtccatcttcccctgccgcagtgtatagttcacctattaactctggaactccattgtcatcctcgggttcatacccgcccacatctgtcccttcattatggttagtttcatgtacctgttccaaatattcgacatcttctgtatcaactaattctccatgataaatccaccgggtgtatgttgatgacatcccaaaaatatgtatatggtcatgcatttcttgctgaggcagtgaagtgtggttaagacacctacagcatgggcatggtatgtcaacgtgttcatcaaatctttgtccaacaaattccatgaactgtttcactccctccatgtatgcaggtgtgaattgtctcccatgtatccaagttatgtccatctgctttggcatgttaaaaaaagcaattaggcaaacaaagctaatccattttttaggacagaatattttctaaaacattagatggaacagctggttgctacatgacttaaaccatgttgatttgttcataatactctgacttgtttctctgttcatacaacacaaagcataatctttcatagctgaacttgcatttcatacttagagtaatgtacttatggaaaatcataccttatatctactgaacggcgttggtgatgggctgtgcgcgctgacgataggattgagagaggaggtgctaggataagacggtgggcgaggagcagccgatccgtctcagtcgtcgaggatcccccgcgccgactgggatccctccgcagccccaccgaccaagatcacttcaccgcgccgccacccaccacgatgctccacatcacgatgccggccagcctgtggagccgcccttccctgcaccggtgggataagaaacctcctcctctgcaccgtcccggtggctaggatccgcccccactgagctccgcctgcgccgccgccaccctccctccctggctgtgaccaaaccctgcgccaccgcccccctccctccctgaccaaaccactaggtcgcccgcataaagcattcaatcattcttgtgttcgagaattgaaaggaaaactaaaagtaaaacatcatcagcatgaaagctccttgcagcgtagtggttaagctagaattatggttagtcacaagtcgtgggttcgacccccaagtgctgcagcattttttttagaaaaaagagttcacatgggctgcacagattcacacatgggctgcacaaattcacggactgcacaaatttgggctgcgaaaaaaaagttcacatgggctgcacagattgacacatgggctgcacaaattcacgtggactgcacaaagcatctgctggcccgaaaacgcacctgtgctgcatatacaatgtggggtccaataacaatctggattgccacgtatacaatgtggggtccaatgacaacctagatagccacatatgcaaggtgggaccaacagcagaatagagatttacttacaactgacgaaatatatttcagcatattgtattaataaaggagcgtcataagtgtgttacatgaatggtgcgcaccattttgtgacgaaattatctattgttttatgagaccattttaaatttcgtcatggagtttcgatgtctaccctccgccatgagtgatccatgacgaaacatgaaatttcgtcatagatatgctgtattcaatgacgaaattatacaacgtcatgagcaaaacgtcatagatggatgatttcctactagtgtctccgccggggatctagctaacgaggtggtttgcaagcgagtgagagacaagggattatataggttcgggccgccaggaagggtaacaccctactcctgtgtgtggaattaagcttgtgtgttacaagggagctccaaccctagactgaagcttctcaaatgtcgtcccttttctcggtgggcaaggtcctccttttatagttcaaggggataccacatgcaccgtctttacataattcatcattggagggggggcccacaaaacctgggtcaagccaccgtccatgccttcaaccagaagcaaggcagtcgttcaaccccctaatgggtcccagcgccgtcctccgcccatgggagacatccctgtcattccctcttaatttcatggagacttttgtggattcatatgcacagggggcacgcttggctccacgccgatgggacggggcatacctgcccccacttcgcttgacatagggcgggacgtgggtgcgctgccacccgtcccatccacctgtgaccggccataggccggtcaaggccgattgacacacgccaattggtcggcgccacatgcctgcccacgccgcattaaacgcggcgagggacggttggggcgccgctcattaaagcgcttggcagcgtcccatcctccgcccactcgaccgccacgtggcagccgagtgagggcctcggcgcggcgcgctccaagggcccgaggggtgcgacggggcaccccgaggccccttggccacttgatgactacccgacctcccccgaggggagggggaagcaggccgcacggccacgtggctagatgaaaggattctttccctctattgtgcgtacccccgtgcccaaatcaccgacaatggcaataaaggacgcgttgtaatattttcagcataaataattttctaaccaatgaatgataaataaaagtacaaatagattaaatatgtatgttgatcggctcgtaaaattgattattatgaaagtaggtaaactgtacataattgcatgtcagcacccggtgacatgaatttctgcatagctagggcatataatatgtcccatgatcagtgactagtacatgcatgcacaatattattatcacatccatacaacatacaggtcatacaaataggtaagtgattatcatgacatacatgatagttgggccaatcggtcaaataaaagagtataaatgcagcaaaaatagatgtaagatacataagttttttggtatgctcatctaccaaacaaaacaggcaaccgactaaagtcaccctagaaagaatcatccctgaaagctccaacattcactgcaaagtaaatgtcgctaggcacttcacctccagcgtccatgtctaaaaacaacaacaagatgaccaagagtgagagtgtgtggtcggggctccctatactgataccgaatgcacaccgatttattctgatcccttaattggttgcatgaaatatagctacattagcacttgatcgatctataggatgatgatgggagaacaatttgaactcggttagtagtatggccacaccatatctatctaatataacctatatctattcctacttaaaaaataccaatttttcccattgtcacaatcgtttttcgtccgctgttgtgtcactcttgtcaacgttgtgcgtcatccgcctccacatcttgcatactcagtttggtggcatccggtcacatttatgtgattgcctcttcaacgactctaacactagatcctacctcaaattagaatgtaatgccgttgggtcaatcacaaacgcatacacgcgatcacctgaaaagtcaataggaacaacttgctcgtattttttttcctgttccaacgcaagtgcattatttctagtacatctcaacttgctcatattttttttcctgttgcaacgcaagtgcattatttctagtacatctcaatttgttaaaaaaaaacttgatgttcgttttgtttatcatttgtctttttccctctttgttcttatcctttattacctctctatttttcatggaaaaaaagtgagatttttcttttccacgggctgaacggcgcacgacgctgttcccgtgtacaccatgtttagattacgattccaatccaattaatttgctaatggctctgataatactagggtgatggggaattggggatgaagaacatgtctcatgtgaaaaacgtaaaaaaaagcaagaacattgagggtcattaattattcgggtgattaacttgggtaattatccttcattcacgctgaggcttaagaacagcgccgcacttttcagttccaaaacgatagtggccactgagatacatatgtctatcaatgatcaccttggcttgcaccataaagtctatcattttaaatatatatattgtcattcaagcttatagttaagttttaacaacaataagacctacgtagtagaaacgcctataaatccaggaataagtacaaatctatcataggatttgcatgaataacacttggttagtcactcagtcgccaatcggattctctatgtgcagatctgttatccttgttatctgattgccacatgctgttaaaatatactagcactattatctctcaaagaacagatgctacattgactgtatttagcttattttggattctatgtactacttcagtgatatttagaagcaagaagtaaaacacttgtttctcctagctagaagaacatctttgatttaatctaaaacattagaatgatcttcattgagagaaaaaaatattgcaaaatgctagaaaatttattaataatgttccaagaaacatgtcattaggtttgacataattttctacataaacatggccagttgtaatcctttacccttatcattctatgaaacaacaaatgaatacattatttcccttgctccactgcctattggaaaatattccatttttgacaaagaagtatttgcatttgtacttatatttgtatttgtgtattgttattgtttctagtcatctgataaaacaagtcttatattgtatttgtatactaattttttatgactttggcaatgaatcctaacaaaggaataaaccatgtccgttctgtgcccccacatagttataagcatcatctttacatcctctagctatcttgaacagtaaaatattgaaataagatggaaatatttcctgataagacaaaatagtgaaattattatcacatgaaaactacatgtgacatgaagagggataaagacattatccaaattattattttaaatttacgtgacaaccgcttataccaatggcaactgcaatctatattcttagatttctgttgttggtaggatttgcctcatgattatctatagaattatggggtttgacttatgtagacaaaaactacatatcattatatcaaacaacatatacagaaaaatcatggaccttttattgaggacactaacactgaaattgtcagcaagtgacactttgtttgccaaggttatgaccaactcaaccaaggaccaggtgtatgcaattgggccgtgctttggcttcacaaatattagtatctgcatgaggtgtatcaccaaggcattgcgggaaatgtaacaagcacgtgcttaaaagatggatgctatgacattttacaacttatgtaacgttagaatttttggtgatcttaggttcaatattagacatgacacgactactatagatgtatatggtgacccttgttatgtcgatcataataggttgtttagtaggggttgacggttgttaagtacaaatttttactgtcaactactgcataaaagaaataaaatatattatcaaaacattattggatttcagggtgttcaagcacgaggatttcgtgctgcagcaacgtgctataaacaactattcggtgcggtcacacagcttgtacatacaattatattagtcgcatcatatcgtcggtgatgctgactgaactgatcatggttttgaccctaactactaccagtacgccagctgcaggtttgccgatggccatattgattttgtaatatataggtgtgacgtaaaaattaataagtttccgaacagttatgttgccaaatacgttgtcgaccatgctctgacatacaacagtgttgaactgcctccgtttaaaaaaaatagttttacactatttatgttcaacgcttgactattcgtcttatttaaaaaaaattatgattagtatttttactgttattagatgataaaacataaaaaatacttccttcgtcccaaaatatagggatttttggattttgacagtcttcaaaatagtactttgattaataatatttataaaagtaagatattttaaataaaaaagttagtaaatttagtaacaccaattttacattattgatcttaaatttaaatttagtaacaccaattttacattattgatcttttttattttttttctattaatagtcaatattaaaaatgtttgacctggcactattctaaaattgcttatattttgtgatggagggagtattttatgtgtgactatttttttttacttttttataaatttttcaaataaaatatatggtaaaacgttcgacatgaaaatgcacacctgcatttaaattgggtcggagggagtattcaatagcactgtcagacatgctagttggtgccctttcagtcaacctaacataattgaagtgtgaattggatagtaatcgtactatttatttgctggatttttcttttctatacctcgatgtggtacttgagtatagacttttaatgtttcatgaagtggtatatatatgctgctgaatgttgtcaaatttttcgataattttacataacagtttggatagtattttaaagctcaacatacatgtgagtatagtatttataagcactcataaaacctaaatacaagcatatcacatcaatctattaagcacaaaactcaacatgcaaacatatagtaattacatctataatttatttttttctaaaagtaaacatacacatgttaaattattattctcaaatcatttttataatattttaatccaaattattttatcatttctctattatgtggcatatatccgctggcaagcacggggagtactacgaatagtcgagttacagcattttatttcaactgttgtcgcgtcactgcacagccacatcatctttatttcaagaacgtcaataacagaattattacggcgctgacaaaggcacatgcatgcatacatgcatggcaccagctactagccatgttcaacgcgccggcgagttctccgctcctttgtgcaccgagtagccggcgtcgacgacgatgttgtgcccgttcacgtacctggcctcgtcggaggccaggtacaccgccgccctcgcgatatcctccggctcgagcaccttgacggcgtcgctggcgccctcctccaccatcctcctcagctccccgctcaggcccggggacaccacggcgaggcgcgggatctcgttcagcatcatcggcgtcctcgtcgcccccggcgagatggcgttcacccgcaggccgtggcgcgccagcggctccgccatggcgcgcaccacagcgatgacggtggccttggagacggagtacatggcgagcgccggcatggggacgacgcccgcgccgctcgccgtgcagatgacgcagccggtgcggcgaggcgccattacgcgcgcggcgtgcttgatggccgcgagcgccgggcgggcgttcaccgccatcacgcggtcgaagccggcgaggtcgacggacagcgcgtcgtcctgcggtatcctccccgggatgccggcgttgctgtggaacacgtcgaggcggccgtgcagcctcacggcgaggtccacggccgcggcgacctgcgcctcgtcggcgacgtcgcagcgcgtgtacgcggcgtccgggccgagctcggaggccaccgagcgggcgaggtcgtcctggatgtcggcgaggatgaccttggcgccattcttgatgaactccgctgccgtcgccttgccgatgccgctcgccgcgccggtgatgacagccaccttaccagccaacctgtgcatacatctcaatctcatcacgaaacaacgtacatatgattgaaacaggagatcatccaagaactaaaatggaaggcagatgaaattaacctctgtaaattggacaccgtggagaagcaacttagtgttaaatctgcacgggaagttgtttttgttccaataactctcttggtagtctctctgcaacacaaccggatcacaacaaaatctttccagtttcagctatagtgtgtataattcggctatattgtatacaatacctgagaagttgtgttactctgaacatcctgctggaaaaaaaaaataaatggctacaacgagatattgctacaacgagctagagctggtcgtcgttgttggctcaggtgtggtaacacaggcagtgggagcttccttaagaaggcaagcgcgcagccagaaaaaaaaattctcaaaataaaactggtccacaaaattatgaaaaactattctgttctatcaatatttgaggcaatcttcttgccttcctttcaaaaggagagagagaactttgaaaattcgatgaaagtacgatgcgaattgttctaaataaggtaaattattgtacgttctttaaattggcaacgtcacggcgatgaagtcaaagtaaacctttaatattctataccacaaagttgtacatcaaggttattatagccaacttgttattattgtttacttaagagagtatacgatgtgtacgtaccaacacacgccacgaagtaaacaataataacaataataacgaagttgtacatcaaggaattcacgaagtcacaagtgcatgcatcctctacacacgctggaaactgttaaaaaaatttgggattggcccataaaagcctggcccaaatatatttattgggccatcacagaactttctatatagtggattgcactatataaaaagagaaatgagctactcattgtacagttgattggaggattgaatagtaaagagagtctcaccccaaaatcttgtatacgtcatcagacacgaagctctaccggagaccaatgtaggagaaaggtaagaaactcgataatcctctttgcatcttgtagattgaattgcaaaaatgaattccttgcatcttcctcgttccgttttttgactcccaactaaaaccgccatcaccgacttggagtcgccggcatgtaaacgattggggttttctcggcatcctccatcgtggcagagacgaaactcaccaatgcaagcacggatcggagacacgccgccgcacggcatcgcaccaccggtcaccggccacgccaccgcacggcgtcgcgccgacggccacgccacggcatggcgtcgcaccgcgccgccggcaacactccgcacggtgccgccgcctgcagtcgcggccgtcgtgtgcactgctgtgagccgccgccggcagtgccctgcacggcaccaccgcccgccgccgtggcagccgcgtgcactgccgcaagtcgccgccgcgccgccatccccacacccagcaccgcgagtcacagccgggcgagccccgtacggcgccgttgcgagccaccgcacccccgccctgtgccgccgcgagctgaccaacggccgcgccccgcacagcgccgccgcccgattccgcgaccaccgcacagcgccgccgcgcaccgccacgcagcgatgtcattcgcaccccgcatggcgctgctgcgcgcgccaccacgcaccgccaccggacgcatcgacgcgcactgtcgccggccgcaccccgcatggcgccgccgcacgccgccgcgacagccgcgtgccaccgccgacagccacgcgaaatctccggagagaagaaaaagaaagaagaaataaggaaagagattagcgattttgcggaaagcctcctagattttctgaaaattagacgcatatctcccagcatggaacttttttgcgcataggaccctagaatttcggaaacgttcatttctaaccattccctgcatggaaaacttagaaataggcccttgaattttgcaaatgtcgcttatattccatatttaagcattttatgtcttataaaatttcaatttaaatttattaaggcattaattactgttaatgaatattttgaatattttgtttttagtatttatatgaatatatgcaacttttgcaccttttttctacgaatatttgtttgcatttctacaaagtatttatttattgaatattttgcacttcttattcgcattccctatgaatataaatattggaaaaatcatgaaatacttgcattcatatttgcaactatgtcactggcagtaacatatgaatattttgtcagttttgcaacagaatgtcagaatcacgaacaaggagttcgctgaactggcccagcatggccagagctacctgacctaggcatctgacgtccagatcgttcttggagccaagaagctctgccagaggatcgggatgggcaccccgcaggaacgtgcgcctacccctgatgagaacgattaggcgctgcacttcctgcgacaccacctctgtgccacgctcaagaatgagtatatgggattacggagcgcactcactctttggaccgcactcaagaagcggttcgagaagttgaagtacaccatcctaccccaagcaggactgggctcgccagaggttcacgaacttcaagagcgtctccgagtacagatccggtgccatctccgcgctgcaccggatctgtactaacctctccctctgcggcaaggttgtcacggattacggatacgacaacgctctccatcttccaccctagcgctgtgcagagtgctcgtaactacaggcaggcatcatacaaggagtatgacgagatgatcgacatcatgcagttgtctgagtcccatgacgaggttctccgcaagaattttgtctcccagccgcctggcatgagtgttggccttgatgtcaatgttatcagttataaggtctacaagcccgtccagaggaagaggggcaagcgtggtgggaagaaggcagtcgagaagtcagagagaaaagctccagctgcccagggagcacagggaggcaagggcaagaaggaagccaagccacccgcaatgacaagccgtatggccagcaggatcagacatgctacaagtgtggcatttggggccactagggccgtatttgcgaggagccccaacacgtcatcgacgcataccaggccagtaggaaggccaaggcgtccatagaagcacacatggttgaggctatcactgtggctactctctccatcaccactccacctgacgcccctacagttgcagcagacaaagcaaatgaagaggccgtcacacaggagcagagcttgatactctagctgattccatttgagtatttgatgctcctattttttttcgtgaactaagttgcattatgaacaattttgaataatggttttgtaagctctatgagaacataatatttatttcgtgatttgccttgcatggctagactttatttccaatattatgttgcattctgctatatgataaagttttacttattgccttgaagtagtgatattttactttattcacatagacaatatgcatagcctaaggtaaagaggaacattgtggaagaaaagcaccacaaagtgtaatcttgagagagatgagacaagttcagtttatgcaaagacgtgaactaccttcacaactacacgttatgattgtaaaagatattgtttttcccgtagataagctattacacctcaaatctcttgagaatggaaaactctcgcagaaaagttcccttgtaggaactagaagatgagagaagcatacacatcacctaagcatgcgagatcaatgtcctcactaagaaatgtaggctaaagtagactatttcatagtcagtttttcttagaatttagtatcttgcaaatgaacatagcacaaacaatgtcacatcatctgtcgtatcgcaatggtgagatatttgtcacgtgcactgcctgagcgcctcgcgccaggcttgtgccagacattggcgtgcatcatacaacattatactagtgccgcgcactaaatattgtacaatgcaccaactagcaaccccgctgtactgggggactgaacgaatcaagccgcgttagcacgcgccatgcaactcctaccatgcgccatagctgcacccgctgcataccctgtggtcactctggatacgcatgacatcgaacatcggatgcgtgccaaacgtcgatcaccacatgaattctagaacgaattcgcgcataccatgtgaattcgcatacatattttgccctttaatggatcgtctgatacatattgggcttacgaaaaagctgcaattgtgtctaattgatactacgctcttgccaaatcgatcctacaagatcacacatgttggcatcagcacattaagaaaagcactaagtaccggacgtccacaagaataagactaaaaaattgtccattgcaccactattgaaattcccgccacttgaatggactcttagctccaaaggcagcgaattatcaataaccggactattcgaaatgtgttgtcaacttaaaggaacactagtgttgactcaacacatgtgcataacccagaaccataagggctccctccaaaaaactgaaaatttttaacagaggtacgaacgtagcctaaattccttgacaataagaaggattatttccagtcatttagagggagagaaataacccttaaaatgataaatgtcaagaaaaatggtcaaggaaaggatggatgcacctttaatcaagcaccagcgaatgaaagtatgaaagcacacataagaattggataactgcctatcacttttgtgattcggagagcatgactaagttgcattatccaaatgtaatgcaccggaggagggtgaagtaccgaagaatgcaaaggtatacctcatcttgtctagaggcctcgagaaaaataatgggactagaactccggccccttaaatccctaaagtaaccagagacgtgtggtgaaaacgggacaaaaaggaactctcaaggtcatagtcactaaaagtaaccccagaatttgaggaggagccagttcagagctggcaaatggtatggaaccttagaacaggcataccacatcttcctatcaaggaagaaaaccagcagttggagtgcacaccaacgccggtaaaatgaaaggatcatgcccatgtcaaagaatagaagcataaattgcatatccccatatatccatggatactcgcataagtgtcacatacaaccaataggaattggtaatgagacctgctatgggcaatattctcttcgtacagcaaatcatttggagtcaacctggagttgaaaatcaactaaaatatcaacccgcaaagctgacctatagttgacaatgaatgtttaaagaaattttggattgggcactcgcatacaagcattaaaagtcccaaaccaagttgatgatccgaatatcatcgcataaagaaagaaagctcactctttccgaacgagtttgagataaaaaaaggtagaaacctatgttgcttaggcctgtaaacctacaacacatggtaaaaatacataggttccttggatatagttcaccatttctagcaagtaacatggttcgagctttgtccaaaccccaaaatcattatcaagaagataatcatatgtgcgtcgcaccagcactaatagactatatgaactctataagttatggaaaaatcatgcaagatttgaccattgaagcatcacttgaactatcttttgaaaagatatgagcaacgagttttgatggttcacacttaaaagagatgcaaaattcagggggagaattctgccagtctattaacaaaggcttgaactgaagaatcaagtacccaaaactgattaagaaaatcggtacaagaattttggtagattgtactccttttcccttcgataagttttcctgtagtttcttatcaaggtttttaatgagacaatctatgtgatatacatgcgtatgctatgtactctttatggagttttaacgaggcatggacatcacgcggtgagtgcctaagggggagtgttaagaaacttttgggcttggcccatgaaggcctgacccaaatacacttattgggcccatcaccgaacattccatatattggattgcactatataaagagaggagggggttactcattgtacggttgattggaggattgaatagtaaagagagtctcacccctaaactttgtgtctccactttctgtagaaattacgagaccctcttggactacttcatgtagcaggaagattgtgtaatagaaacatcggggcaggccatcaaacgccttcagctcatagcatgagaacacacatatcgatggaaaaaagcgcacatgcatgttataattgtgctcgcaagtacttaaaaaaattgaaagacattaattaacgttaaatcaaggatttaaactcagtgctccctttatttttttagttttaatagagatagttgttcgcaactttttgtgacaagtagacaagcacgatcgcaacacccaaacgccttcggtgattgtagagttgccaaccatcctaatccagcaaaagctagatcaagatgggttttgatagaacaaaccggctagtcaagccgatttagatagattgatggataactacccgtctcgtgggcaaaacggaaggtttcaggacaaacctacaaaagattttgcactctcgcagcaaaggtggacgatttacggtgcaaatcgacaaagatggacgaactaaactagggcgaattgaa

SEQ ID NO: 10328 - DNA, 30953 bp, Oryza sativa
acactttactatcggttggtataacaaccggactaaagattgaaaagaaagatcatggtagagaaagagctgtgcgcgtgcgtcctttatttttcttcccccttctcttccttatcttctccccttcccctctcctcccctcctcggcttctatcgaggcgggcgggtggggcgggcccgatggcaatgggtggcagcgtcgacagagcctcccccaccttctattcccctctcctcggcttctactagcagtgggtgggcagggtgggcccgatggcggcgggcaacatcggcggcgggaggcatccgaggggtggtggcgctctgcccctccttccccttccctccttggcagcgggcagtaggcggtgatgcggggtggcgccctgggaggtggcggcaagccccaggcgacggcaggcttgggaggtggcagcgccctgggaggtgacgacaggtggcgatgatttgtgaatttgtggatgaattttgttattgttgagtatgatttgttgtgggtgattgttgacagtcgttatcgatcagtttcgaccgtcaatatttcgaaaacaagagagaactagtgatacttgcaatgcataaatatgttagaataataatattccgctagtattaggtctactaaccttttgcatagaacaacaataaagtgaaggagaatcgacatcaactcatacgataaatcaatcggacgatgtcgggaaccagacttgtgtatgaatgggccaagaacgcagacttgacataatgaatcaggccaaaattcacaagtctacaaagtgaagcagcagagcaggctgccagccgaaattgggctggattgggccagccccaggttcggccgaacctggtggttcggccagacctccctcgcctccgttggatctaggttttggctgaacggtagaaatgaagccccaatgatggttggagggtattcccgaccattccaaccgtcacaactgtcatagttcagctatagaaggactttaccttctctcttcactcacacacctcaagcaatagctctctcattcctctcaggtttagtttagtagtatctagctggtggaatagaattagaataggaatcaggagtccggaagtcttcggaagagttcgggtatggctctggtagctttcctttcctcttttgtaaactttgtacttttattagaatactcttctaaatacatttctggtattgaaatactttccgagtatattagtaccaactttacattatgttcttgttatactgaatatgctgctagcttatctgggagatgttttagtgcgagtatagtgtttgcttatgcaattactctatgtcatgacgatgatattagagtagtatctggtagtttagacgtggtgtctagattacgggatatcattatttggggttatatattgcggataagaggtggaccgctgatggtgacagctcagtacgggtattcctccgcacctatatataatcctaagttaatttcctggggaggatattcctccgtatttagccccggttggatggtcatgacgggctgtcataaggaactcggcagtcaggggtggcttctcgaagtaccaggagggcatcggatagaggatattagctagtatatgtcacgcccggaaattcactaataatttccgaactaatttgtgcataaaatcctcgtccaggaatcagccgaggtacacaaactgacaatttaatatacaaatccatcataataataacgttacatacttacaaaagaaaagaaaaacaacggcagcggaataacagtctagcgatggcttcagctccactcccacaggcaactcaactggggtataagccaaacgttttctccttctggatcctttttcttcaactgaggttgattgattattgcaagaatgagcatatgacatactcaacaagccacacatcaaatatgcaagtgcacaaggacaccaaaggatggcataatataggctcatttgcaaaaacagcatttagcaaagatttaagagtagtaaaacagtagagtaattaatcatcaattttaatcaacactgaacagcaccctaatgctgcacaggcccaaccaaacctgaacaaccaaccccggctgtacagatctaactccaaaccaggagctaagcaaattattaccaattatagcatcaataattattgtgagaggtgtgaggctaatcacgaaaaacattgctcaactcacccataaccgcgggcacggctatttgaatagttttactctggccagaggtgtaccactgtacccacaagacacagcctcaacatcatgtctaccatgcgtcgcgatactggaaagtacccgaatagaggctgcgacaataccctctgcacaacacaactcaccacagtgcaccattcctggatcataatcaccccctctataaatataaccaaagacatggactccccagcgacccccacggacttatcaccgcttctcagtctggcaccccgtaatgaatcatgctatacaaaaggtaaagccgttgcccacgctggcttgtggttggcacggttaatgtctcacaacagtagctcgcgaactggtccttaattgtcatgagcacgaccttcaaaaccatgtgctcacaacccaccagtatcaattttagttgacaattaattaataaccaatcacgattaaccatcgtgagctaccattaaatttaatcataaataataatgtaatgtgattcatcccattaatgatctaatgtttctaaacatggctaagcaattatatatatatggcatttagctgaaccaaaccaatatataaggttcaagctaatcagtttattacccgaggtatcaaggaatagggcattcaatgcaaattggctataacaaaggaataggttcacaccacccggtgacatttgaaaataaatgcacagttgaaataaatagagaatttaaatataggatcaacatgctcaaaggattgtgtttaggatctgtgtgacttgccttgcagtaatcagtcttgaattaatcttcttgaacacttccgacgcactcacgaatcttcgcaacgacggaaacggcaagctaacacgcaaaacgaagaaaaagactaataaaaaccaaataatcagtacacataaagtaaacaaacatgtagatcatgattttagatgaatttagcaacttgaactacttaattccgacttcatatgaattagttatgaattttacaagattaaactgattttaagatttaattttagaagggaaaagggctttatgacatcacgatgacgtcatcaccggcgagaggctcgggacatcacggtcaccggcggtcacggcggcgagaacagagggcaccaacgcgacgagcacgacgcggggaactcaccgagtggcggcacgacgacgaacgacgacggaagacggccggcgacaaactccgaaggcggcaaggtactggtcgacgacggcagcggcttttcggcgacgagcagcggcaacggaggggtggacgggcttctccttggtgctgcgatgccgagggaggtggcggcacaagtcggggacgaccgaggcgacggcacggcgcggatggaggcgaagcagatcggcttgacgtcggcaatggccttccggttgtcttcggcttcggggaagtggaggccgctcttcctctcttcgatgcggtcccgatggaggcgacggcgccgaccggtgatggcggagccgacggctatagctggctggagcggcggccggaggaggagagagatggctagcgtggggagagacggctagggcacgggagctcgagctagaggttggaaacgaaagaggagagcctgggggttctatttataggcatgggagagagagatcggactccaaacgagaggatttgagccggaaaaaccgagggttagttggagagataaactcgaaaacgaattcgattccgcgttgatttcttcgggataaagtccaattcttgggggtaaggatagaggaggataagaggaatatttcccctcaactaattttgcaaacggagcacgggatgcggcggatttggtggaggaagcggcggctgcacaggtacaggacggctggctcgggctctatccaagcttgaagacgacactgtagcagggaggcgaattagactttctgtcttgggctggctgaaaacaaagcaaagaaaaaaaagaggaggagctcggctgggccgacttgggctgcacagcacgcgcgcgagggagagagatgttgggctgaaatcagcccaacggcttaggagaggatttaaaaactttttccaattaaaataatcactgaaatgatctttgaattgttaaaaatacttctaatgctcaaataatttcaagaaaagtcctgaaaatactggaacacccaaagtacttaaaaaaattataatcagaccatttaatgattaatttaatatgttgataattactgaaatgttctttgtatgattaaaattaggaattgagctccgaaaaatctgagaaaattctagagagtataattaaccatggagaatttaataaaaaataaattcatccatgctttatatttagaaaattttatttcccacatttaacttctcttgtaaattaatgaacatttaatataaattctaataataatttattaaataatttataaatcctaacacgaaaatcaggatgtgacagtatatcagttaattagaatgtattgtatactatgtatattagaagtataggagtagattctctttctcttttctttccacctagtttaaattatttattatgaggatgagtagttgaatgcttgtgtgtcactctacccttgaattatcctaacccctacttagaatatgattatcacaagtaatatataaattattagttgagttctctctatatgatcttcccatgggataaaataaatactatacccttggaatactctcgggtgaaatggtacaatggtatatccgtgcgcttgcggatgaattctgtaaccataatatgccagaagtatttctgtgtcattgctgggaattatatttctcataatgtcgttaagaaataccaacagtgattttgttgtggaggtggatgatctgggatgtctgatttgtagctattcgattagatgattttgattgtattttgtctgatttgtttgatctgtgatgattttgatttctagcaactcgatctgtgatgtggggatttggggatgtcgggagcaactctgggacgagttcgactcgaaatcaatgtgcaagccagctaaaaacaatgaaaaaaaatgcaagccaactaaaaacaacaacaaaaaaaaagcctagcgccacatggtgggactatcatctttagtcgcggttgatgctaccaaccagaactaaagacaccgctaatcatacacatctttagtcccggattggacatttcggttgcatacccggaactaaagagggttgcgaaccggccgagtaaagatgggttttcaagtactgatagtatcacaacagattcctatgcctatcttatacaacaaatctattgtgctgctataaaaggcaaaaattgccctaggacaaccaaaaattttgtaattggctaggagacgctgtacaatcgcgtcgctactcatgaacaccccaaaattcgtgtaacttgccctcatctgagacaatattttatcatttctgataaaaggaggagagagaaatttcaaactgacaaaattgccctcagccctatctaatatccactaccggttcccgcttcccagcaacgctcaccaatcaccgttgctggcgggctcaccgaccgtcatcgaagccaccactgcccgcttcccagtaccactcgacattgccaccgtcgtcgaagtcgttgccgtggggctcgccgaccttcattgatgctgccaccgtcgcacccaccgctaccgccatcggccaccgtcgaagccattgcctccgccgctgttgccgagctcgtcaaccgtcatcaaagccgccatcgccgccaagcttgccagccaccaccgaagccgttgtccccgggctcgctgttagtcgtcgaagtcggcgccgggcttgccgctgccgcccacttcccagtgccgctaaccgttgcaaccaccgtcaaagctgttgctgccgaggggctgagggcaatttaatctttttgaaatttctctctcctcttttgcccggaaataatagaatatcgtctcgggtgtcctatagaaaattacatgaattttgtagtgtccatcagtggcgatgcaattttatgattcttctagccaattacataaattttgggtgtcctgtagcaaattttgccgctataaaaatactccatataaattttttgataagtaagaacaaactttttatatcatatctaaaaataaaaatactccatataaattttttgataagtaagaacaaataaatttctacactccaacttatatatttcatcatactaaaaagcataatggattttttatagcactttaatttaatgctaaactagcggtcaactaacgaaaaccatatggaatagatctaaactaaaattcaaaagtatataagcaaatgagcaaaacttaggagtatagaagggattggataaaaatttaggaatatataagaaattttctcaaaatcagtcgtgcaaatcgatcgatcgagagtgaaataaaaaatcatggatacccacggttatctttatatttgctgcagaaaccttgggatataaaactagctagtttttgctagatccgtagatgctgccagaggaatataattgcacatgccacgctagtgttaggtactaataaattggttatacaaggttaaatattctggtgtagtgttatgcattcttagtttagaaagaaaaaacttggaagtgcttgtgtgtccaatccttacatatttgaacattttctgtccacagggcataactgtagaaattcctaaaacttcaaattggactgctcagaaaccttacttggaaaataaccccaagatgtcaagcagtgttattcgacaatgttcattgctgcttttaattactttgttggttatatgttttgaagggaatgatatatatggcgattagttatgtcatggaaaattactggaacatcgaaaagggtaaaaatacgacgcaggcagggactatttataagttggaccccccatcaccccatggcatatcattactaggaacagcattatcacaagcggccgaaaagggtcttcacaggcggggcggcagtccgcctgtaagccaacgactgtgaagatcaccgatcttcgcaggcggggtggccgtccgccagcaaagataattttcgcaggcggacgttggctagtccggtccgcctgcgaaaataggaatcggccacctgaaaaaaaaaacttccgcctgcgaagataggtagaaaatattgaaatttaataataatttgcccgtaaattacttttaaattatttaatataaattcttgcaggtagattattatgtacatatattagaagattatcaagcatttggtaatgataaatgtacatatattacatatctcaaaagtgttgccaaaatatatatattacaatatttttttacattgtcactttaaatacgccatgtagttaatacattatggcatagcactgttccactcccgaagatccttgaattcgtcacttgtggctagggcaccctctgggtcgaagaaatctcctttcacatgacagcactcatggttgatgaagtggcacagatcacgctggacatttttgatgcctgtatcatcaaaacttgttcgatattctaatcttggcaactgcatgcattgaagataaacaatatattagtatcataaatatgtgaagctgtctagcacatagtatagagacttatatcctctgcgttagtcctgtacctcccattaactctaaggaattcgcaagcgtaatacccgcaaaggatcgttccttgcggttgcttgtgatacttcaggacatatcataaaaaaatagttaaaatttgcaattagtgaaacaattggtatacattaagtgagtggagtattaccggccaataggtacgtactagcagcttctcccttgttcgggtctgttctccacccatgaacttgtagtactggtacactctgtatggatgtcgtaccgtttcacattaaggaggatatttatttaaaatacattcatataaaaatgtaagagtcataatcacctactactgtaagattgttagaaattctttgtatgactggtgtttgtaatcgagagggtccaagactaacacagctccgtctttagggtggatgagtaaacagatataatgatcgctacatattaacaacatcatagttagttagtaccagctaaaataagacatatgtgtagaagataaatgtatcggacttaattaaaattataagcggccatgacgactctcttattttgaaagtgcaagaaggctcgtccaatgtactacgcgacagtaatcaatttctccttgtgcaagcccttcttgtattcagctatctattttggattcttgcccttcagttggtcagacctggtgctagcctcacggtatgttgtgtttggtagatccgagttggatccaagaagccgataggttcttttttcttcttagcatccatgtattgcatcctacagaagaagtttgttagtaacaatcacatggatttgtattgtacatatttttcatataattaattaaaaatcatactcacatgcaccaaacaccgaagtagttgacatccatcttatcccgacgatatatggcatggagatctgagaaatctagccatacgtaaccttcttcgccgaaacaatctgtcggtgatcgagctgttatattgcccaagcctttcttgctggcctccatgtagaaggtatgtaaccttttcatctcccatggtccttcgttcagtgcccattccggcaagagtgctttcccatgttcgtacttttccgggcaatcatcggttgcgaagtatgttggcccggctagttcagcagccttctaggggtcatcatttctgagcttggcacgttccttaccccttctgaagacggttaccatgaacttctccttgttctcatctttgacttggagtcgtggctcctaagcactctaggcacctcagaactggtagtggccttctcagggaccgtggtctcttgcacctcagggtctttcgcaggagaagggttttcaaatatttctagctttgtaccgtcccattccaatcctggtacttcttctatttctgacccaactgatgccacaaattgcacctctggttctgccactgtaatctccataggcacattcggcactggaatctccatggctaccgccggtactgcaatctccggtggcacttgcagcactggattttccttttgcatcttgggttcctccgccttatcagtcaccttcctcttaggaggtctcggaggttttcccaaccccggttttggcaccacaggtttttgcgtggcgtcggtgcccaatccaaaggatatgtcattcttgtgccagagaattacaaggtcgaccgcatccccaagtacggatacaccatctgcagtcgagaagtcaatgtcgtaggactcaaacccttcgtggaccacttgcggctgcaccttggcatacgcatcgggtatgaattcttcattgtatgttctcccagggatagcaatggctatagcggcctcaagagttttcccggagtgtccaatgggaacgtgcaatctacagggtgtattctccatgaggtcatcgaaggggtaatctggctcatgttctttggtttcggggtgaggcaaaatcatgtgcttgacgcagaaatccatcatttgcctttcaaactccgcagccccttcgtctctaagtttatccttgtacgcttcacgcttcttgtgggggtcatgtttgaaccctttcttccaactcatcttgctcgacacacctcgaacccttcccccatgctcaggagtacccagcaccgtacttagcacatctttctccctcttaggcttgaaaagtcctttcttctctgaactggataaattctctattttatcggcaacgctctgcagtttcggatcttcaaacgatacttttccttcatccgtgatcttcagagttctagctcttacccagtccttgatctttgtgtccattcctccattagtaccggttgccccttcttcctcatttcctcctcctcttttgtccactgctccacctttggtgcgtattccgcggagcctaagcgatgaggaaatttgttcttcttggccaactctgcatacttttggctcctttgaatttcttccggggagttcttcaacgtcagaaagtcatcccactgattcggggttatgttggcatacgtccaaaacggtgtgcatcccgtcttcacaaatttcttgcttaaggtggttttccaaccacgccaagacttggccattgtttgcagtgcacagttccacactgctatctctgatccatctaggaactggaagattttcttcaactctttccataggacttccttatccccattcgatacatgatcccagtccttgaccgtgatggggatcttttcccttactattatgccacactgtgaactgaattttgcacgtgcagtgttaggggcgagcagctctccttctggcgaaacatgggtaacaacatggaacccttcatcctttctattcatgcttctttcgcccttccttttcttcgcctttgctgaccgttcgcttttctttgagccggttgtgttagctggtacctcgtcgtctttcgacataacttttttcttcggctaccgttttgatcgccgtggcgccgtttcctacgagaaggtatacatgaaagtttcgaattagctcgggctaatagttatcacgatgaacagtttacatattaagtttacttaccccttctttagggggaatgtagtctttgtcgtcttcttcatcgtcgacctttttccttctcttcgggctcgggcttgggcttggacaaggatcgcttggcaacgagtactcatcgtcttcgtcagctatgtcgttatcggaactatcttccggtgggaccgttggtaccggagcaaccacaacagtaagggactgctcttgctcacctaaacccttctcttcagtccctttagtactatcggccatcgtttcaaacctctaacataaaaaaaagagttatcctccatattttaaaatactcaaattagtataaacaactttgtacaaaaataaattgtatattaacaatatgtcgtatgaacaaatttaaattgtctgagattaccatatattaacacgtagggaaaatagatatgttattaattagtacttactattatgctaaattaattagtacaaacaaatttaaattgcgaaattaattactacttacaattatgctagaatagatatgttattaattagtacttatgctattaattagtacttactattatgctaaattaattagtacaaacaaaattaaattgcgaaatgttattaattatacttactattatgctaaattaattagtacaaacaaatttaaattgcgaaatgttattaattagtacttactattatgctaaattaattagtacaaacaaatttaaattgtgaaattaattactacttactattatgcaaaattaattagtacaaacaaagttgtacaaaatttgatatgttattatcatgtagtgcactaattcacaattacatttcctcgacatgttaacatatcctccacatatcctccacattcttttaaaaaaaaatgttaacataccctcccacatgttatttaacaaatatgacaaattcacatatactgcaaatttgaacataccctcccaatttcattcacatatcacccacattcccaaattcacattcacaatcaacatataacccctcattcacatatcacccacccctcattcccattcacacccacatgcacacacatatataccccctcacacccaaatgcacacacatataaaaagaaacacccacatgcacatacgtccgtggacgacgaacggccgacgacgagcttcggtcgtggacgacgaaggaagggccgacgacgaggttcaaccgtggacggcgaaccggccgatgaagccgttcggccgacgacgtcttcgctcgtggatgacgaaaggccgatgaagccgctcgtggacgactgcgagagagagagagagatggcggcggcggctgtggagcggccggcgacggtggagaggtcggcggcgcggtggaggggccgggggggaagcagccggcggcggtggacggtgccggcggtggagcgctagcccgcgagcttgcgcgcggtggacggcggtggatcgatcgtcgacggcgcaagctcgaaggcccgtggcgcgtagaggacgacggtcggcggtggcggaggacgacggtcggagggtgaaggtcgtaggcgggcggcggcggaggacggcggaggcatgcgggggcgaaaaaatttggcagcctgacggggccaaaatttatagggttcccgccgagacttagaaattttggcaccgcgggcttgcccttatatagggaaatgatctcagtccgcctgcgaagatgtaaaccctactcggcataataattttacaggaattattacaagaatgaccctatctatttcagaattattttaaaatcatttttgtgatttgaaaatgtctacagtagtcgtaataaaaatggtaattgtacatacaaatagataaaccttagtattactacttttcaaatgtaaatattacttaaatgtttcaaacattaatattactactttaaaaaatcatatagtagcaattttatatgtgcacttaccattgttctaaaactttttaaaatataaaaaactgtaaatgttaccctacaaatggtaattgcacataaaaattagtacaaactaatatgcaaaatgttgagtgcaattgttcgtcaatttgcgatatgatcacacatcaccttacataccaccattacataactactaacttattagatgcttacatgcgactcaacaatcattaccctttaacattttttcccacaccgtccgtgcgcatgtaaggcttcacggtcttccgagtagatgtctcgacattcttaatcttctgtacaaactgactataaagtggcatactatcgtattgactgtaatcttcgacatcttcaaccccagacttcgtttgagggtaatctttaattccacaaaagatttttgggtttttggtcttccctaccattcacccctcctctggtaggtttgtttggtcttgtgcgatcccctccacacatttgaatttgacaatgaattcatatgtcatcgtgttatcgttccatgttggagtgaattttctttagtgcacaccctgtacatgatattctttggattgctaatactcttctttctggatcagcatctgtaggcagtactacgtgccacgatacttatatgttggagtattttgcaatcaacaattaatattatttcattttttgcattcctgtccaaactttcatgtatagttcctactacacttctaaggtaccaaattctgaaataaagctcattgtacttttatgatatgttcactgatcaaaactactattgcaagtctgatatgttcaactgtacttctgatgtaccaacacattagctttgtttattgattgaaatttatttttgttctattagtaccgctgtccaagtgtgcagatcaattcgtaatcgatcagcaggcctgggtgttgcttcaaggtataagtggacttgattgaaccatatctatttgtttgatccttatttgcatataaacagttgataggtactccctactatggtatgttgcggggtatattttaattaatttccttttgagatttattattttataagatggggattgttcaactgcaactgatttcgtagtctattgttcagacatttcatttaagcccatccatatagtttgtgaaatataacagttgggccattaagagtgtgtaaagaactcgctgagtcattctatcaaatgtagagcaagatcgatgacatgcgctcccagtattacctgacatactattatctggcttctttggtaaattcatctgaatcacatactagaatgttaaaacgacactgtatatagtgcatcattgtttgaatgagttatcatcaaaagcatcatgctgctagttataatcaatgtagaaaggcctgaatttattcttgtgatttatgctgcatttcacatgtgattagcatattagacaattatacacttttgtcctgaatggttaagtttgccatttgcaaaacgaagtatgcatttcagttagccagggtattattccagattaccattgggtttgttttttggctttgcggtgaataagtatagtgcatagttgtgtaattgtacctgctgatgcattagattagtacggacatttcacattcaaactggtatcaaaggagtttttagaaatcatggtttacatacatctggaatctttcccctcagtaatgaataatgaagtcactaagatataatgtacactgattggattatactgtacacaatgtggagttcaattttctttctattgcgcattttagccatacttctattgtattttagtatgtggattgggatgggtggttttagtctttaatatgcgcctttagtttgaacccaggcttggagaaatcctggttccgccactcatataagcaaatgtatatattgtgtgacacaaatttttttcagtttgaaacttattttactcaacctccatcctctctctctctctctctctctctctcacaagagaattgtcatcaaatgtattgattcttatgcatgctatctgaaaattaatgttatgttctcaggttctgaccattaaccagtggtacacattctcatgttttggaaagagcacacaaataaactacaatctcattgcacacaacacagtgtcctttattggttgtctccagttgcgtttacttggttcctagatctgccattcttttcttgcatccacaaccatggaaaattttcgtatactggatttgcaacctacctgctttatgctatatatagttaaattgtatatggcttgattaatttacgatattttaagtggctgagaattgggtgaatttcttctatattgtaagcaccttgtggtctagggtctcttatatatagtactactgatgcagaggcttccctgtgcattcaacgagttcaatgctcgcagatatatcttctggttgtgattgctgtctttatgcatctctattgttccttggccattgaaatgattttcgatacataggcatcatataatcatttgagtatactgttggagtaattagtaaagttggagctgaatttacatcagatgcatctgtactaagcaccaatgttcttgattttattttatgacttgtaattgcctacttttttgtgacctggagctcaaattagaaaatgatgttaggaaagcttgtgattcctttcggcccaatctgtagttatttcttttctgttaattctgaaaagttgaaaattgtttttcatattctaacaaaaaaatatgcatacatctatgattgctaagcacataatgccatgcatacttccatatgatatgctttagatggtagaaaaagttattgacttaactaaaaattgattctgaattttttttctttatattcctatgatatgctgacaatagctaatcttgactcatttgggcccttcatcctcttctcctccatcgtcatcaacagagctagacaattcaagtcagtttttttcacaaatttctttggctatatggattatatacaacctatgtgaacttattttgatgttagtagcatacacatttctatcaactgattcttctgataaatggaaatcaaaccgacagaaacaaattactaacttcttctgataaatggaaatcaaaccgacataaacaaattactaacttgaaaggattatctttagaaaaccttggaggaaaatgtactgtggtagagaaacatgacctaacctccattgcaaacgtcaatgctaggtagaaattgttgacggtcgttatagaccaatttcgaccgtcaatataactaaaataacggagaactagctatgcttacaatgcatatttgttttagaataatctattttcacttgtacttggattctatttgcttgtagagattgatacataatacgaaggagaatcgacaacaaaacaatcgaacaatcaatcagccactgttgggaactcagaaatgacatgatcaaataagcccaaaattcactgttctagattaaggagcaaacgaggagtcatcctgccaaaaatgggccaggttggcccagcccatggttcggccgaacccactgcagcgccatttgatccagggttttgattggatggctcagatggacttctaatgacggttggagggtgttaccgacctttccaaccgtcataaccgtcattaatcagctataaaaggagctccccttgttaattctcccacacactcaagcaagctcaacatttctctctatactttagtttagtattctagtgctaagtggagtacaatagcatagctctcggagtcctcggagtcttcgggggaattcgagtatggctctagtagtttttctttattctttcgtaagagtttcagaattaatgaaatattattctttatatactctccgtactttagtttatctgagtatcagctttactttatatttgtattggtatagttgtgtagttagcctaccagagaggtgcaatggtgtgggtttagtctccgattactcggctgctctatgtcatctcggaggatatagagtagtatttaataatgtagatgtggtgtttagattattaagtatcattatctgggcatatatgctacgggtcagtcgaggtgggccgctaatggtgacagctcggtatgggtattcctcgacgctagtatgtgtttctaagaaactttcctgggaaggatactcctccgtatttggccccggttagaggccatgacacgttgtcgtaagaaactcggcaacccggggtggtctctcgaaacaccaggagggcacttttaggggctattggctactgttggcggctgttaaatgctgattctgtaccgccaacatctgcataaagttcagataataaaacatttaacatagcgataggtgcttaatctcacatattccacagggttggtgtatatttatatgcagataataaaccatgatgttgggaggaaatatagactaaagtgaggataaatatgtatccatacaaggatgggttgtgaacttcatagaaacactagagaatcagcccataacaccgaagaatggatagaggaggaccataagaggagccaggccaaaggccaggccagggggggccaacccaggttcgtggttcggccgaaccctggtgagcgccgttggatctaggtttttggcatggacgctccatatttctccctgatggcggttgcgggacagttcgaacatttctccttcgccaaccgtcatacctacctctacataaagacttcacttcactcacttcaacacacacttccaagtttgagctgaattataagaggctctattgtaatatattgtatactagaaaggaagagagtaaagtagaagaagtcggaagaattccagagttgttggtaatcttctcctatttcttttattctgtttattactctgaattcaatataatattcttcctgaataatttagatttatcctgtgagaattatttcttggttagttcgtaagttgcatacgggattattgttcactataatcaactaaaatatagtgatcgctttggtgagttataaacactaaagtagatattaattgcttagacgtggtgttttggtaattattatccagtaattgctgcgtatcccacagtatgtttgaggtaggtgtagaggtggtgacagccttcgagatcacttaagtcctgcctgtctgggtacgtagtagagcgacatctagaaacagcgggttgctagtgcctgaagtattgaattaggattaaagttaagctttccctgacactgtttctcactagaaaatcctctctatcctggcctatcatttgcttggtgtccttaaataaaccggaggaagatctgaccacacacgttcccttgaattcgatacccttgtaatactctgtaggggaagtgctacagcggtatatccgtgcgcttgcgaattttatctgtaatcgtaagaagtaccaacagctacatagttgtatactagcagatgtaaactaaaattgactttatactagaagtataggaattgattgcttttctatttcttcttccacatagtgtaggattgattaatgagagatatgagttctttgcttcgtgtcactctactcttataaatatattaacccctacttagaccctaatcatataagtggtgtgcatacattattagcatagttctctcttacagtcttcccctgggattaaataaatacgataacttggaatactcccaggtgaaatgctacaatggtatatccgtgcgcttgcggattcttgtaaccatatatataccaggaccatttctagtgccattgttgggatgcatgcctggtatgatatgatttggtaagattgtgatatcgtaatcctgcacacgcatgagatcaatgcattgactctgcaccctaaacactgaccagtttaaaaatccattctatccaattaagcatttatggtaaaaatagaatggatgcgaaaattataactagccaatataggatcggttcaatatatatatttggagaaaagtaaagcattacattatctagtaattaacaggaacccaaaatagtagaccaattattttctacttaattggatgagtttacctatcatagatgaactcaaatgatggggattcaatggaataataaatcacaattaattcatagatgaaatgcttgctatctgttgcctgtagcctccgtgtatatattggcttagcctagatgaaatgcttgctatcttatatgaattgataaacaggatcaatggaagagaagagcattcggaacattgttccaatacagtccatgaacacgacaagtgaagcgccggctattttcccttatccgttacaagagagtgtgattcatgcacttgctgcaagggaagcaactgctttgcatcgtcatgctgctacgagtcaatatgtaaccagatgcaaccaccaaaccattgcataaatcggcggatctcgtattgcggttgtggttctagtagtatctaatcatcttatttctgcaataataaatggatggctgtcgaggagtaatcctctctagcgggagaacgtgagacccccctttgtgagttcggccaggggataaggtgcgatgatcaagagcctatctccgccggggatctagctaacgaggtggttcgcaagcgagtaagagacaagggattatacaggttcgggccgctaggaagcgtaacaccctactcctatgtgtggaattaagcttgtgctgttacaagggaaatccaaccctagactcaagcttctcaagtgttgtcccttttctcggtgggtaaggtcctccttttatagttcaaggggataccacatgcaccgtctgtatatatttcatcattggagggggggggggcacacaacctggctcaagccaccgtccatgccttcaaccggaagcaaggcggtcgttcgcccccaggtgggtcccagcggggacatccctgtcattccctcttaatttcatggagacttttgtggattcatctcttaatttcatggagacttttgtggattcatgcacagggggcacgcttggctgcatgccgatgggacggggcatacctgcccccactccgcctaacacagggcgggacgtgggtgcgctgccacctgtcccatccgcctgcgactggtcataggccggtcaaggccgattgatgcacgtcaatcgggcggcgccacacgcctacccacgccgcataaaacgcggcgagggacggttggggcgccgctcattaaagcgcttggcagcaccccttcctccgcctactcggccgccatgtggcagccgagtgagggcctcggggcggcgcactccaagggcccgaggggtgcgacggggcaccccgaggccccttggccacttgacgactgcccgacctcccccgagggggagggaagcaggctgcgcgaccacgtggccagatgaaaggattctttccctctattgtgcgtacccccgagcccatatcaccgatagtagcccccggcactacgtctgaccgtgacccctccagggctgtgtggttcgatgcctcataacttctgtcttgtgatggtgggtcccgtgaggagttcaaatagccgtcatcggtatacttagttcaagcgcccaccatgatgatgactcgactgctaataactgcgccacgcatgggggcgcgtagggcgggaagaccggggggtctgccaggtcgtgcctagaataattatctgccgtcgcgttgactacctgactatcaggtgtgcgaggaaacgagactatcggtgggcccgcccagccacaaccgtaatcatagcgcgccccgcgtcgattatgccgctgacaggcgcattaaacgcggggtgtggatttagtggggcgagtgggatgagcgggcgcgaaaaatgaggaggcagctgtggttatgggaaacgaggaggcgggcgctagcgaggcgagaataaaaatgaaggaaggaagagagctcgtatccttcctttcgccattatcactctcgcacacacgctcctctgcccccagcgttccacccttgaccaccgcgcttcactcgcccaacttctcgctcatcctcgccgattgccatggcccaagacaccggcaacgccgttctcctggcttcgcgcatcacggcgcagaaacatttgaacctcatccgcaggttcatgccgaagggcgccgtcgtgagggtgggggagtcatggcgctagactcggaagcccggacaccccgtgaccgccattctcttctttttccttgctttcttttttgtgcttttgtaatggacgcggttgactgcaggctttcgtgccgcccctgttggatgtacataagtcttcctcttcgcatttccgcactctttttatccgtgaatgcctgcgacaagggaggatagggaaaaacgcgcagtcaatttccttgcgggtgaatcgctgttttcgttccttcgctcccccccctcgggctcgttcggatatgggaagagggttcgcgcttaacccccggcaccaaagtggcgaggggcagagccgtcaccttgggagaaccgctcagtggggctggccagaccggagctaggtgaccgggggtcggggatgaccgtgtgtaggtccgtccgagcccccagggttcaccgcagttcggggcgcggcccacgtccgggcttccctttggcacttttcaggttgcccgacaccacctaggggccacggtaaggacgaaccacccctaagccggaacgagacttgaggaagggaacgaaaaagtacacaacaactttgattaaacaaaaggatttcttgctggggagaaatggtaagatacaaatattgacaaaggcagcccccggccaagcccgcatggcccgaggggcgtgcggggttggcctgataccaaaaacggaaaaacaatcaacatcacgggtagaagcggcgaaggtgctcgatgttccaagggttaagcagctctgtgccgtcttccgtggccaatcgaaccaagcccggccggtggacaccgatcactttgtacggtcgttcccacattggtgaaagcttgctcaatcctaagcgcgactggacgcggcgtaggatgaggtcatgggacctatagtgaccgggcccggacgtggcgctgatgatagcgccataggctctgttggtagcgcgccgcccgaacggccgcacgccttcttcgctcttcgaaatagtcgaggtcattgcggcagagctcgtcctggtccgcctcattgtacagcgcaacgcgaggcgagcccagggagagctctgacggtaggaccgcctcggtgccgtataccatgaagaaaggggtttctccagttgcacagctcggggtcgtccgattggcccacagcaccgtgtgcagttcccctacctggcgcgctagctgtcgaggagtaatcctctctagcgggagggcgtgagaccccccctttgtgagttcggccgtaggataaggtgcgatgatcaagagcgtatctccaccggggatctagctaacgaggtgagcgtatctcactagtggagataggcacatctatgacaatctacttttgtcacggaagacgcgcaaatcgtcataaagtaacttctatgacgaatttatgacgaaatgggattcgtcatagaagtcgcgtcacatatgtttttctatgactaaacagtagatttcgtcatagaaatgcttatatccatgacgaaggtgctcgtcatagaactgctttccagctggctaggacagacgtcgtccatgccacgtggctatcacacgtggagtccatgttggctgtgatgtggcggatgacgtgtacgccacgctggatcatcatctcccgtacgctagagccaagtggcagtcgtatttaacgccacgtgttggcatttggtatgtccacgtggtggtgcaagctgatgccacgtggtcgaacgtggtggcgccacgtggcagccatattaatgccacgtgttggcatttcttatgtccacgtggtggagcgcgctgatgccacgtggccaaaggtggagacaccacgtggcagtcatatttaacgccacattgccgaaggtggaggcaccacgtgctctcattttgaagcgccacgtgtacatatctgatttgtgacacacgtctttacctgatgttgccacgtgttgatttgtttggatgacacgttagcacagtagggatgacggcccgctcattttttttttcttagcccagcccatttggccacatacttcacatattgttgtggcccatcccactatgagatctaggaaatttttagcattcacccatttcaagcaacaattaatcagaacttcgcagcacataagaaaataggcccaacatcaagattgatcacatggacaaacaatcagaacttcacagcacattacaaataggcccaacatcaacatatatcacatataccaacttcacatagcaccatattacaaaaaagttcacagaacctagcacacatatgttcacattaagtccacaaaagtttgccataggatgacattaagtccaccatagcaccaaacatcatttcacataatcaagtccaccacatgacaataagttcacagaaccatcaaacaactaatataagtagatggagttcatcacagtgcagaagatcataaaggagactaggacagatttaagttaccctgggaaaggctcaagatacatcgaaggagcaaattgttctcttcctgctgctgcttgaactctgccaactccttttgagtctttgccagtgcttcatttgcaagatttgcttgttcttttagtgcgacaacttctgcatggagaatggctgaactttgcttttcagctgcaagttcttcctgaagtgctgcttctgtcggtgtcactgatttcttggagctcatctgcagaccagcatttttcaaaaacgtggtattggagttgtcccgagagagaaccttggacacaacttctgcactagttcttggtgtctcaccatcaggtacaggttcttccataatagctttcatacttgactgcagcaatgattgaacattagctatgaaattagatacatgaaaaactggcagctgcataacacattcaaaatactggcagctgcacaacacattcaaaaagtcactgaaaactgatggaaagctaccaggaagcacaaactagaggtaaggaaacttgtatagaatgcaaatttaaccaaatttgttttccataagccaaaacagaaacaaattatatgagtaagccaagcattcccatatttagaaatattgcattgccctcttaactgtgaaagagaccagaaacattttgagctctaactatggtagaatgtaattattttctatctagcctctagcaacaatgcaggccaaatgtttcttgacagaatctaggatactgttttagcatatatcagaaggctgactttagactatatttgattagctttcatggcagcttttgattgatggaacaccctggtagctataaaagaacaaggttttcccctcaactactttcataaaatttggagggggtgcaatgttacttagcgttggttattttctattcctcctatgatgcctaaatattttccctagaaaccactaatgtttagaaagaaaatactagtgtggagtacataatccctcataattaagtttacttttccaagttacaatgaaataagttttgaagtagtaaaggctgaaatatattcagtcttatgttcatatgattcaaaacctcaatacatgcaaacaccactacagcagcttaggtaaaaatgagttttcatgaatcacaccctcaaacccgggatattgataaaaatacaaactgcaaccaggatcaattgatgaaaaaatgtttatgtagcttatttggcattttaacccaatctcaacttatgttgtatatggtaagttgtctagcgacaagtttccagcagctacaaatttagtttggtatgtattctaacattgttagagtctataaattccattaagtctgtaatgatcttagctgcaaatatctctgcacactaaggacagaaattatcctatggatgtaaatataaaatgagctgaattaataatatgttggcataggtaacaaggaattgagttcaatgttgtaagaatatattgagtgacttacaattgcatctttggcagcatcacttagacctttttccctactggtatggcagtcctcaaaggcatccacagcatcaagctctacaaccttgttattctccttctatttcagtacagaaaatgcagatcaattattttatatatctattacattagataagtggttcttaactacaattaatgctaaaagataatgggaacttacgtaagcgtgcaagtgtgcagcatagctgcgagatcccgtagcctgatggaacctaacattaagccggttttgcttgttctgttcagagatttgctacaaaagatgtatgtgttagacatagtcgcaggtataaaatgaaacaaatatgtcattagagatgacataccatattctttggatttgaccactttgcaacaagttccagccactgttcatcagtcatgctacttatgggagaggtagttctaatctcgttagcaggtactccattgaagtaggccttcttcaaattataccgtgtttgtcgtatccctttctgcaatacatcagcacaagcatcccttgttggctggtgtttttggttaatggccaacctgacctgatggtttgaattgcaatcattaaggagtaacactaggtcatataatagatgaaatataaaagaatatagataggctcttacagataacttgcccatgaagttgttaatatagccttcatcatccttgtactgcttccaatgagggaagacaggaactttagtcctaatgataacaccagcctctgatgcaaacttggcagcttgcaccggttcatctggccttttcttcccttcggcaacagcaatgggcattcttcccatagctttggtcatcttgtcaagcattattcctgcagttggtggccttgattttcttgtgcctcttcgtataggtactacagagtattcaattacaatgttagcattcatcaaatagttaaaaataataaatttctcttcgttgaactaacttgccttcaacatcagaattggtttgctgtgcaggttgctcttcatggttggcatcatgtccatatgaccagtccatcaccgggctcgggggcctgttcacatcattatcttgaagcaaatgtccactgcccacatcttcatcaccattgttttctgtttctggaggcagttcttcatggccattacctttaccttgttctgctatgagttgccttttcgctgaccttgttgagactccaggaggcatttcggttggagcacccgccctcactctctttgatatccttactcctggtggcatcttgagggtaggtttcttcttcgtcgcacacttctttcgtctagtttgtcgagggtactacaataataaacacaaaagttgtaagcatgtgaataaattggcaacaatcattaaaaaaataatcaaatgctgcacaaattaaatgcggaaaaattattgcagatatcctagccccccccccacagccaagatagaagaagcacctcaatcattatggggacgggctgctccgcttctaaatatgaatcatcatcacactgaaccccttgttcatcatcttcagggagaaactctgatgtgtcagaaccttctccatgacttttcttggtgcctgagttttttgtctttgaagatgcatgttgtgtttcgatatgtttaatagtggcagctatgtctttgatgccaagttcatccatccttcttatattctgcaagattttctcttgccgcgttctttcatattcgttttgtgcaggttcttacatgaatacacatattttaatggtcagaatactagatggcattttgatggcatttcctaagcatataagcattttcagaaacagaaacaataaagtatctaggcatttgggatgaaaaaaaaagagaccatgctcatcaacattggggatttaatgatcaatggtgaaaaacaactttacttcaatatctagtaaaaacaacagggtgattcacttttccattttaaaagacaattttgatgagaactctggaaacacttttacagtgaacaacattggtcatataaatgatatagccattatatcattctctttcacctaataaactgtatctatttatacgacctcaatcggattgcacacagaaaattcttaatagaagttggacggcaaatcaatccacatgatgtataacatctaatagcttgagacagtacacataaacatctgagcttgagacgacaagataattttgcgtacctcgtgctactggacgtcgacgtcttcccatcggctaggtacggcgacggtgcagggaccttgtcgatggggtacccggctccggtgcggcagtaggcgtcgacggtgttgtgggagatggcttcggtgcggcagtagtcgtcgacggggtaccggctccgatgcagcggaagtcgtcgacggcgtagtgggggaaggatctggtgcagcggtcgtcgtcgacggggttgcagcggaaggcgtcgttgcggcggctgtcgacgacgaggaagtaggggacggatctggtgcagcggtcgtcgttgatcggtttgcacgggaaggctccggcgcagcggtcgtcgttgatggggttgcagggtaaggctccggtgcggcggtagtcggcggcggctctggtagagcggcgccccgatggtgtggcggctggatttggggattagggtttggtgggtgagaggctttgtaaatatatagtggttgcacaaatgcccctgggtgttgttttgctcttcgttagatggaggataaaagtgacatttcccattctgatttgggcaaatgggcggcaatggaatcttttggggctgtcattggcggtaggtttaggcgccgaacgaaaaatcctccatccatgagtaattaacattatccataaatcgaaaacattcaaattatactaatctatctggattaacaatttgactttaaaaatatactccctccgttcaatattatataacttgaaaatttggattaagggggtgtttagttccagggtgtaaagtttttaaagtatacggacacacatttaaagtattaaacgtaaactaataacaaaactaattatagattatgcccgtaaactacgacacaaatttattaagcctaatccattagcaaatgtttactgcagcaccacatagtcaaatcatggcgcaattaggctcaaaatattggtctcacaatttacacgcaaactgtgtaattggttattttgtctacatttagcactcaatgcatgtatgtaaacattcgatgtgacatttttggaaaaaaaaatgtgggaactaaacaccccctaatattatttttttaaagcaactttcctataaaaactttttggaaaacacagacaatttagcagtttaagaagcattcaccgattaatcggaatacggttgtcagacggaatacggttttccacaacactgctttaagcatgactgaatttatttttagaaactagcacctataatatattataggcgtctttttttaattaattggcacctatgacaaattaaaggtgttggtttttttttaaaaaaaaagaaaaccaacacctatagtattggtgtcagctcttctatgtcgcgttttccatctactccctatccacgtcgcgaaatttgccgacgctttccctttcccgtgcgtgggagccgccgccgctgcactcgatggatatgatcagtgatagggaagggtgctactaaccgggactcgtctctgctgtggacgtctaccacaggggcgcggtcgtcgtctcccatgtcatcgagacctccatgtcatcctcgtggttgctcacctcgccattcaccatcgacaccgtggaatgcaagaacctggttccagcctcggtggcgttgccagtggatctaaagccaagctggaggatgatcggcgacggaggatttgagccaggcaggtgataaaatcgtctcagtttaccattcatggatactccctccgtcccataaaaaaatcaacttctggctatgaacctggacacatgttgcgtccagatttatagtcagaagttggttttttatgggacggagggagtatataggtccaattgaaaattgaattttaaaaattttatgttcactttaaactgggtgaaccggtcagtgtttgtaggaaaaatgttggaccggccggttttaatagaatggaccgggtggtttggaccgacttacccctcattcttatcggtagaactgacatataacgagggtacaatcgtaaatcaacacacatataacaacggattcagatccaaaccaaaccaaatcgtaacaaaaaaaaaagagcttcctcctccatggcggtgagaattagcaggaagcgcaggagcccgccgacgcgtgggctggggacctccacgacggcgtgctggagcgcgtcctggcacgcctcccgccggacacattcttccgcctccacgccatctgctgccgatggagcgcggccgccgcgtcaccacacctgcggccgcatcccgtctccgactccgaccgcatcgccacagtagtagctggtccaggtgccgcatctccaaggccgatgctcccagcgctgctggtgaagaggacctggtgctggccatgatcgagtagcaagcttctggtgcttatgctgcttgcttcctggatgtgggcgacaacagtagcttgagaagaaatgatacttctttgtacagcttggtgaattcagattgagatcgtgaatgtgaataaacttatggctgattattgtgttattttgaaaatgtgatgtcgcgtcccaaaatgactctaaaatacatcctcgaaattatgcctagaataattaaaatccttttgaaagcctcccacaattaaaatgtgcaaagttaaaagtcaaataaggcttggaggatttttgtatatttcctaaaagcctaaaatgcgtaaataaattttagtggaattttcagagcacaaataataattattaagaaataaacaaagttaaaatgattttataaaaagaaaaatcctaaaaagtcttttccccccctccccctcttgggccggctcggcccatctccttccctctctctcctcctccccgcggcccattcggcctcctccccgcgcgcgcgccgctgacgggcgggcccgcccgccaccctcgctgacgggtggggcccacccgtcatccccttcctcccgccgctcccgccgcctcgcccgtgccctagcgacgccgccgccgcaaatcccgccgctcccgtccgccccgcgtgcaatcaagaggggggaaatattccccgtgattccctccctctttccccccattttttccctccctctctccctcggattcgttcggaatctttccccctaaacctcgccggcgcatcaatggcggccggatcttccgcgcccgttcccccctcatccggccgacctctctcactcccaaccctatataaacactccccgtgcctccctccaccgtttccgccactcgccgctctctatctccgccggaatcaagctcgcgcc

SEQ ID NO: 10329 - DNA, 29245 bp, Oryza sativa
  unsure (1)..(29245): unsure at all n locations
aactgctcctgctatcccagtaagttttcctttgtctcaacaattagatcggctacattttacccagctcttactctttccgaaattgtctctacaggttctagccgatcttttctcttttgacatcagaaattatctcgatgaggcagaagaagacacttcaagcaaagctctagctcccctatctgacgatgtgagaagaacacttgaagatatctctcatcggctagaagcctcttctttagatagtttggtagttgactgtggatcaattaggacacggctgcatgaagttcaagctctgattcccgaagatttggccgatgtcctaactccagccgcttatctcgagcaacatcagttcaagctggaaaaagccaagctaagactagtcgaacaccgtgagcgcaaagagattgaggccgcaatccaagctaatcggcagcttgtgcatgaagagaagaccaaacttgatcagctatctgaaggtccgatcaaatccaatattgatcggctcgaagctcgcaagatcgatctcttggcacagcttgaagaatgcaatgctgaactagatatggagcacaaaaagctagccgatctctcaaaatctatcgaagaacaaaaggtaaggctcaaatcggctatcaagaatgttgctgacctaagcaagtccctgaaggtcatctttggaactgatgctcaagatgcccaagctattgaagaagtagaacaaattaggcaaagggctattttggctatccagcgatacttgtctcaataacttttgtgtaataggacttagaaatctttgtaatcggctaagatactctagtactttactgtcttgacaatcctttgtgccgattaatatgactttgaaattcgctcaaaaattttttgcattttgatatatatgtgcccccctaattttacaatgtcaaaagcattgataaaattataaaaacaactaagggagatataacaatatcggccattgtacatcggcaaaccacaaccgattacaacatgaaaaaacaactaagggcgatataaccatattggccatctcaaggcgatgtaaacacatcggctgtcatgcatcggcaacactagccgatcatgcgttaacccaaacacttgggtaatatttcttcaagtacttgccattgagcgctcgtccatagacttcaccatcaagcccttgcaacatatatgctcccttagacacaaccttataaatttggaacggtccttcccaattcggcgaccacttgccgaatttactatcacgagtcccaatcggcaaaatcaatttccatacaagttcaccttccgaaaaatctttgggtaccactttcttattgtaataccgagcaacacgttccttatccttggtaacctttgcaagggctcgcaatcgtgactgaaccagatcctccctctcatcggccataaggttgtaatactcatcagctgttaaatcattttgtaattccgttcttcgagagccgattctaacttcccatggcaaaatagcctcatgcccataaacaagtttgtaaggagggacttggatcgatccatgacaagccatcctataagaccacaacgcttcagccaaccgagtatgccattgccgaggataatcagaaattttctgcttaatcaatttggtcaaagttttattagatgcctcggcttgcctattagcttgtgcataataaggtgaagaattcaataatttgatacctatactatcggcaaactaaacaaactcgtcggacacgaaaattgaaccccgatcagttgtaatagtttgaggaataccaaatcggtagattatatgttcttgaacaaattgaattgcatccccagaatcaactttcttcaaaggaatcgcctatacccacttggtgaaataatcagtcgccactaatataaacttgtgtcctttacttgatggtgggtttatcataccgatcatatcaattccccaacctctgaatggccatagcttaataataggattcatagccgacgccggcgctcgctgaattgccccaaacttctgacaatcttgacaccccttataatatctgaaacaatcctccagcattgtcggccaaaaataccctgcatgccgaagtaaccacttcatcttatgagctgattgatgagtgccacaaattccttcatgaacttcgccgattgcaactttagcctgatcggtactcaaacacttaagtaacactccaacaatcgtctaataataaagctcatcatcccacagtgtatactttaatgccttatatcttaatttcctagaagccgattgagatggattatgcaaatattgatgcacatcatacctccaatcatcggctgtcattgctgcaatttcaaccttaacatctttgatcatcaacttataccccgatgccccttgggccaaatcattagcttcaatattttgttcttgagacacatgcttcaaagtaaccagccgaaattcattcatcaattcttagcatttctcattataaaccattaacgtatcattcttacattcatattctcctgccaattgattgattaccagcaaagaatcccccatgatttcaatagcatcggcttcaacttccttgagtaattgcaaccctttgagcactgcctcatactcagcttgattattagttgcatacggtttaatagtataagccaactcgaaacatgcccccctaggggaaattataactaggccgataccacaaccatgagtacacaccgatccatcaaagaataaagtccatggcactatttcaaccgagccgattgaatcatcacgatgttccacaataaaatcggctatagcttgtcccttaatcgccttcggtgactcataccgaagatcaaactcggttaaggaaaatatccactttccaacccttcctttcaatattggagccgataacatgtatttgacaacgtcggccttgcatataacagtacactcgttggatagtagataatgcctcaaccttgtacacgaaaaatatagacacaagcataacttctccacaggggaatatctagtttcagcatccaagagccgacgactgagataaaatacaactcgttcttttccatccaactcctgaatcaagactgagccaattgacttctcaccggccgacagatacaatctaaaagatatccctttctgtggaggaatcaaaataggaggagagctaagatattctttgatattatctaaagctttttgttgctctgccccccaagtaaattgctgatcggccttcaatctcaacaatggtgtaaaaggttctaactttctagacaaattagaaataaaccttcgaacaaaattaatcttgtcgatcatctcctgcaattcggtcttgttttccgggggctgaatcttcttgatcgcattaacactcctttgagtcacctcaatccccctctcatgaacaagaaatcccaaaagctagccagccgatacaccaaaagcatattttgtcggattcatcttcaggccatattatctggttctctcgaaaaccttcctcaaatcggctatatggtcctctatttccttagacataacaaccacatcatcgatgtagacttcaaccaaccagccgattagatcatgatatatgtaattcatggctctttgatatgtagctccagcactcttcaagccgaaagtcatgacaacccattcaaataagccgattgcaccagggcctctaaaagctgtcttatggatatcttctttagccataaagatttgattatatcctgcgtttccatccataaaactcaaaattttgttccctgacgcagcatcaaccagctgatcggctactggcattgggtattcatccttcggtgtggctttattcagatctcggaaatcaatacacaccctgaccttgccattcttcttgataactggaactatactagaaacccattcagcgtatcggcaaggacgaataaaaccagcatcatacaatcgtttaattttagctttgacaggttcaagcatatcggctttacatctcctcggaggttgctggtgtggcctaacctctggtttgataggtagccgatgttctacaatcgatcggttgagtcctggtatctcgtaatactcccaagcgaatcaatctctaaactctttcaagagctctatcagcttggttctaaattctggagataagttcttactaataaatgtcggccttggccgatcgcctggacctatatctatttcttccaaatcatcagccgacatgaaaccttgaccttgcttgtcatcgagatcatataccgtgtcctaagtgtagacatttgaaccctccacgacgccctcaaaataatagcttgggttctccatcttcaattggctgtatatcagaatcgaacaattttagaaaatctccatcccaaacttttccagataaacaatcaaggccatccatctcccaaagagctaaatcggcactgacaacattaactgacctgtcggctggcacgatctctatcttgtcgccttgccactgaatcaaacattgatgcatagttgaaggaatgcaacaattggcgtgaatccaatcccttccaagcaacaagctgtaagaacccttcccatcgatgacaaaaaaacgtggtaggaatagtcttactgccgactgtcagctccacatttagaacacctttggtttccgatggattaccaccaaagtctatgagcaccatatttgtcttgatgagatcctcggcatttctacccaacttcttgaacgtagcaaaaggcatcaaatttaccgcggccccactatcaaccatcattttagacatcggcttcccattgacatagccgtttatatacaatggtttaagatgccgattctctgtcccctcaggtttctcgaacactgcctgttctggtgatagaaccaacttagctgattcctcttccacctcgtcgatatcggcttgatcgatcccgaattcggctggcaaggtaaagaccatgttaaccggtgccgtcacaacactcttcccctttgccaacctctttgcctcatcggctgcaacatcatcggctataggaacctgattcttaacacgccactcctgcctcggctttgctttcttcagccgatgattaatttcttgttcgacctcctgaaggcgctccctgttcctcaatctttgaacccttctcttctgattcttcgtgaaaataccagaaggacaccattgattctttctgattacattgtcctcttggccatgatcttgattcactggacccaatctttgatgaacaaaaactcttgtctgccatagccgattgcccttattatatgatcagcttgagctctcgatgatgtcactgcacccagggcagtttttaatagatggcagcctcataccttcattccagcagaatctaaagaactcacaaccccaatgaggatcaaaaccaccatcgtattcttcatgatgcttctcctgctgcttgtcatacttcctctgatatttgttaataaccttagctgaattcacctgaaaacctcttgcacggaccctatcggctgtttggccagctgtatgcaccatattaacaggaaaatggttaccattgaccttcattggctttttggaatcatcaaacctaatcttgcctccctcaatggccacctgaatctgctgtctaaaaaccttgcaatcgttagtagagtgggatccagaattatgccatttgcaatacctctttttgcctaattcctcagccgatggaattgtatgaccagcagggagttgaatttgcttctctcggagtagtagatcaaagatcttgtcaactttagtaatatcaaaattatacttctcttcttttctagaactctttacccattagcacggtatgacctttttactcctcacccattcggctgcagctatttcagaattgtcctcatcgtcatccaacccatacatgtaacgacaaacatgattaaccttcttagagtttttcctaacttccgcagacctatgctcatgcaaggttaccttctgtatcagatatgacaagctatcaaagtcttcagacgagaatttctccctaatcggagcaatcataccctgaaaggccagatcggctaactgggcatcagttaaactcaagctgaagcatttgttcctcatcttcctgaatctctgaatatactcgtgcacaggttcatcatgccactgcttaatcgccgtcaagtcagataatttcatctcatgaaccccactgtagaaatagctgtggaattgcttctccaaatcggcccaactattgattgacccatacggcaaagaggaaaaccaagtaaaagccgatccagacaaagataaccggaataaccaaaccttcaaagtgtctacagccgatgcttcaccacactgagctaaaaatcggctaatgtgctcataagttgacacaccatcttgtcccgaaaatttggagaagtctggaactttgaattgattgggaagaggaactctctcaaaccactcagggtaaggctgccgatacaagcttccagtctcttttggtttaagcccaaactgttcccttattacgtcagcaatcacatcggcccacggtcgttgctgagctgctccctgtgcctgttgttgcatgggctcgaactgaccatattgagacgcaaactggggttgagccagtccccctagttgatattgggcttgcggggaaggaggctgatattgataattcaagttgccctcttagtaattatgaaggttcggctagatattacgtgctaagtgctcaggaacaacttgaggcattactgtgccatccggctgtatgtggtgaaccaagtgttctgggacaacttgatttaaaaattgttgtacaggctgaccaccaggcgttgcaaacccggccaatgcgcttattgaaccttggtgctgaatcggctgaacgatttgctgtcttaacggcgtctactgaatcggctccataggctgctgccttggtggtgtttgctgaactggttgcacaacctgttgctggattggttgtacaacctgttgaactgggagtgtctgttgaatcggttgctgctgtattggatcgacagcaggttgaggttgcagaaacgtggcaacaacctgatattgggtcagccgattcgcaacctgcccactatgctatggctgctctctcattaacaaccgagggttcaccagctggcctggtgccatcgctgacggagcaggcaagggagtcgatgccggcgccatcggctgagctgatggtgcaatggagggaaccgcctgaatagatggctgaacatcggtgatcaaagaccaataatttggaaagacacctccttgcaaataaactgggcctgcagcctgatgctcagctattgaaccatcggctattgacttcatcatgtttgataaggtattgactaactccccaaactgattgatcaaagcatgatgcacagcgttgtcaacccagtcttggaaattattgaaaaatcttgtgccacatcactattctgattaagatttcctccttgctacccctgagcactatcaccttgaactccatgcactccgtcaccttgaactccatggactccttgagaattgtcaccttgatttcctatagaaccatcggtagcacctttgtcactcggttgagccgagccgtctggagcttgtttcccatctccatccttagaagaactggtcccaggatcatcagcaaccacttttattttgtacttctaaacaagtgtccccttgcgggtctacatgaatgagttcaagaactgatcccgtgcttgctgcaacattgcttcaaaatctttcttctgctcaggtgtgaatttttcctgatcaatgggcacgacgtttccttcattgacgtcagtcaatcccaacttctggatcatttccttaatagtgcctggactagccgaggatggcgacagcggtggtttctcggccatgaggaagaattgcttgctgacttcttatcggtcctactggacgtgccaaaagcgtgttgacagaaaacacgaggcctgggagatctgctaaactccagtgcaggtccaaagctcgccttcgagtgtgttagcgtgccagttgatttgatcctgcaatcaacaagaaatagaaacaaagagaccgcgattaaatctataaatgataaccgatcggctaggtgccgatgacatatcatttatctttgagccgatgtcatatgtgaatcgatcggtggttgtaaatagacaataaagaactaaatctattcgatcggctgtagatattaacaatgtatagttcttatatcgatatatatttaaatcaagtgactgggatagatcggtcgccatgccgagacagtataaatcacttagatcgaaatatatattaataacagcattatatatgtttatagcatagccgatcagatagatctagcatgtatcggctaatactccgatactactctatatcaagatatcaaaacaagtataatgtatcaaacaaaagactaatatacttaaatgcaataagatcttgacgtaaagggcggatttaacatgtcaatgaagcatatagaacgaatatggttaaatcagataagatcggctaaaactctgatactactctaatcggcaaccagaaggcaggctagagattgaaattctaaggacgacttaatagatcaaactcaactgatgcagcattaagtatgaaaagaagaacaatatctagacaatcaagccgctggatgtttcataaagtggtagatatcttatataatctaggtcaacatcgctatttaacctaatcggctgccttctgtcgacatatgttagccgattgtaggttagatgacgatattgtcgaagattatgtaagatatatgataacttgacgaattacatagacaagattagagtgtcgtaaagatggaagcactaatcccgagaacacaatccatcataacaagttttacctcttgttgaagatcgaaaccgatgcagctcaacccgaaagcaagaactcgtcgaaataaaactaaagcaaaaaggtggcgatgcgctgagattgtattgaacgtgtgtagattccaaattacatagggctcgggtctatttttacctaagaattacaagatatatccataccggacacgactactatctctaacaaactctaagataccataagtctttgcggcagacttttgcccaagcatatctctaaggaaattacataaaatatcctaattaatagatacaattgccttctcaggactctatccatgtgcggcaatcatcttaaagcacctcaattcaacccgatgtcatacaccaagttgtattgtcggaatcggctgcatcggcttacctagtccgactcagacccagccaatcctaatcgtagccgatctggactccagccgattcctgctctgttctcgaattcgatctccgcctttgacttcacttcgatctaatcttctttcccgatgtcgatattaccaaatttggttgttaacaaaaccattagattaaattgatcttagaacaaactaaatactacgaggtcccacctctcaccttcagtacgcacctacgtacgtgggtacctactcttcccctcctcattttcatttttccctttatttttttctccatgtatatgcttccctccctttcttattatgtcatgcgtcttcatgagatgatttaatcacaagaattttgagtatcttgctcccgtatttttcatttgtaaccatactacaagcaataatttattatttactcgagaaagaaaacatgattcaaaagtcgtaagtacttaatccatcttctattcaaaagtttgtgaatggatttttaagataccttaaaaaaatagaacccttaaattattaaaaaaatattgcaaaataacagtatccgaactttagtttaatattgcaaaataacagtatctgaactttagttttcccttaatttatgagacaaaatttttgaacaaacaataaaaatcttaccttttaataatataagtgcgcgcatgcgcggaccaccttcctagttttagaaaaaatccatatctacttcctcctctctagtggccagtcattgttgggcttggcactaggcgctgttcattgccaccaacggcctgcagtccattgccatcgtgccatgctgccattgaggaaagtcaagtttgaccgatgaaaggccgccactgtcatggatgatataggggagagagaggagataatgaccggggaaagagaaagcaaggtaagctctacagaataaggcaggaggtagtgtggtgaagaaatgtgtgggatgatgcttttgatattttaccttactttgaatgcttgatttgaagcatctccgtcctgaaatattttggagtagttattcccttcatcccataatatagggaattttagagggatgtgacagatcctagcacgtactacgaatctatacagaaaacctatccagagtcataatactaggacatatgttatatccctctaaaatctcttatattttgagacggatgaagtatttattattctgaattttaattgtttttcgatcgcaatgctagacaaaaatggtttggacagaccatgttaaataggctaatcaaactttcaccttgttgaaattaggcaaaacataatctaagtaacttgtcgtaaaagccatagagtgaaacaagaaagctgtagtaagtataacacccatgtatgtaatgagtgtgtcgggcttgcgatgacgcaattaataatctcatctcatgatgaatgaccgcgcggagagtagaggttgatggaggagacaccgaggtaggcggcgagtaggtcctcgtcatcgtcctcctgcctcgccagcgcctccttcattgctggccaccactcgggtaagtcaccgctgccaccgtcgtcgtcgtcattgcacattgcattggtcgttgccagcggtgaggacactacttctgctaatcccgtcgattgactgccgtcggcagcatcgccggtggtggagttgcgggcgaaacggcccttcaccctaggccggctgtcggcgagcgtcttccggcaagcatactgcatgcatatgcaatccaataatatccaatattagtatatgtgtgtagtagttagatagagaggtacttaaaaaaaagaaaatagcaatgcagacaatatgggcttgtgggttttgagaccctcttagggttttcattatcggtagcaaaaagtattggagggtagtggtaaacaagataattggaattatcggaattctaccgtggatagataatttttttttgcaaaatttgttaagaaaatcacacagactctatccaaccaatttggcataaaaaataacaaaaatatatatactccacacacccaatacatgattcaaaaaattacattttttttaccgatacacaatacaaactctaaatcacgattgttgttatatacttttgtatctaacttttgttgcgaaacacaatacaaacataaataagtgtgtaaaagataaattaattagcaagtgggcttttatgcgagattgtgtattatattcttataaggaaactgaatatgtaatccacgtacggtgatcttcctttcgaagttgcggtggtttcgcttgctccggtacttctcaatgcgctcctgccgctcctccgcactgtaccttcccaccgccgccgtcgccctcggaagctcctccttcgtcggtgagtggtcgctggacggcggcggttgacgagacgagactggtaagacggcaccatccatcctgacactattgaatggacgagatgaggaagacgaggaggtgctactgccactgccactgctactgccattgctaccccagctgtgatacatattttctaggttcaagctaccggcctccttgtaaatgtataccctacatatgactcttgaggatctctccatagctgccattatatacgatattggatttcatgtatggacgttcgtgtagctagagcctccacttgaattgtacatggagcatgcaaggaggaattgctgtttgctgatcttgctcctgcagggagtcaactcttggctctacaatgatttgacacgacttactagcttagtgattgtgttgtgccatcgtggatcaattgccaatcatgatatatgccaccaaatcttgagattcttctcgtgcatgctatgtctttcatgtcccatgacatccccctctctctctgttttctttttcttgttgagatcgtctcatgacatggtggtggatctcagactctcagagccacatacatatggcattattgttatttgttaaccatgcgtatgtcatgcagaaatcaaatgtgtttggcacatttcttaaataaggccctgcttagttcccatacaaaaattttacgccctctcacatcgaatgtttgaacacccacaagaagtattaaatataggctacaaaaataactaattacatagattgtgactaatttgcgagattaatattttaagcctaattgctccatgatttgacaatgtggtgttacagtaatatgctaatgacagattaattaggcttaataaattcatctcgcggtttactggctgattctgtaattagtttttttattagtgctcgaacaccatatacgacaccctatataatacccgatgtcgatgtgacacgccaaaactttacacccctggatctaaataccccctaagaaacaaggaaaagggttcgttttcactgacacaatcaagtttagtcacgcgttcaaggattattttctttttccccgaaagatgcatatccatcatatatactccttccatttcagattataagttgttttggctttgtcaaagtcaaactacttgaagtttgactacgtttgtagataaatatagtattatttacaacacgaagttagcttcattaaattgataattgaatatattttcctaatatatttatcttgaatttaaaatattactctttttttttataaacttggttaattttaaagtaatttaactttgaccaaagtcaaaacaacttataatctgaaacagagggattatcaaacaatgcatgtattgatgtgtataaaactcagacacagagtgagagctgccacagacacacatagcacaaagcatgtggtagaccaacgaaggaggcaccaatagcagtatatacaaggctgtttaagatagcaagtatctcattcgactatgtaataaacagcacaagtagaaaaagatgtgtagcaacacgggctaatagcaacgatagtgcagtgagacgattcagggaggcataagcaagttgaccacaaaagcatacgcaccgtaggctggctgtaccctgctatgcctttattctgcacctctacatcgcattacgcccaccttgcagttgaccacaaaagcaacaacaggctctaccactttgctccatcatgtgtacacaggattctaggtcggattgagatcctctaatatactgtcctctatgtgggtcattgacatatgggttcaacgggcctatataatggtgactcaaagttagaggaaaacaagtcagagaatcttcttccatgggtctaataaaccaagtgtttggctgactccaaggtattcaatattcctaagttaagcattaataacaggatactcggttgcagcgataaatgaaaaagaaggagctcctgcagttcttttatttatatctaaaatgggaaaacaaaaacaaaaaatgcacaagaaacccaccaagtatgatgaattgatgatcatgacccatgatgagacagtccctccagagtccaccatgaccctatgattagcttcaaaaaattgacatctcccaagattttagtggggaagaatgttgtccccttttaacacttgcagccgaaaatgtatagctcccaacaggtatatccatgttgtttcgagcatctattggacagaggttagaattttgttctagccgtagatccaaggtgctgcttttagttggaaattggttgttggcaaaataacttgaagtgacctagctagaccaaccgcattattccattctcctgttatgataattcagcgttttctgataaatccttaccgtagcccacttaagaatgcggtatatcatgaactcaccgaccttcaagtgggcttagccaaccaacaggatgaaatcaaagggcaccaagcattaacattgtagaaaatgcttggattgcttgctctaacagttgttacagttttcttttggaagcaacctgcatagattttaagatgccccaggcatgcctatttgtaaactagcactgtcagacagtgaaaataggtgggactattaggatagtggtgtagttctcttagattttcttttccttctagtaagtcaactataaaaacagttcgaccactatagcacgatcggaatgcaataattgctaacagagtaacagttgaagtatgcaaagaatttacagaaatgaggaacatataaactagtcatgcgcggttgtacaagaattggaaacgaagagacaaaagttggctatctgtctaatttacagcaagaagtctattatggcaggtcacagttttatgtagggtgaagtttgattaagattgggacacatgttagtgtagaataaagtgtgtttgatttttaggccccctttgaataacaggaatgaaaaaacggaagaataggaaaaacataggattctcataggaatacaagtgtaaaacagaggattacaaaacacaggaaaaatataggaatgaccgtttgattgagctgtaggaaaaacacaggaatttgaggagagataaagactcaaacgattcttaacatgaggttctacctcatgctaaatttcctccaaaacttgcatgggaagaggcattccatagaaatttttgtgatgaacaattgacatataagagtattggttttgatatttggagattattggtgaagtggttttggagataattggatttgcaggtgatgaacagagactgctgtattataggaaccggttagacctggcaagtgctgctggtcaaaccgaaggtgtgcgagcggtcagacaggctagcccgcggtctgaccggttcactttttgtcggttttggtttcgggttgtttcgttggatatccgtaggtaatttgtgtttatgacttctagatggatactatgcgtatgtaatactgttctttttttttgctaacaatgagtcaagttggagatagcttgtccttggaatatagtttcttggttaattcatgtgtaggtaatcttgacgtcgcgggagagtattgccggtgatagatcgggagtcaacttggagataaggtgacgtccaaacggtcagatatcatgcgggacacttaggctaaagattgatgtgcgtggttggaaaagattccatatggcatatgatggagatattgtgtacgtatgggatgcagagttgaatttgtaagaagtccaaatttggtacaattggagtttgtaaagttggtttcttgtacgggaaggtttcctagagagatttggacttcgtgtatgagtttggttcgtagctttaggatgcctatctcatgtataaatagagagggagggtgtggcctcccggtatcgctttatagagcactgagtcgagagaatagttagggtttcgagtttagtcgagatttttgtgaggagtgcttttgttgcactttgtaacacacatagagaagtaataaagttatcgtctactttgagagtttttcgatttgtgtttgctcaggttcggcggttcaaccggtgggacaccggcggtcagactgacggcgtcgcaccgatcagaccggcggcaactacaggcgacgacagcagatttcggctgtcagaccggcggcttccaggcgcaacttctccgatcataccacgtttcatcgattcgagggtaacttttaattctgctaaaagttttggtttttggatattacaaccattcaccccgcctctggttgacttagttattgttgttcgatcctacagttagctttggtaaaatgacaacatagtaacgacgaatgataagactatacaatatctagtgacatgcatgaaattttgaaaaccaatttccattagctccccacatctttcttttgtctacgctactggagaactgatctttcgtcgtggtacccaaaatcacaaatatctcggttagattaaaaaccgatactaaagatgctttagtatattactagttctaaaagtccaagtcactgaaaacatttttagtcagtactaaaccgattgaaataaccattactaaaggagggttttcaactggtgttaaagatcgttacttcactagaggtatgccaaatcgtatggatcaccttttccacatcaaatccattgtaacttgcacagtaaatcttgcttctatttatttgtggctctcattacaatttatatttcctaagcaaatcctgataagaattgtagtggcttaaaatgtagtaatgttctcttacatgaggtactgatacgtgcatttaatttgacaatttaaccctttccgaaaactaatctcgcaaatgaatcatggccaaaactttttttaaaaatgacccttttgttcagcgccaaaattgtatagcgctgaacttagacacctcagcgccacgtcaactggtgctgaatgctgtgccaccgcgaatgggaggctaagtcggcgtgccaatgtgcattcaacgccgtgctatttgatgctgatatatctaagttcaataccatacttgacattgaacaaaagggtcatttttaaataagttttggctgcggttcatttgcgaaattagttttcggaaagcgtcaaattgtcaaattaaatgctgatatgtgggctggctgattctagggcccacatgtcagatccgtctccggtggcttggtgggtaagaaccaggtcgctcgcaatgattcaggagcaccacggtctcacttgttggtaggtaggataggaaaggaggtgcagagagtgggatcacactggaagagagaaaaggaggaacttgtaggaaccacacacgatatggtatttatttaaactctccacataatatgtaaaaactctgatatgtccaactgtgtcacaatatatagctgatgatttattccttcttggtatatagggctgtaaaagaaaacgtaggacttgacagggataggagctgttggcttaaggtcataaatatgagctcaacactaaacgagggatcagatccttatgagcgaagctcatccatgctttgattaggccctaaatccccaacacatctatatctatctatctatttatctatacctagctaattaagataacatgatgaccatgttttactctatatatatacataatacatggatctagtctacctcctaatgaaatatataggttgtatgggtactcggtatctatatcatccacacaagtgcaccctaccgtccatcccaatctcatccacagcagcgccatggcaagcttcactacctccacatcaatctccagggctacctgcctcgctgtgcaagagttccacttccaggaagcatgttctggtggtctgacaactaagcagggggaacgagggcagcacgatgacagaggtggtcgtcatgggacgaagatggctgatgaggagttaggtcccgatcttccgataggtattgataaacagttgagttgggcggagtcgtgacacaactcgatccggcttctgaacaaacacgctactgaaccccgcaatcacagcaccacgtctcctctggttatcaaccgtgccgaaacccggttgacctcaccgagaaggctaatccctgcatgcgaatcgaagaacacaagcgagaataagatagattgcaaccaaattgcatatgaatgattaagcactcgaatttggggttccacaaaccgatctagcggcgaaactgttcttgacagaataatctaagcaaaacccgactctaaatggtgacggctactgaataaatatgattaaggatgtcctagggttgccctagggcgcacacccccttgagctaagcccacgacacaattacaaggcccaaaacacaaatcagattcggactggatgagatacgtggcttgttttgcagtttcccggcaacttagtaggaattttgatgtggaaccaaatccatcagaaagtagactccataagctttccaacaagtactcatgggccctgaaattccttctagaacagcggctaggtccgtttgaagttgatgctatcaggaggcctgaatccgaatccaaaacgtgtataacttgatctcttgtcttctatgggccaaaagtgacatggtgaggtagaagtagacttgtagaaggtcttgatttggtacccaatcaacttctttaatcatctatgcattagttatgctcggtctcttttccttcgcccaagcaagtacctctgtaaacaaaaacacacaaaactcattgtttagcaacgtttgttcaaatatataacaagtaaatctaatgtagaacacatacacctttatttgattaatatataaggtagtcatggttatatccgagctagttgtgtcctcatcgatggctgtgtcgatggtcgatgagatgagcatggcgattgagaggccagctaagcagatcgagatgcgatggcaccgggtaagatcgatctacccgctatgcaccttcgtcacttgatccatttgtgctctgtgccattctcttggcggagtcattacgcaacgcttccttttctctgactcatctgcaactccaccttgaccacaagttacctggatgctgccttgaggtggtcatccctgatggcaccaaacaaaactgcagccgccaccaaggacgactgctacttcccacatgtgaggttgatgagagatacaccagatgagaccactgcctcgcgccaatggcggtggttggaaacaaagctgagggtgagatgggggagagagcaggggtagaggaggaagaagagaggttgatgtcactaacatgttggtcctagttatttttatttaactaggaaggtagcccgcgcattgcacgggaatgtattttagattgtgtttaaaaaacttatataggcggaatatcaaccggatgacacctgccatgtttcaaaagtattgttactccgtaatttttcttcatcggtattgcttagataatttttccaagctatttgttagcttcaaaatatataatatttaattcatcggtataaacaattatgtatgatacgcatgaacacatgccatgtttcaaaagtatttatttagtttgtttggaaaatgtgcctaacaaattaagcgtaaattaaaagtaaaatggtttgtcttgtttaattgaatgtttagtggccttttttaagaaaatcctaaagaactactattattagtaaatgtggtttatttgtgtcatcaagttagtcctctttttagttggttcaatatgcaagttgttacatgcttacatataaattaatgaaaacatatcatagatcatcacttccttttaatttgtgtaatctatagtgtggtttctaaaagaaaatatagtcgacatgagtctataaatttaaatataatagtaacaaatataaccaactgtatagtctggcttaatatgcaaacaaactcataatactatggtattggatagatgcaagatgtgacatcccggcctagcgcttaataggattaatagaatactcatatcaacaagttgcaacttcttttctagaagccgatctcgaaagaactctgaggttaagcgtgctttgcctggagcaattttgagatgggtgtcataatttctatggcctataaaagctgccaaatataagcgggcctggcctgggagaggcgggatgttacaaaatggtatcagagtcgactctcgcggtttcacaggcgcgtgtgtcgcagttgcgcagtgtcacgcccgaaaattcactagtaatttctgaactaatttgtgcataaaaatcctcgtccaggaatcagccgagatacacaaaatgacaatttaatatacaaatccatcataaaaataacggtacatacttacaaaagaaaagaaaacagcagcggaaataacggtttagcgatggcttcagctctactcccacaggcagctcaactggggtataagccaaacgtcttctccttctggatccttttacttcaactaaggttgattgattattgcaagaatgagcatatgacatacttaacaagccacacagcaaatatgcaagtgcacaaggataccaaaggatggcataatataggctcatttgcaaaagcagcatttagcaaacatttaagagtaataaaacagtagagtactttaatcattaattttaataaacactgaacaacacgcccatgctgctcaggcccaaccatacctaaacaaccaaccctggctatacagatctaactccaaaccaggagctaagcaaattattaccaattatagcatcaataattattgtgagaggtgtgactaatcacgaaaaatattgcttaactcgcccataaccgcgggcacggctattcgaatagttttactctggctagaggtgtaccactgtacccacaagacacagcctcaacatcatgtctaccatgcgtcgcgatactggaaagtacccgaatagaggctgtgacaataccccctgcacaacacaactcaccacagtgcaccattcctggatcataatcaccccctctataaatataaccagaggcatggactacccagcgacccccacggacttctcgccgcttctcagtctggcaccccgtaatgaaccatgctatacaaaaggtaaagccgttgcccacgctggcttgtggttggcacggttaatgtttcacaacagtagctcgtgaaccggtccttaattgtcatgagcacgaccttcaaaaccatgtgctcacaacccaccattgtcaagttttagttatcaattaattatcataacacgattaaccatcgtgagctaccattaaatataaccataattaataatatagtatgattcatccctttaatgagctattgtttctaagcatggctaagcaactataaataacatctagctgaaccaatccaatatataaggtccatgctagtcaaattataacccataggaaaataaagtcatattcggccattaattaatcgggaaaggctcacctcccgatgacattcgaaaataatgcataagttgaaataaaacattagctttaaacgggttcaacatgctcaaagggttgtttgagatctgtgtgacttgccttgatcttccgcaaacacttctgaaccttcctcaacgaaaacgctctcctcggaacatcggaaactaaagcgaaagaacaaaatcaacaaaatagtacaaaaacaagcaaaaacagtacatgtggatatttttaacatgtagatcttgattttagatgaatttagcaacttgaaccactcgaatccgagttacgatgatttagttatgaatttcggaagtttaatcgattttcatctaatagagaaaactaaggaaaagggattaatgacgtcatcgctgacgtcatcgccggcaacggcggcggctagagcaaggcggcggcggccctacgggcgatgggggagctcgggagttggagcaaacgaaagaggacgactaggggatgctatttataggcttggattgaagagaccggactcgaaccgagaggaattgagccggaaaaaccgagggttagttggagagataaacttgaaaacgaattcgattccgcgttgatttcttcgggataaagtccgactcttgggggaaaggatagaggaggataagaggaatatttcccctcaactaatttttcaaacggagcacgggatgcggccgatttggtggaggaagcggcgtcggctagagcacaggacggcagctcgggcttctgtccaagcttgaagatgaacagtacacggggaggcaaactagactttcgtcttgagctggctgaaaaacaaaggaaagaaagaaagaaaagagggagctcggctgggccgacttgggctgcacagcactcgcgcgagggagagagatgttgggctgaaatcagcccaacggcttaggagaggatttaaaaactttttctaattaaaataatcactgaaatgatctttgaattgttaaaaatacttccaatgctcaaatagtttcaagaaaaatcttgaaaatacttggacactcaaagtaattaaaaaaattataatcagaccattcaatgaataatttaatatgtggataattactgaaatgttctttgtatgattaaaattaggaattgagctccgaaaaatctgagaaaattccagagagtataattaaccatggagaatttaataaaaattaaatccatccatgctttatatttaggaaattttatttcccacatttaacttcacttgtaaattaatgaacatttaatataaattctaataataatttattaaataatttataaatcctgaaacgaaaatcaggatgtgacacgcaggcatggtgtgcatggctggtgtggacccggagtggtcacacagcatggcacatgcgctggcactagacacatggacgtggccaagaggggacgttcctggcctggggttgatcgacgggggcgtcgatctctcttaatggggtgaggatatgacatcccggcctaaggcttaataggattaatagaatactcatatcaataagttgcaacttcttttccggaagccgatctcgaaagaactatgaggttaagtgtgcttggcctggagcaatttcgagatgggttaccgacaaggaaattcttcccgagtgcacaagaatgaggataaagtgtgcaaaaaagacttgtgttggtctgtgagggcagtctatggcctataaaagcattcttcccgagtgcacaagagtgaggacaaagtgtgcaaaaaagacttgtgttggtctgtgagggcagtctatggcctataaaagctaccaggtgtaagcgggtccggcctctcctcttcccgagtgcacaagagtgaggacaaagtgtgcaaaaaagacttcgcgagtgcacaatagtgaggacaaagtgtgcaaaaaagacttgtgttggtctgtgagggcagtctatggcctataaaagctaccaggtgtaagcgggtccggcctgggagaggcgagacgttacacaagaacaccattatttgattttctccaaatagttcaatgcagcttaaaaaatatgcatgttttaatattattgattatttttcggtaaaaaaaaagggataggtagaggagagagtggagagttcaagctgagacgagaggggacgggtagtgttgttgtgcacatgtggggggatggcgaaatggatggggtgtttttttgctaaatgattaaagtgaaaaccgatgatttttttgtcaaaatttctaatatccttttttttctaaattttaagatgtagcacatggcagcttaagattttatctaaagttatatctattggtaaaaataatggatccacttattaagtcaaaacgatggtcggatgtcttttctaaccgtttctaagattttatttttaattaagacgtaacacgtgacacctacagaggatgtacaatgatttgaggtgatataatacttattgtcattttttatttataatactctatattttttctatttggttaccatgcaaaggataggtgtgtatgctcaaatggttttttttttatacagtaaagtatgagtaatgtggatcttgaattatttatttaattagaaataaaataaaaattcaaataaaatagaaattatatataacataagaatcataattattttgctttgtaattattgatctttttatatcatgttgttaattagttagaaattataagacggagttgagtgagagagaagagaataagagaaagtcgaaggggacaaagtacacacacatagaattctatttttttttacatttgtagtgttttcaggtattcttactttatttactaaaaatagtataaaagttttattgattgattaagatctatcttttttactcgtcttttcctatataggaggaacactatagattaactaatgttattttggatttattataatatcaaaatgggagttgtaattttttggaacaatactcagtacttttgtcattactggtctaattgaattattgtgaacttatatacgatgacgaaatatatatcattatttttcataattttatagttgcttgaatggcacacaaaagccagaaaatatagccccaaatatgggtctttaaatgtataataatcaaaatacataagcaaaagtattactaatttgatttagggaacctatgatttagatgttatagttgctaatttctttagcataactcttgctttctaactaatatattttgggaacattactcataattatgcttattttacctttatgactgtaggtataatttaattattatgaagttatgcagaatgatggattctattatattattattatttcatatttcttataattgcttgaatggcacgcaaaagtctgaaaatataatccaaaataacatttttttctcaaagttgaattatagtgaaaatttggtcttttagccgtaaatttagtcataaaaaattttgaagatatatctggatcaaaaattagttgtatatatttagatgttatagttgttgaattgtttaacaccaaacttttgcttttctaactaataaagtatgaataggagaagaaatacgtgcataaatatgaagagattgagagaagaaggggtggaagtacattacaaaagtacaaacttactacctctagaaagaaaatgtacgtacgtactactgtatgtctgtctgtatgtgtaggcccaggtggaccctggtttggggttagagtggtttttttctttcgataaatctaatggtggtaaataatggatctatctaatttaatgaaaatcaatggctagatgttttgtttatttcttagaacttttagaattttctgtaatttaggatgctacgtggcggcttaggagcatttgaaggaagtttaatgaatttttagtatataatagaagatatattatatattaaaagtctactcctaagaacgctcctaagctgccacgtgtcatcctacaaacgctcataggccgttacgtggcattctacaatcccatcgtcgattttcatttaaactgttgcacccattagattatatctattttaaaagttcatcatcgatatttatttaaattgatggacctgttattttagaacgtaagattatatcgattttacaaagttatttttaataagataaccgatgttatcatcacaggttacatattgtgttagaaagattatatatataattaaaattatgctcatcatatactacattaaaatccataaactttagactacattaaaattactcatcagattatacatgtcacattatgcctgttacaaagatctcatacaattgacagctcatgccatcgtcatatttcaaatatgttatttggttgcccataaaatatgatacccttgaaaagatttttttatttacagtagcatcgctaaaactctatggaaaaacagatctaatcattaatcatttatggtaacaaattatggtgtgcatcttttgactaccttaattaggaaagaaaagaagagattgatggggaggaatttgtacgtacatacacatgtgggtctggccaggaggaaaaaatgaaggggattaagttttgatctaatggttaatagtatcgagtccaccgttttaaatgaaaattgacgggtagatgtttttcttttttcatatttttctgtaaattattaaagcgtcacgtggtggattaggagcgtttgtagggtaccacatggtggtttaggagcgtttgtaggaagtttaatagacttttagtatataatagatatatagattttgccttaatgccatgtaagcggtacttaagataaaaccaccatgaaaaccgctcggggttttgacagtggagagaattatctttgtatctggttttgtggtcgatacaggttatagactttctcccttggtcaaacaaaatatagactctttccttattgaaaaggaatgctttgtattacccacattatcacttgcattttctccaattatatcataataaccatttaacttaaacaaaaccatatcatttcatagccatttattttaacttatatccatactttagaatcacccatagatacaactccagtaaccaggagcacattatatacaaatactatcggtatccccaaggtatacctaggtttactgcacaacaactctagttggcaagctaaaaatgctaaaacaagtatctctcccttctgcatagtataaaatgcatgctcaggttattgctcggaagtatttggttcaaggtgtgccccaacctacttttacatccacattgtaacattgttactcaatgggaagtcttgggcccatcgatgccacaggtgtaattagctatcctgtgaaaaggtgtattggatcatgcttgaagaatgatgactataagaacttattgtaactaggtcaatccgaaacactttattaggacaattatagaatactggatctgccactatattttctattaatttagaatttgatacaaaattagttaacggtaattatgcatacaacttgcattgtttctttgatgttccatttgggatgcaaccatcaacttcctctgttgttacttagaattccaactataaattcttgcgaaaatgctagtgattgtatgacatgccttcaatatggccaatgctttcttgtaaaaaaatgtatatggccaatgctccaaatttagtatgaccttactatggaaggtaatgtaaactaaacttaggttaatttcatcctcaaccacacattcaagatcttgcacatgcacaaaaggaacaccacgcaaagatgacttctcattatattgaaaaactatcctttttattcagtaactaatgatcttcgattgttctattaaaaaaatattggtccttggccatttcctaatctgagttgcataaaactacatatgttcccatggtcttccattgagagaaaatggcagatgatggtttcaaatatcatgaggttagttcgtttccagttgccatttttttcttgtgatacatcttgtgtgttacaattgatatcgatcttgtattatgctgaataagagaattttgaaaaacaccatcaccattttattttgtttttatcaagggatgtgagattcaaattttatgttggttgtaggaatatgttacaaataaacgagggatgaagctctttgcatgccaatggagtcctttagaccatgaaccgaaagctctaatcttcctatgccatggtaacattatctattgatactcttatacatttgaacttcaaatacaattattccaacatataagcaatttgtttccttacaccatctaatttaattacaatttcatatctttcaatgtttaggatatgccatggaatgcagcatttcaatgagaggtaaatcacacaatgttgttaaacaactttaaataaacaatccacaagagtatgcctatatgtcatgttgaaaaataataataccatgtcgtacttgtttagcattcagtttcttttagctacttgaaaacaccattttaatgacaatatgttgatgatttgctactctcaggaacaggtgttcggttggcaaaggctggatttacagtgcacggattggactatcagggccatgggaagtccgaaggacttcaaggctatatcaatagttttgatgatgttgttgttgattgctcgaactactttgcaagtgtttgtggtatgttcagcataatttaatcaactagctagctagctcattatttgatttaggaaacaaataatttgctatcctgatgaagtttcataaagtttgtaaaactagacataactaaacttaaaaacaatgcactatttaaccataagctatcaaanccntgcactttttgtcaacctcggcttagatgcgaaatcattttcggtggttctctcacttatatggtgatggtgtcaaggttgaaattgtttttgaattttaaattttgaaaatgacttcacaattgcacattgtgtcattgtaaaatttattaattagtccttgagtgtatcgttgtaaaaaaattaattagtccttgagtgcatcattgtttagtctctatcactctgcggtcatcctgtaaggcataaaaaagatctattacaatttgtgtgcgcaaaaaaatgatatggttctttgttcatgtaaattgtagaattacaagagaacactaagtactccatccatatcatattgtgttgttttgattttttttcttagtcaaatttatttaactttgtccaaatttgtgggaaattgtagtaatatctacaataccaaattagtttcatcagaactaacatttaatatattttgaatatgtttatgttggaatggttgatatatttctttataaacttggtcaaacttaacaaagtttgattaagaaaaaagtcaaaacgacttataataaaaaatggagagagtatttgatttctcaaatgcttggtcactcaaaatatgtattttgagaaagaaaatcaaccatgctacaatgctcatgtatattttaattaatgtatttataaaagtggatttaattaaatttagacatatgttgtttcaaaaaaaatgtaaacatatatatataaattagcaacaaaatgttatctcaaattacttgtcagttgtcac

SEQ ID NO: 10330 - DNA, 7086 bp, Oryza sativa
acctaaccacatttattgcggtttggttgagcgtgtcacgccgcatgtaacgcagtgcagtgcactcgtttatccggtctgtgaccagtcacagaccggtcagatcgcgggttaggtggcgacaggcgatctgacacacgcctcgccccatcccgtcaggacgagggcttctaggcactcgtccccagctggagctagcgtgttacctcccagagatggcacgttagtcctggtcagatatatgccaggcttcatcctaaccattacaggcaagatgttgtgtgaagaagggcgagcatgtagattgctaagctgacacgtggtggacaagaatgaccgacgtgactggactaataccggtcatgtcgtcagcagacagccacgattccacgtcgcgcctgcttccggcggaagtggaggtaggtatgggccgtcccatcagaaggtcattcggacggcaaccatacaagtctccgtctgtttatgaaaaggtggggtaagtccccacaaaaaagagagaaatggtgcatgtggtatccccttaagatataaaaggaggaccttgcccacggagagacgagactggacttttccagattagaaacccagaacaagggagaggctggctgatactttgtagctccttcatacacagatgtcccaaaacacaggagtagggtattacgcttctcagcggcccgaacctgtatacatcgcccgtgtcttgcgtgtttcctgtctcgcgagccttccacatacagagagcttagaatctctccctgagtccccggccgaaccggcaaaggggggcctgcgcggtctcccggtgaggagccccacgctccgtcacactccatcctcgaatcatccctaaatcctgaaatcccaaatcctcaaatcgatcatctccaagtacatcctaagtcatcacagatcacagatcaaaaggatcatctccaaatcctcaaatcgatcatctccaaatacatcacaaattcctaaaaaaattacatcataagttctaaaaaattcatcataaatacatcacatattcacatcacacacaaataaaatacatcgcaggatcatgcaatgaatcacaaattctttaaaaaaaattgttgctgcagcctcccgcctcctctccggcagaggcgccggccggccgctaccgcctcccctcctcccgtccacgccggccattgccacctcccgcctcccctccgcactgccctccatgtcgtcacgcaggctgctgcccgtcgcccggacgaccggccctctaccgcgccctgcgccgcccggtcttcccgctccagcactccttctccagcgctcgttcctagccaataaggctcagctctcagcgaaggaaagagataaggaaaaaagaaatagagagaggagtttgtgtggacgggagaagaggataagtgctatggaggattatatactgcattttgatttttattcctggttagtaattggtgttactaaccgggactaaagatcccgatcgccctgacacggcttgacatggaatcaactgggactaaagatcacatagtcccattgtgcttttaaaccaagactaaaaatattctttagtcttggatttttaagcaatcgggactattgtggtttttggcaaccgaccaaggatggtttctccagtagtgcatgcgttaatccatcgctctgtttcgtgtgtcggggaggatgagttcccaacccctcctcctgaacagagatcactgaactacacacgacgttgaccttccatcttcacttgtcacatctacaaccctaatgtagtttaccgcttgcaacccaaaaatgttttcccgctgctctcgctgttgtcaagccttgcacagctcaaaacactggcaccatcacaaaagagcacattagtaccctcttatcagtgctggtttgacaaaacccgatactgatgatggttgatggttttgaaccccaaaaaataagttcttgctacatacatgcttcatctggcattgatgaggagacatcaccatggtcaccggcacacctcactttccctgtcccaacctttgcctctcaagtttatccaactgccaccttgtcttagcgcatctgtatcaccacaactctgtcactccttgctctagcaccatctacagtgacaccaaaggaagtatgcagcagaaaatgaacgtgaaccgattcctaggaaactgtgcgatgctggtactagtcccaggaagaacatgctagtacctgtggttaattgaggtacatcatataatataaatagttgatatcatataggaggtcacaccttcagaataacttcgaaaaagtaaacagtaagtagagaagtagcaacggaacttagtgtagctagaacccagttacaagcaactggttgggattagatatgaaacccaactcttcaacttcacttctttctagggagaggaaaaataaggttgagttcgtatgtactcagcaagtcatgaaaaatgtgagtatgcaagcttcgaaggagggctgggtttatttcataaatctttcttcaaaatacatttttttaaaacactaagcgtgggttgtttttataacatgactgtaaagaggctttcgcttcaaccctattcatgaattgatttgcaacaactaaagcagacgaagcaagttttagttgattgaaattactagtgaagtctattgctctgccatttgtctaaccaaagaaaatggctcatagtctaccatcaggcaactcttatctcttctctcctctggctgattctagtaaatggttctcattcccacaatccatttttacaaagcataggcaaagaaatctacacaagaggaaccattgcacatacacccatgaccatgggcgcaattgtccgaacagtttcatcctgcagaggtgcacgctttacccacatgactcgaacttacttcccacacctgtagatagggaaggttcatgtcaaggccttcccaaaacaattctagtgatacctcatgcacgatagtcaatccactctcaaacaagtagtatgcgaaccttctgcatcctcacccttctccagaattcggggatgtcacctcactgcacatcccgacatttctcacctattggcaaatgaggtatattgttctggctaattacatagccagccatgtcctataccactcatgtgatcgtactgtatttatgatcagtgtaattccacaaggaatcgatccttatatgcaaatatagaggattgcctccaataaggccgctttgcatcgtgtgttttcgaaaataacttctattttcacaaacattgcaacaccacgtgttgggattttaaaggttttgcaatctagttttacatgtcgacaagcaatgcttttgtgagtgggaccatcggcaatatgaccaagagcacagttaccgaggtaccatggggtggagtgacaaggcgtactggtatcaatcaacctataggattgatgcaactatcaggtaggtccatcggtttgtcacacaaaccaaggccagtcaatttagtgtgcacactagtaatgtaatttgcaaataaaacattttgtaaaatggggaccatatatggtcaagggtgacttgcctctgtcttcatcttcaaaatctcgagaacccgctccaaaaataatttccatcatcgaagactgcatgcaagatggagaaaataacacaaaatcttacaaagaaaatactatacttagcaactaatagtgccattggtagatctcattttttacaaaaatttggagacttgaacggggtcaagcggagatatggataaaaagatattgattttctggaatttttggaaaagattaatgaattttggaaaagagtattctcaagaatattctttttgtcagactggcatgtggggtccacatgtcagtgatagggtgagagggagggaggtaatgtggacttacgtatacggaagggggtaatgggctcggcccaaagaggagggaggcataatggactttgcaatgtggatcgggcttagtgggtcggcctcaccagctcaagcggagagatgctgcagcatgggggagggaggttaaggaggtggggcctagtgtcatcaacactttatttgaaatcacctttaaatggtctctagcccacatgtcaatgaggtacgaggagggattagcatggatgagcggtgtcagtgggatctgacgatggggtggcggtccaaattttgccgacgaatgacggcggtccgcgagcagtggcgaccaccatgagaataagtgggagtatgggagtccttatgcgggctcagatgtggatgggggtggacaacggtgacaaatggcaggttcagacatcagtgacggactactccagccgtgcgacgtaatgtcactggtggcaaccaaagaggtggcagaggtgggtgggctatggttcgggtggaggcggtgcacggagagagagagaggaaaaggaagaaaagaggctaaatggggctcatcgaatgagagggagcataagagaaggcggcaccactcttgttgacttaagcttgagctcttccagctagcatggggaggccagctagtgagcacactgggggaagagaagaggagagggtccacaggttcatagccataaggtggtgctaggcgacaagtaagaatggaggggtgcgcggcgtggattagtgcggctggctagtgggcccgtgggattggctgtgcggcggacgttcatgctgacatgggtgagcgggtgtgtgcgggggtacgatgtgcgctcctgggctggcctgtggccgtggggcggtggcggtgcgagggatcaagttgggccgaagaaggaaaggaggggacgtctctatagggaacattagcacttcataatttcaagagaatatatatgaagggtagttgaaggatttgaattgtggtttgaatcaaaatttgatatttgagctcacaaaaagttttggatttcattcaagaggcttttgactgggatttagaatatttttgagaaaaggtcttgatcttcagtataaattgaagaacaaaaggatagaaaaaaatggaaaattcaaggaggtttggatttgaaaatttgaaatttgaataggagatatttggtgggggggggcattgatcaggaagaggcttcagggacaaacttgatgagaccttggcatttgggtttttattagagtaagtttcataatggatcagtttttattaccttcattgcatgatggactaggtggtagcataacttttcactttgggctaggtattattaccataaattcacttaacactagtggcccatatgtcagtcaatgtccgtaacccttatctctctcgaacactggtggccaacaattaacagatactcaacctaatcatagctacccatcatcaacttctctcctgaagcagcttgttggatggaggtttagcttgagagattgcaggactaggagggttgagcttgatgcagtgacgggtgtgggcgagatcgaccgagtggcctgagctgacaaaggtcgagctcaaacttgagctccaatgcacaagcagggattggaggaggtcaagctagattggtggcacgatcttgatggtctgctcaccgccgatggtgagctcaagtgcggagcaacgctcaatgcagctccagtgcaaggtcgagcttgatgcagtgtagggcaggggcttgatcaccggccagcggcagctcactcaaggtcctggtctcccagagccttgctcatctatggtagcgaccttcagctagatggcaggtacacctttacagattgggtacaatacaactcaatggagaagagagttggagaagaacaccggttcaatgtgcaactattgtacagttaacaggcccaatgtgaaaatataggtttacctctagttcactgtgcaaccaatgtaaatattagtggtccaatatgtaattcacttcttttattaaaatagtttttaacagaccataaaatagggcatgcttaatagtttacaaatagtttacaaagggtgatttaattgagatctttggcacgcaaacgtagctacgctcagagaatctagatttttgacatagcagggttcgtgttaaaatagttttgtcaattgcatggaattcgaggtgttatagtctgcgggggtcagcgtcaaggagattggcatggacccgtatgacatcagcaccaacagggctggtgctaagctcgcggtccctttttattgaagttttctaacgcagtgtttcgaaataagttttcaaagtgaaacaatttgtcaaattttcggcctccttattacattcgtctgcaatatactacggagtatatgtccacagggtgttcgatgttttcctgaacgaaaagctgacctactttcggaaatccttcttcggcctggtgggtaccatatcagcgatgctagtgaaggtggagaaaggctccttctgcaggatggaaggggtacggctaatgctggcgcgcgttttgctggttctccagctggtggtgctggtggtgatcctctcccctctcgcggtgttctacctgttcggcctcctcatcaccgccggcctctcgctgtggcgcttgctgcagcgcgactacggcgccggcgaggaggcggccaacctcgcgccggcgctcaacgtgctctactcgctggcgctcgtccagggcgccctcttcttctactacttcacctcgcgcctcctcgggaggcggctggcgaacttggtcgccggagtttacagcttcggcggcgagggggaggaggaggatgacggcgggcgcacgtcggtggtggagtacatgcggcagacgaggaacggatgcgagaaggacccgtcgtcggtgagagggaggaacctcgtcacgttcgccgtgacgatgatgaaggagtcgtcgtcgtcgtcgctgtcgtccggcgactactcctccggggctaggatcctcgacaagctcctgtcacaggcctggctgcgggagcagcacgagctcatcaggcagcttgttgggt

SEQ ID NO: 10331 - DNA, 24519 bp, Oryza sativa
tgcatatttgctgcgtggcttgctgagtatgtcatatactcaccttgcaatcattcatcagaggaagagttctacagtgaagctgatggtgtggaggattaggtgtagccctggtcaagctgcttgtggagtggagccgtctgcaccgtttatcttattttccgctgcttagatctttattgattgagaggaactatctacctctgtaatgacattttattcgcttattaattagagtaataattgtactctattatcaatttgttattgtgtgcctcggctgattcctggacgagggctcacacacatgtaagcgtttggaattttggatagaaattccatgcgtgacaagttggtatcagagcctccttgaccctaggttatgccaaatggttacccatagaagccctctaaaaatattggaaaagtagaactgttctcttccccttctcttttaattaaaccaaactaatggcacatgcacttcataatcccttttaatggttttcattcaaaaatttattccagtgttattagtactgtacatctattactgtactaatggctcatttaccagcaaaagttttacaatattgttttatttaatcttgctacaataaaataaatttagcaagttgattttataactttcttttatttcttttggaacctgttattcaaaagtataaaatttgtaaccttgtttccaactgttttcaatttatgttgcaagcttggtttacttgatctacttacctttttactttgattttctaactttattcaaattaatccaaaaacttgtgctattaattggataaatgtcttaactccctcctttcacttgtctttagatgccgcgctacaagcctgagtacttgtttggtgttgagggatttgtccaggagttgcgtacgatgtcctttgtcattggatttgggactgcccctttttatgctcagattcctcatgatcgtcatgaagagaagtgccgagtcaaagtcaccttgaacagtaatagtgaagatatcccctcagtgatgttcgaagctggaggaagaaactacatccatgcatgtcaggaggtggcaaggatcgccataggagagcttcgcgatcgctacagtgatcagttggccgacgctgagtatcgctaccatcctcgccaaccccagggaagtgaccgtggcagttaccttgagactgaaggaattgagaatgatgctaccacaaggcatttggttgagatgctgtgggctatggataaaagtcgtgcggagactgtgttagcagctcaagatcgtgaagaccggaatcgtggtaagatttgcaagctagaagacaaggtggatcgtttggagaaggaactagctgcattaaaaggagaagcaccgccgcagaaggccaggattcgtctcaccgcaaggaagagagctctatttgtccctcgctaccaattggcgccaaaggtccgtgtggtggagaaagaagttgccccagccctagcggatcctccggtcattatcataagtgatgatgaaggagaagaatcaaagcgcacccattccaagattgagtgggtagcaactcaagatgatgaagacgagccgaacgagccttcaatcgacctccgatgctcggaagaactagagtgacttgttaagtcgttgtcttagatcgttgtgttagtttgcttgctttaagtttggttgtgtgtgtctcgcatgtgatttacatcagtggtggaatgtaagtgcatgcgtttgtttgctttcgagtgttagggagttggtgagtttagtggtgtgagagtcttcagttctgtaataatgaaactcagttaagatcaataaaagttaaagtaattctctgtcctaagtagtttcccccggtttctcttcttgtgccctgtccatgccagatggtgatcactcgcagcaatgggaatggccccaacaaccccaataacaacaatgaagggaacccaacacttgctcaagttcttgctcaacagactcagttaatgaacatgatgatgcagcaacttcagaaccagcagaaccagggaaataaccatgcacctccccagaacaagttagcagaatttcttcgtgtgaggccgcctattttctctagtaccactaatcctgttgaagctggtgattggctgcatgccatagagaagaagttggatttgcttcaatgcactgatcaggaaaaggtctcatttgcatcacatcagttgcatggccctgcctctgaatggtgggatcacttccgccttaataggactactgctgaacctattacttggcttgaattcaccgctgctttccggaagacgcatataccatcgggagtggtgtctctcaagaagaaggaattcaggtcgctcactcaggggtctcgctctgtcacggagtatctgcacgagttcaatcgtctggctcgttatgctccggaagatgtgcgcaatgatgaagagcgccaggagaagttcttggaaggacttaatgatgagctttcttatccactcatggctggagattatcctgatttccagaagttagtggataaggctattcgtcaggaggacaaatacaatcgcatggaacagaagaaacgccggattgctcaattcaagacacaaccgggaaataatcaaaggccgcgtcttactttaggaccccagtccatgccacatggaggttcttcgtctgttgttcgtccgcggcgtcagttcttcaacaacaatgctggcaacaacatccgcaatcaagctccacgccctgttgcagtttcgacacagcaacagcctgccaagagggagcaaggcagcaagcccgtagtgtgcttcaactgtggagacccaggacattatgctgacaagtgtccgaagccccgacgcgtgaaggttgtccctgcccagagcaactctaccgcatcagcatcaaaggcccgtgtcaatcatgttgctgctgcagaagctcaagatgctccagatgtgattttgggtacgttccttgttaactcagttcctgcaacagtgcttttcgattctggtgctacacattaatttttatctatgagttttgcgggaaatcatgggatggaagtagaagatcttagacgtcctttgatggttagtaccccaagtaatcaagcactctctttgcaacgtagcccctctgtcagaatagaaattaaaggagtaccatttctggccaatcttatcttgttagaatccaaagaccttgatgtcatcctagggatggactggttagccagacataaaggtgtgatagactgtgctaacagaaaagtaactctcactagcaatgatggtcgagttgtaactgttcatgcattgtcttctgagtctttaaggtcaagactgaaccagataactttggaagagattcctatagtccgggagtatcccgatgtgttcccagatgatttacctggtatgccgcctaaaagggatatagagttcagaatagatttggtacctggaacaactccgatccataagagaccttatagaatggcagccaacgagttggcagaagtcaaaaggcaagtagatgatttgcttcagaaaggatacatcagaccgagttcatcaccatggggagctccggttatttttgtgaaaaagaaagatcatacccagaggatgtgtgtggactatcgtgcactaaacgatgtgactatcaagaataagtatccactacccagaattgatgatttgtttgatcagcttaaaggtgccactgttttctccaagatagatcttcgatcagggtatcaccagttaagaatcaaagaggaagatatacctaagacagcttttaccactaggtatggattgtttgaatgtactgttatgtcttttggacttaccaatgcccctgctttcttcatgaacttgatgaataaggtatttatggaatacctagacaagttcgtggtggtctttattgatgacattcttatctgctcccgaaccaaagaagagcatgaagaacatcttcgccttgtactagagaagctacgagaacatcaactgtatgctaagtttagcaagtgtgaattttggttgtctgaagtgaagttccttggtcacgtcatctcagcaggaggagttgccgttgatcctagcaatgtggaatccgtaaccaactggaaacaaccaaagacagtttcagagattcgcagtttcctaggcctcgcaggatattaccggaggtttatagagaatttttccaagattgctaagcccatgacacgactgcttcagaaagatgtgaagtacaagtggtcggaagaatgtgagcagagttttcaagagttgaagaatcgcttgatatcagctcctattttgattttacctgatccaaagaagggtttccaagtgtattgcgatgcatccaaacttgggttaggttgcgttctgatgcaagatgggaaggtggttgcctatgcatctcgtcagttacgtccgcatgagaagaactaccctactcatgatattgagttagctgcagtggttcatgcgttgaagatttggcgtcattatctttttggtactcgtacagaggtgtacactgatcacaagagtttaaagtatatctttactcagccagatctgaacatgagacaaaggagatggttggaattaattaaggattatgacatgtgaattcattatcacccgggaaaggctaatgttgtagcagacgctcttagcaggaaaggctattgcaatgctacagaaggacgacagttgccattggaattatgcaaggaatttgaaagattaaatttgggaattgtcagtagaggttttgttgcagccttagaagcgaagcccacactaattgatcaagttagagaagcccaaattaatgatcctgatattcaagagatcaagaagaatatgagaagaggaaaagctatcggtttcttggaagatgagcaaggaactgtatggttaggtgagagaatttgcgtccccgacaacaaagatttaaaagatgcaattctgaaagaagctcatgatactttatactccattcatcctggtagtaccaaaatgtaccaggatctcaaggaacgattttggtgggcaagtatgaagcgtgaaatcgcagaatacgtagcagtatgtgatgtttgtcagcgcgtcaaggcagaacatcagaaacccgccggtttattgcagcctttgaagattcctgaatggaaatgggaagaaataggtatggattttatcactagtttacccagaacgtcatcaggccatgactctatttgggtgatagtcgacagacttaccaaagtggctcatttcattccggtaaagacaacttattctggaagtcggttggcggaattgtatatggccaggattgtgtgtttgcatggcgtccctaagaagatagtgtctgatcgaggcagtcagtttacttcaaatttttggaagaagcttcaggaagagatgggttctaagctgaactttagtactgcttatcatccgcagacagacggacaaaccgaaagggtgaatcagattttggaagatatgttgagagcttgtgctttagatttcggtggaagttgggataagaatctaccttatgcagaattttcgtacaacaacagttatcaagctagtcttcagatggccccttacgaagcactgtatggtcagaagtgccgcactccacttttgtgggatcaaacgggagaacgtcaggttttcgggactgatatcctgagggaagcagaagaaaaggtaaaaatcattcaagaaagattgcgtgtggcccagtcccgacataagagttatgccgacaatcgccgcagagatttgagttttgaagaaggagattatgtgtatcttcgtgtcacgcctcttcgaggggttcattgttttcacaccaaaggaaaattgtcaccgcgttttgtgggaccttataagatcgtcagtagaagaggagaggttgcttatcagttggagttacctcaatctttggcaggagtccataatgtgttccatgtgtcgcaattgaaaaagtgtttaagggtacctaccgaagaagctaatcttgaacagatagaagtccaagaggatctgacctatgttgagaaaccaatccgtatcttggaaacagatgagagaagaaccaggaatcaagttatccgtttttgtaaagttcaatggagtaatcactcggaagaataatcaacttgggaacgagaagatgaattgaagtcagctcatccgcatctgttcgccagttcttccgaatctcgaggacgagattctgtttaaggggggtaggtttgtcacaccctgaaaatcataaatatataaattgttgtttaaatggaattttttttgaaataattttaaaagccttgaagagaagatctaattttaattaataaattccaatataaaatggggccagataaaattttattaaatactttgcttaattctataattcctagatttttctgggatttatttgagctaaggaagtatttttaataaatggatttgcatttaagaaataatttaaattgaaaaatgttttaaaaagtcttcttttggctttgggccgaaagtcggcccaaaacctctcttctctctctccacggcccagtccggcccagtccgccgccgcgcgcgcgctccctcgctcactgacaggtagggtccacctgtcaggttcgtcttccccgagccgccgtcgcccggccgaaaccctagcgcgccgccgccgccgttcccttccaaatccggccgttcctttccttctccggccgaatcaaaagaggggaaatgatctccggaatctcctctaccttttctccgttggaatcatcggctaaaacgttttggaagttcgtggaatcgagttcgattcggatcggcctctttccttcaagccacgaagtttccttctcgtcgccggccgccgtgggccttcgccgccgcctcctagcccctttaaaaggctccccggtgtctcctctacccgcagccaccctcgccttcgcctctcgtcgcccgtagagctctagcgccgtgtgccctagcgccgccgtcgccgccgtcgctccagccgtgcgccgccgccgttccagacgtcgccgtcactcgggaaggtcgtcgtcgtggtcgccaagtcgtcgccgtcctcgtccgccgcttcatcaccgtcggaaaccgccggagcatcgtcgccgtcgtcaagccgcagtctgccgccgttccttcgtcatctccgtcgccgtccgttggtcttccgccgctcccttggtcgccggtgagttcgccgtgccgtccgctacctgttggtgccctccgtttgtgccgtagtgccgccgttcgccggcgagcttgcgccgtccgagctgtcgagccgccgagccaccgccgccggttgtgaaccgccgccgtgcgcccggtccaccgcgaaaccctagcccgctgacgtaataaatcccttttccttttcaaaaataattcattattgcgtcataattcaattaaaatcaatttaagtgttttaatccgatttaatcttcaaaaattcataactaattcatcttagctccgatttagttggttcaagtctctaaatttttctaaaattgagatctacatgttaaaaatatccacatgtactgttcatgcttgtttatgtgctgttttggtgattttgctcttttctgcttagattccgtcgtttccgaagagtccgttttcgccggagaagagtttgaagagttccaaggccagcaaggcaagtcacacagatcccaaacaaccctttgagcatgttgatcctatttaaagctattgtttttattcaaatattgcatttattttcgaatgtcattgggtggaattaacctattgtttgttatagcccttttgttcttgattactttattccttgataccttgggttattataatttgactagttgagctttgtttatattggttcaactagatgtattagatataattgcttagccctgcttagaaacattagcacactattgggataacttatgactcactattatttaaagatggcttaatgatagttcacgatggtcaatcgtgattggttaattaattaatgtgccaactaaaacctgataatggtgggttgtgagcacatggttttgagagtcgtgctcatgacaattaaggaccggttcacgagtttcggttgtgaaacattaaccgtgccaaccacaagccagcgtgggcaacggctttatcttttgtatagcatggttcattgcggggcaccagactgagaagtggcggagataagcccacgagggtcgctggggagtccatgccttgtttataagggggtgattaagatccaggaaaggtgcgctgtaatggattgtgttgtgcgaggggtattgtcacagctcctttccgaggtaccgtggtggtattgaggcacatggtgacatgatgtggggctgtgtcttgtgggtacagtggtacacctctgatcagagtaaaactattcgaatagccgtgcccgcggttatgggcgggtctaacaatgtctttcgtgattagtctcacacttctcaccatagtaaatgatgctataattggtaataatttgattagctcctggtttggaatggtatattcctggtttggagatagaactgtgcagccggggtggttgttcagaatggttgggcctatacaacagggtacgttgtatagtgttggattaatattgtttaattattacttaacagttttattaaattctcaaatgtttgctaaatgctgcttttgcaaatggaaccctattatgccatcctttgttatcctgtgcacttgcatatttgctgcgtggcttgctgagtatgtcatatactcaccttgcaatcattcatcagaggaagagttctacagtgaagctgatggtgtggaggattaggtgtagccctggtcaagcagcttgtggagtggagccgtctgcgccgtttatcttattttccgctgcttagatctttattgattgagaggaactatctacctctgtaatgacattttattcgcttattaattagagtaataattgtactctattatcaatttgttattgtgtgcctcggctgattcctggacgagggctcacacacatgtaagcgttttgaattttggatagaaattccgggcgtgacaagttaggaaataaaatggtcagggttaatcatagattatttttggaaattcctcgagcgtaatagtatttcggtcgaaattccgagttaattataaaaatatgtttcttgaacagattagattaaaattggtagtaatttagatataattagtagctaaacaattagatgaattcttatagattattatagattatttttggtaatctctataagtcatcggttcacggtagaaattcggatttaattactaggaatcttagccgtgtatcatatttaatcgtttagtcatagactaaattaagttgtataatatttctaggatttcgttcgatatttagctcgtaatagaaatttctaacctattatatggatacaatgctcggggagagtaaattaaaaacttatgacaacgaaataattatacccgcaaaatagtttaaatcaaaattgggtttgccgtagttcgcagatagtaaagttaataaaaaggaatcgactttcgcattcgactttcatttggatttatttggatttttatttgaattctaaccgaattcaaatcaatttttgcacgtaactatagagcccgagggagttgcggatccaagcgaaggccaagacccgcaagactttgagcaaggcaagtcatcactattccttgaacatgttgatcctaattgcgaaattgttttgtttacaaacaaagttgcatgcaatgatgaacatcctacttgtgattatgccatgccttgattattgtttacccttaaatctttgtaaccatgtttacgtatgagtccctagtcaactatgacaattgcttagaaatgctattctagaatcatgcatactcatatttatcaaatgctatatgcttgggtaattacctttgggaaggtaattgagatgcggcatgtggagacatgagcgccacattgccatgatgttgatgacatgatttgtgaaaggagaaataaaattaaacaattgttttcgactggggcggacggagaatttgggttgtatctggaaaaggctagtaccgtccccagtcaattaaggaccgagccatgaagttaagcatgaaacgacccccgtacaaccgtacttctcgaatgggtatagacctagcggattagatagccgagcggaggcagtatccctgcatagatggttcacccctgagtgaggcaggtgcgctacgatgggacagccgttgaggtagggccgagaagcgtgccctacatcggtgtcgccattggtaggactgccatgagtgtgtgagagagagaacttaacttgaaccataatttaatatgcgtgtgagacttctctttccccgggagcgccagaactcctctcactgctagaaacatggacgcctagagtgcatgaggatttaagttcatggagcgggtactggcaatgcgaggttatcgaaaagctttgccgtgacgcgtctcatgtgttgggacgaggctcatgtgttgggcagtcgcggagtgcgggtaaaatgtacatccactgtagtgtgagtaaaccaaatctattcgaacagccgtgctcgcggttattgagcaccgggacatgtattacacttggctagactctaaattctttaacttgtgtgggatgggatattacatgatgatttttatgctgatggagccacttcctgagaggcgggaatgtggatgtcctcagaaaaccataacgactcaatggcgggaagctatccttgggatcacaatggatggtggacagaaccgtcattgttaaatatgaacactggtaataaaacttgatcagtctatgctaggtcttaggcttgtgaaaataattacaaaacttgcttgcgcaaaagaaccatagccatcctttgaattcctctgtcatgtgcatcattgctgtggtggcttgctgagtacggttggtactcacccttgcaaatataaaattaatcagaagcgggagatgaagcctcggaggatccctatacctactaccaggagggagatgaagacgatggcactcagtaggtcttagtacggtcgttgcctgtggcaatggcatgccgctgcctgaattccgctgccttatctatttctgcttttggatgtattccggaccgctcggtccgatgatttaagactatgcctgcgggcttatgatgtaataattcgaattagacactcgtgtatgtgcacttggtattccagctatgaattcgtgcgtaccagatctgatccagggaaatggtactgtttacacgattgactcctgttataaaaacgggggtccacagcatggctaagcatcctaagcactttagctaaaaccatataatgttctagctaatccaattattaaccaagtgacaaagtataggtaagcaataacaaaggcaataggttccacccaatgacattcaaaaataaatgcaatagttgaatagaaacaatagctttaaacaggatcaacatgctcaaagggtcttttgggatctgtgtgacttgccttgctggccttggaactcttcaaagtcttctcctgcaaattcggactctccgggaatgtcggaatctaagcaaaaaagagcaaaatcaccaaaaaagcacataaacaatcatgaacagtacatgtggatatttttaacatgtagatctcaattttataaaaatttagagacttgaaccaactaaatctgagctaagatgacttagttatgaatttttaaagattaaaccggattaaatcatttatatagattttaattgaattatgacgcaataaagaattatttttgaaaaggaaaagatatttattgcatcagcggtcttgggtttacagtggaccgggtgcacggggatggtctacggaacgaacggccgtgatctaatcttatccaaaacaaacggccgagatcgaatcggtctaccgcgggtctacggctgacgcggtgctgacgttggcgatgacgtcatcaccggcggtggcttggcaactcacgctcgccggagaacgacggcgcggcgacgcaaacggagggcaccaacaggtagcgggcgacgcggcgaactcaccgagggcttagacgatggcgaacgacaacggacggcgacggcggtgaggttgaagctgcggcggcgttcgggtcaacgatgatggcggtgctccggcggtcttcggcggaaacagagggcgggacgaggacggcgacgacttggcgatcccgacggcggccttcccgaccgacgacgacgaccggagtggcggcggcgcacggctggactcccttcggcggcggcggagcacgggctctagtgcctagggcgctacgagcgacggcgagctaaagcgagggtggcggcggatagaggaggtcccgggagtccttatataggggctaggagcggtgacggaggcccacggcgaccggcgacggcgatggaaagtttagggttcgggaggaaaaacgaatccgaatcgagctcgaatcccacgatttccaaacgaaactagatgatgtttctataggagaaaagatagaggagatcaacgggatcatttcccctctaccaatttgatcggatcgggaacgacgcggccgaatttggaaggaggcggcggtggcttgcgtgcggcgggctagggtgcggctggcccgaggaggacgacgaccctgacaggtgggacccccacctgtcagggggagagagagagggagagcggcggctcggctcggcgggctaactacaccggggcgctagcaggccgaggagagagagaggggttttgggccgactttcggcccaaagccaaaagaggacttttaaaacctttttcattttaaattattcatgaaatgcaattccatttattaaaaatactttcttggctcaaataaatcctagaattatctaggaactatagaatcaaatgaagtatttaataaaattttatctggcccacttttatattggaatttattatttaataattagatcttttcttctagacttttaaaatcatttctaataattccaattaaacaacaatttatacatttgggatttttagggtgtgaaaaacctacccccttcaacataatctcgtcctcgagattcggaagagctggcgaaaagatgcggatgggctgactttaattcatcttcttgttcccaggtagcttcttcttccgagtgattactccattggaccttacagaaacggataactcagttcctggttcttctttcatctatctccaagatacggattagttgatcgcaccagctcgaccttctcctcctcgtgcgttcacctcgctgtactcccacgccgataagcaccgcaaactagcggcgcctctaccggtatccacacgtacagggacggaacgccacgcgcagatgtgctagcacccgcgcgcagctagggttttgcttggggagggatgtgacggctagggtttctcacgtgatgcaatgcctctgccggtcacacccctcacgaatataaaggattcatcactcgggcctccaaggtccgtaggactcctattcggatccctatccgaattaagctcatattggatctctatccaatccccttattccggcccattaagcatgcgaccctgtaggttcatatatactcggctgtaacccgaaaactcctttttggtccacgcgtcaacagcagcccctagcataacgtattgacccaccgggcatacataaagatcatatcggctgaacctctagtgtatacttgtatgaacccctttgcctcacgattatcgattaagctcaaggccagatatgtgccatcctctaatagctcaatcattcactcgaacctgttgatggattatataacttgtgattgactcctcaatcacctttggcatggccatgcacttccataatcgacaacatcgaggggcccagagatatctctccataggaggggcaaatcccatattgattatttatattccactacatgtttcatagcatacctgaaaactacttttataactatctaattatggagtagcgtttagcagtccctaagtaagctactacacatgttgagaaccacgataatctcaggtctaaggattcaacaccaatactcaataagatcactgatgacacaacacatatggctcttgcagtgtctcatattgggtctatccaacaacatgtttaccaacatgtgtccacattattaatttggtatctttataccatgatccatgagacatgatcatcaattaatacatgtgctgatcatataaacatatttgttccacatatgatatttgatctgggatcctttagaaatagtaacaaacaacataaagagtctcgtgaaagaatcacatattcattaaccaataaggagttatctatttcaaggaacaatgtcggataaatatgtaaacatagtatgtgatacaattatctctatgattgcctctagggcatatcattaacagccaccgccagcttctcattccatgaagctagctagcagacaatggaagccactgggatgcagctgacgcactcatcttccttttctccccacctccgccgctcccggacttgcattagagcgtcgccgtgcatgtcgcctcgctttgacgccaacctcgccaaatctgccccgctgccgcggcatcgcttccttccatggcagcctcgatgagccatcgggctgtaatttgcggatgccgaggaacccatccgcccacccattttggcccacacgaagagctgctccaccattgctgtggggaggtccaccccgtcacatgcaggccatggcaactagccgacgcagagcgagagagcacaccagtggcaagcagttggtggtgaccatggcacgcggtggccgccagcgcacaggatgaggagatcgagcgtcgatgtcgacagcatggctagaccatgacatggtggctggcgcaaggttcttccgtcatcgaagctctacagtggcatcctagggaacccctgtttaaccttggcaatttatcgaatcctatttgaatgacggcatgttagcgaagctagtttttttttcaattacatagatgcaaatttttttgactatatgttcatcaagtaatgagaaaccataaaacactagtacagatcctcccatcaatgaaggcctctcacataactgggttttgtgttccgtcactccagatttgcccgagacatgcacctaaggagaaaatcgcaatcgggccgaaataaacaccgacgtagatcaactcgtacagatataattgagttgcatatatcaagtgcccatcaccgatgagactcatctgtgacgggcctacgtttaggcccgattgagattatctctacaatctttgtcgggcccaacacttaagcctgcaatggatgagtatcatcggtgacgggcgacaaacacatcccgattaacataaatttaaggcctatcaccaatgagcagttatcgatgacgggcttattggtatgcccgtttgagataactgaacgcccgtgaccgatgttctttcattggccgttactgatatctattgtacactacaaatactccaccccattgttctctgaagttatcccactgttcactattttggtgagaggttgaagggggtgaatttttgtgtatttttccaagaaaaacagaaaattcataaagtcagtgaagaatactaatcaattctcattaatttagtaatacttatcctataagatgtttctctaatattttttcatttttgcaatgatgaatcgaagttggatatatgggaagactgtgaaacgtcatagcaaggagtatagaaatgatgtattaaattttataaatgcagcggaggaggataagaaaagaagaaacaacgattacatgtgttgtccatgtgtggattgcaagaatgagaatatgtttgatagcagagtggacatacatggtcatatgatacaacgaggattcatggagggctacgcatgttgggtgaagcgtggagagcaagaagttacttctgcagatagaagtggtgcaaaaaatcaggaagaagaagatgagcatgatatgtttgtaccttctccattgggcagtgaaatggttgatgtggatcacgatctgctgcaggacatgttacgtgacgttgaggacccagcttacaacaagagagattctatgaagttcagaaggttggtcagtgactcggagacacctctatacgctggatgcagggcaaaacacaccaaattgtcagctaccttggacctaatgaagctgaaggcaagtagtggatggacagacaagagtttcacacaaattttgggaatattgaaggccatgcttcctgatgatatcctaaccaaccggacaaggaattgggcaagggcaagggtgaagaagaatagcgacggaacacttacgttcccaaatgccgaagatcaagcagtgtatcagaaaattgtaagttcaacacatcgcatatgttcaatttgtgtttgtgtctatcgtagtgtcgatttaacctggccttaattgtgcggcaagtcgaccttactgcctagagacagttctcgcaagaggtctcctcacaaagatgggatgatgacatcctcacggtagcgttgggaaacgaagaacaccgtggatggataagcggcattggctccgatattccatggaagcatgggtttccccaatacgcgtggcagtacaagaagaacaaactgacaaaggcggagaaagatgcacgcctcaaggaacaacttatggaggacatcagagctgagctaagctctgaattcgatgagaagttgtcacgggtggaggcacgcatcaggggtgagcaccagcaagggaacgtcgaccccgccgacgctcccagagtagaagtgagccccacggaaaggcgtagcagctgcgcatcaactgaagcggcggaagaacaaccaccagtccctaccgcagtggaccacacaatggtaaaaccaacaaataaagcatatgttgtcttagctcatcaatatgttatgacatattctaagaacatgtatgaatctatcacagggtcccatagagtgcaccctagtcgttagggtgacacaagcatttacacttcctaccgccaagggtcttgcgttcaagcctacaccgaaaacccgagttcatcgggcgtagttgatggccaggcatgctaaagtacaagtggacttagtcaagcccgaatgggtaggctccactctgatgcatccaccaaatgacgaggttttgaccctaggagttgcacatgggacctttatccaatggcccaagcataacattcagataaaatataagtcctaggccaacaccaagtactagacccactacaactcttatatctgcccctcctgccattgaagaaggagatgaagatctccaattgtaatatgatacagattttggggatgagggtttggaagtcgacagcatggcgtactttccccctcctgccaaaaagagcaagaaggcccaatcttctccaccacagcatgaaacaaaaaagaaagctgttgggagggggagaggaagaggaaaggtagaagcctcgcttctagttcccaataagccaaatcttggcaaggcaccatcagctcgtcccacggctccgaccgacttcacattaggcatgccactggttggagacgacatgttagcgaagatgggccctgcttgcaaggagttgcacgggtactacatggagatgtccaacacaaggaggaagcatagagagacctgcatgacgggccatcacgatagacagccattccttgggcctccaagctttattgctgttggtatttcttaatgtcacagataaaatccgcaagcgcacggaagataccgatgtagcacttcacctgggagtattccaaggtatagatttccacaggaacttgtgtgtcatctcttcactaggttcatccaaggacacaaagctaaggtaggctaagggtagagaggatttactagtgagagacagtgtctatagaaagctcagtttaatcctaacgcggtacttcgggcgctggccagtccgctgctcccagatatggctcttcaaagtacccagatagggatgactttagtgttttgagggctatcaccacctctacacctacctcaaacatactgtgggatatgaagcaaataccgaaaattaactacccagataccacgtctacgaagtttaataactactttaatgttagctaaacactaaagcaaccactatattttattggattatagtgatcagtgaccccataagttgattaggaactaaccaagaggtaactctcacagaataaatattaattactcccaatgatatttcgattaaagcagagtacttaacagagtgaaagaaataagaaaaggattaccgacaactccggaattcctccgacttcctctactctactctctccctaattctagtatataatatagtacaatagcgcctcttataatttagctcaagctttaagttgtgttgaaagtgaagtgaaaaactccttttatagggcaagtatgatgattataacgatgcaaaatgtcttaattgccccgcggttgacggtcgttatcgaccagtttcgaccatcaaaccatgtgaagaatggttgcacgttgttgcgagaaatcggtacaagtaagagaggacctcgagttaagtaccgtgaactacagggtttgaaatacagggttaaactctattgtttcctatgcaagagactataaaatgtaatcgcctagaaccaaaagagttggaatggaatgcatcaagaatactaagagtacggaaaagctgtttctggccctcctagaagatagtaccccatatgcatatggttttcttctagcatgactttctctttatggagacaactcttcccgttaagatataacagaaaaatagttttgttgctgctgacttgctaaagtatatacatagagttctctacattggtgtttaccctatcatgcaataggaaacggctggttaatttccattatttttcctaaataagaaaagatcatgccgctatttttttcattccaaggtgttttgagtatcgtaaatgggctatacatgttagactgttagcaaaaatgtactttgtttcaaattagtacttagaattgtaataggtgtatgatagacttagagtcatagtctactctaggttatcccttctttctataaagttaagacccaaagctaatatttagttaagccacgtcatcatttaattgtcagccgttggattacatctgagcggtcctcattgcgttttcgtagcacgtcctcggtcccttcgctcgccccccaccgcatcgccttccacaccggaccccacggctatttgcctccccccagcctcatcgcctattcgcctcctccctggccctggcaacaatgacgacggcggcgacggactctgtcgatgacgacagtgacagcggcggtcgcggacgagtgtggcgacaagggcagcagcggcggcggaggtcacggacgaggacgacggcgatcgagggcagcggcggacacggaagagggaggcagcagcatttgagggcggcagtggacgcggacgagggcagcagcgttggtcacggcgaacgagggctacagcgccggtcttaggcatatttggtactaatatgttctgtgatttatctgttttgcagctctgatgtgtagatgagtagcatatgactctccgtcgcaaatcgataatgcctattgcctgtgattctcccgcatgtctagccgaataattgcatccttcctcacaagcatggtgcagcgccaccaagtctctctctccaaatccaggaaactgcaaggcatcaactgtggcaattaaatcaattatcaattccatcagcacacttgagttttctcagaaatcgatttcttcaacctgcatccggttcctggccacagatgtcttctcacagtgtttgggtatgacttgaggactttatcttcatgtttcctttttctcatgtttttttcttctacttttatctaagcccctttcagcttattgcatcgaggtttggtattgcttgagctaaatcatatttatatgtgcagagcatccgcagatttggttcattggtttcgttcaagcttcactctttcattgtactgttaggtgatgtttgatgttctctttcatgctatatcttgcattcctactttcccgtggattttatagcacttacctctaaatttcgccttcaattttcagttttatttttttctcgaaaacactggagagctgcatttcatttcatttcagttttattttctgtgatgaggttttttttttctttaatgcaaaggtgatttatcaaactttcagaactgcaatatgctattctctgtttaattcttattatcggaatataccatattatgccagtgtcaatcatatcaagcacttttaatattatgccaggggcaatcatatcaagcacttttaatcaaagaacaaatgaacgcaattctcagcagcgtacagtaccaggtatattctgctattctataattgtatcccattaacctgcatttaattttttttctatcttgcaataacaatttgcatgggccttttactaaccatacaaaacacttctacattttgcaaatgaaatttcctatttcatcacacttctacattttgatggtgttttgcctattttcatcaagtagtgttattaccaccctacagggtgactttcctagatcatgtcatcaattatgatgtattctttagttgttgtttacccacaaacaagctctgatgcccaatattcagctacatgttcagctaatgagaatgtgtccaatcataggctaagtgacgtttcagtgttttaagataatttcacattcttatgttggacactcaattaattgtacatgtttttaatttcaggcttgaatatgatctgctaattacacaatatccattgcctccacggtttgaaactatctgctcacacttctatgaaccccgcaatgctcctttactaatcaagtaatcactccagttggtagctagattagggtttgtacgatacttaaaaggagttcagaagcagcacaccacttaaacaggtaaatatacagcagtttttttattagagattcattaattgttggaaattaagatgttcaggaaatcacacattcacacttgacaagttgatagctacttctagctatacaaatgcactatcgctgaattgagatctgctattttcaatgaagaactcccattattcgcaccagactacatgtatatatttgtacaacattcatattgcccttcttcagagttatttgcactgttcctaccctagttgattactttgttgtgtaatgcttgggcatttgtcagcacttaaaatatcatgatcacttcttacaaatcccgcagcaacgcgcggggtatcacctagtttgttaaatagagaagcacatataaccgtatggtaactatagcacatttttttaattagataatagattaaaaacccagtcactacatccaaaagctgtacacaaccaggtgactgtagcacatgcgagggatgattgggcggcagcctagtcggttgatggataccttgatgcgctgtaaccatgctatatcagggaggagcgttcataatcagaactttcagagatgtgggctatggctagactccatttctaaatattgtgcatccatatcgttattactttggatcttgtatggtgttgttccgcgcttgactacctatgttgatttcggtgcatgttttataacaatgcatttgcaacattatacccatatgaatattaatgagctatgttaggactattagaatacgcgtagactacgatagcataaatcaaaattttctaccacgtaaaccaggaaccgtgcaagtagtagatcatagatcgttaccacacgacgcgctgcgcagcgcaagaaagcgctaagaaggcgaaggaaccctcgcgatgtagcgcatcgatgtagaggaagtaattgatcgcaccggctcgaccttctcctcctcgtgcgttctcctcgccgtactcccacaccgatcagcaccgcaaggcaacgacgactctaccggtatctacacatacagggacagaacgccacgcgcagatgtgctagcactcgcacgcggctagggttttttgctcgggaaggagagtggcggctagggtttctcacgtgatgcaatgcctccaccggtcacatctctcacgaatatataggatccatctccaaggcccataggactcctattcggatccctacccgaattaagcacatattggatctccatccaatccccttatttcggcccattaagcgtgcgactctgtaggttcatgcacactcggctgtaacccgaaaactccttttcagtccacatgtcaacagtggcccctagcagaacgtattgactgaccgggcatacacaaagatcataacggttgaacctctagtgtatacttgtataaacccctttgcctcacgatatcgattaagctcaaggctacatatgtgacattctttaatagctcaatcattcactcaaacttgtgatagattacataacttgtgattgactcctcaaccacctttggcatggctatgcacttctataatctataacatcaaggggcccagagatatctctccataggaggggcaaatctcatcttgattattcatatcccactacatgttttatagcatactcgaaaactacttttataactacccaattacggagtagtgtttagcagtccctatataagttactacacatgttgggaaccatgataatcttaggtctaaggattcaacaccaacactaaatgaaatcactgatgacacaacacatatggctcttgcagtatctatctaacaacatgttccccaagatgtgtccatattattaatttagtatctctataccatgatccataagacatgatcatcaattaatacatgtgcttatcattaaaatatatttgttctacatattatatttgatcagggatcctttaaaaatagcaacatacaacgcaaagagtctcatgaaagaatcacatattcattaaccaataatgagttatctatttcaaacaacaatattagataaatatataaacatagtatataatacaaccgtctttatgatttcctttagggcatatcaccaacaaggacatgaagtaacaaatgagtagaattttgcctttgccaagaagatgtatgcacgtattcattataaaatttataatggcagatcttgtatgaacacggctagaaggctagaaattggaaactaattaaggttgaggtggaggattatgttacttccattaagcacaagcatattaattgttttgctactagtcagtaccacacatatggctagaagctttatctaacgcaattttttttgttaggacgtgtgaaatcatatgacaacacatgggaaacaaaatagaataaggccctgtttgattcagattaggattattataatttagattattaggaataaagtgaaacaaacagatagcctattatgatggattattataatctataagccagattactttaatctagtaatctactctaaatgttctttttttagtttattgggttgctaacagctaacaaacagcttataatccagagaaacaaacagcttatagcttattctatatatgttggcttattataattcagcttacagtaatctaactcaacaatctacgttacaataatattaagccgaaacaaacaggtcctaattcagtgtagagtcatttttgtacgtgcacgaaactgcttttccaaatcttgtttcatcttcaggtccatggatcgtcacaggttgtgcatgtatgaaatcaatactgtaacaatatcaccacaggagagtaatacctatgttttgcgcagaaatttcatcgttgaacagtggtttcatcctatttaactgagaattcactacatctattgtgtcacacatttggtctgcagtctgcacctagtacatttatatgaaatagtgggtcaccttctgcgatctgcccattggttcgagtcaagatcttgcaatatacattaa

SEQ ID NO: 10332 - DNA, 32369 bp, Oryza sativa
aaaagcagttttgaaaaaaacgatttgattgattgattgttggatgttaccttgtttgaaccggccttgtcccttatataggggttggtcttgctatgtacaggccctcctccacgtccaacttagggtagaaaccatggaaacccgagcaaggaaacttgagacccaacaaaaacagactcgggctcggactctgccggtcagacgggccacacatcggcccccaaggaggaaaaccggcaggaattctatatttggcaattcttcctatttcaactctaggtgccaaatttgggtgtaaacacatgccccctgccttttttgtgaacatcgtgaatctaaaggcatagaacatgttgtcttagggtgataatctaattaccggccataggacttcctaagcatcttgccaaacactcgagaagtatttcccattgattgctctctgaaaatgctctccttgaagtgtctccaaaaaatacacatttcctcgaactatcccgcatactcgataaggaccttcccaactaggagaccacttaccgaactccttagatcgagaacccaaaggcaaaattgtcttccaaaccaagtctcccacttgaaacaactttgcttttacccttttgttgtacgccttagccaccctcttcttttctttttctatttcttccaaagccttcaaacgcttgtcgatgacgtcgtcaagattaactcccatcaaggtcttgtagtcttcaaccgacaaatcgccttgcttgatataccgaagagagccaagatttacctcaaccggcaaaatagcttcttgtccataaacaaacataaaaggagtgactttagtagcaccatgtttagatatcctatgtgcccataatgcctcagaaagcacctcatgccacttctttgggtgttcctcaatcttctttttgactaatttcaacaatgtcttattactcgactcggcttgtccattaattagcctgagcgtagtaaggagaagaactcaacaatttaataccataagattcggtaaaattcttcacttccttagacataaaagaagctccttgatccatagtcaatgtttgcggaataccgaatctatgaacaatatgcttcaaaataaaatcaattacatgtgtatgagtcatattcttgagcggcacagcttcggcccacttggtgaagtaatctgttgcaactagcacggaccgatgcccttttgatgacgaaggataaacttgaccaatgaaatacaaagcccaacctcggaacggccacgatttgatgatgggattcaacatggcggcggcgccaattgaacattgccgaaccgttgacaagcttcgcatcccctataatacttgaagcaatcatcaatcatcttcggccaatagaaccccgctctcctaagcaaccaattcatcttatgggccgattgatgagttccacaaattccctcatgaaattctcctgtagcaactttagattgatatcgtctaagcacttcaacaatacaccatctatattttggcgatatagctctccagcaagaaaattgcttgccgccgaatgttccgatcaaccttaaggataggatctttcaaatatccaatcaaaggaattatcaaaacttcttctatttcctgggtacaaacgtctgaatttacaattaattcggcctctaaatccatcaagatgtgccccccagcatcctgcccagagccggtcagaccgcacatgcaaggccgctcagaccgcataggcaggctggtcagaccggcggtactgagtcggtcagaccgcaagttgtcaccggtcagacagaccgcccctggtctgaaactttgccaatttcgtccaatgatttacaaccaagcaccggcttttccaatatcagaaacactcctttctttacattatagccagacgcttgttgagctagaccatttcctctaaaattctcacctctagcaatatgtctgatagcaaaatcatcaaaattggtaataatatccaagcattgatcaagatacctatttagtgacccatcaaagcacttgtaaactccggcaccttgttgcaccaccaattctgagtcacagtcacgctcggaatttctatccaaaattccaaacgcttacatgtgtgtaaaccctcgtccaggaatcagccgaggcacacaataacaaatcgataatagagtgcaattattactctaattaataagcgaatataaagtcattacagaggtagatagttactctcaaacaataaagttctaagcagcggaaaataagataaacggcgcaggcgactccattccacaagcagcttgaccaggactacacctaattctccacaccttcagcatcactgttgaactcctcctctgatgaatgattgcaaggtgagtatatgacatactcagcaagccacgcagcaaatatgcaagtgcaagggataacaaaggatggcataatatagtctcatttgcataaatggcatttaatgaatacttcagaatttaatcaaacagtaaagtatttaattaatcaatattaatccatcgcaatacaacatacccgttgcataggcccaaccatcctgaacaaccaatcccggctgcacagttctatctccaaacaaggaatataccattccaaaccaggagctaaacaagttattaccaattacagcatcatttattacggtgagatgtgtgaaactaatgacgaaagacattgttagacccgcccataactgctggcatgactattcgaatagttttactctggccagaggtgtaacactgtacccacaagacacaacctcaacatcatgtcaaccatgcgtcgcgatacttaacaagtacccaaaaagagattgtgacaataccctctgtataacacaattcaaagcagtgcaccgttcctggatcataatcacccccttaaaaataaggcatggactccccagcgacccccgtgggcttatctccgccacttcatagtctggcgctctacaatgaaccatactatacaaaaagtaaagccattgcccatgctggcttgtggttggcacagttaatgtttcacaaccgaaaatcgtgaaccggtccttaattgtcatgagcacgaccattaaaaccatgtgctcacaaaccaccattatcaattttagttgactaattaattaattaaccaatcacgatgaaccatcgtgagctatcattaagccatcattaaataatagtgaatcataaattatcccatgtatatgagctagtgtctctaagcatgtgtaacaccctgaaaattcgaccgacaaaatcaaaactctaaaaatacggattttcaaaaaactttttaaattaattgcatcatgccgatcttattcgtctattttatctggatttgatctcgaagattattaatcgtgagtaaagaatagttaattatgaataaatcgtaaaaacaaaattggtaaaatacatacaaattaaaataaatattaggtggggatagaaataaataaaatattatcgcgaccatatttggatcaattaaatttaaatacgatggaataagaattaaccctaattaaaactcaaataaattatataaaaataaaatatgagtaatattaatctagggtgaattcattagttaagataacacaaatattgagtaaaatgcatatatgcaaaattaggaattgtggaatcaaatttatatggaaaatacactaaaatcgggttaattagaaaatggcactgttcattgcacctcaggtgttcaacgcggtcccctaacccagctcctcctctttcccctctctctgtcgccaccgtcaccgcgccgtcgccgtcgcgtcctgccccgcgccgcgcttgcatcccatcgccgcctcgcgccgcgcgccaccactgccgcgccgtcgccgtctccatcccgtcgccgcgtgcgcgttccatcgccgcctcgagccgtgccgctgccgctgccacgccgtgagcccgcgtcgcgccgcgccgtcccatcgttgcggtcacgccgtgccgccgtgtcgccgcccatcgcatcccgccccgagccgcgcgccatcgctgtcgccgttgccatcgacgtcccgtcgccgcgcgcgtcccatcgccactgccgcgccgcgcgccgtctcgtcgcctcgcgccgcgagcccgccgcctcgcgccccgtgccgcgctgctccccgggccccgtgccgccgttgctaccgcgccgcgccgcccgttccatcgcctcgccgcctgtcaccgtcgccatgcgccccgcgccgcgccgcgcgccgccgctgccgctcacccgtcgcgtcgcctcgctccgcgcgcccccacctcgcgccccgcgccgccgtcgcgtctcccctctcccctcttccccttatctctgcccctctcctatataaaccccactattcccactctttccctccatcctcacctcctctcctctacccactccaccacgccgccgcctccacgccgccgcgtcgtcgcatagagccgctgcgacgccgccacgacgccgccgcgccgcgccgcgccttggccgtgccgcgtttcccgccgccgtcgcagtcgccgtgcgccgccgccgtcgccgccaccgtgcgccgccgccattgccgttgccgccggtaagccgtgccaccgccgtctttttcctttcctcagccggtcgcggtaggcaggacgagagagaggaggagaaggagccgaaagagaatacaggaagagaagggaagaaagaaaggagccgggaggagagaagagaaggaaaaaaaggaaagaaaagagaggccggcagagaagagaaagagagggagagaaaaaggagagaaaaagaaagagagggagagaaaaaggggagaaaaagaaagagagggagagaaaagagagaaaaagaaaaaagaggagagaaaaagagggaaaatagaaaagaagaaaaggagaaaaaaagaagggaaattgggggagaaattaggaggaattatgtcacaccctgaaaatcataaatatataaattgttgtttaaatggaattttttttgaaataattttaaaagccttgaagagaagatctaattttaattaataaattccaatataaaatagggccagataaaattttattaaatactttgcttaattctataattcctagatttttctgggatttatttgagctaaggaagtatttttaataaatggaattgcatttaagaaataatttaaattgaaaaatgttttaaaaagtcttcttttggctttgggccgaaagtcggcccaaaacctctcttctctctctccacggcccagtccggcccagtccgccgccgcgcgcgcgcccttgctcgctgacaggtggggtccacctgtcaggttcgtcatccccgagccgccgtcgcctggccgaaaccctagcgcgccgccgccgccgttcccttccaaatccggccgttcctttccttctccggccgaatcaaaagaggggaaatgatctccgggatctcctctaccttttctccgttggaatcttcggctaaaacgttttggaagttcgtggaatcgagttcgattcggatcggcctctttccttcaagccacgaagtttccttctcgtcgccggccgccgtgggccttcgccgccgcctcctagcccatttaaaaggctccccggtgtctcctctactcgccgccaccctcgccttcgcctctcgtcgcccgtagagctctagcgccgtgtgccctaacgccgccgtcgccgccgtcgctccagccgtgcgccgccgccgttccagacgtcgccgtcactcgggaaggtcgtcgtcatggtcgccaagtcgtcgccgtcctcgtccgccgcttcgtcaccgtcggaaaccgccggagcatcgtcgccgtcgtcaagccgcagtccgccgccgttccttcgtcgtcgccgtcgccgtccgttggtcttccgccgctcccttggtcgccggtgagttcgccgtgccgtccgctacctgttggtgccctccgttcgtgccgtagtgccgccgtttgccggcgagcttgcgccgtccgagctgtcgagccgccgagccgccgccgccggtggtgacgtcatcgctgacgtcatcgtccccgtttcccgtgagccgccatggacccgatcgatctcggccgtccgttttggatcaagtcgatctcggccgtccgttcccgtgaatcgccgccgtgcgcccggtccaccgcgaaaccctagcccgctgacgcaataaatcccttttccttttcaaaaataattcattattgcgtcataattcaattaaaatcaatttaagtgttttaatccgatttaatcttcaaaaattcataactaattcatcttagctccgatttagttggttcaagtctctaaatttttctaaaattgagatctacatgttaaaaatatccacatgtactgttcatgcttgtttatgtgctgttttggtgattttgctcttttctgcttagattccgtcgtttccgaagagtccgttttcgccggagaagagtttgaagagttccaaggccagcaaggcaagtcacacagatcccaaacaaccctttgagcatgttgatcctatttaaagctattgtttttattcaaatattgcatttattttcgaatgtcattgggtggaattaacctattgtttgttatagcccttttgttcttgattactttattccttgataccttgggttattataatttgactagttgagctttgtttatattggttcaactagatgtattagatataattgcttagccctgcttagaaacattagcacactattgggataacttatgactcactattatttaaagatggcttaatgatagttcacgatggtcaatcgtgattggttaattaattaatgtgccaactaaaacctgataatggtgggttgtgagcacatggttttgagagtcgtgctcatgacaattaaggaccggttcacgagtttcggttgtgaaacattaaccgtgccaaccacaagccagcgtgggcaacggctttatcttttgtatagcatggttcattgcggggcaccagactgagaagtggcggagataagcccacgagggtcgctggggagtccatgccttgtttataagggggtgattaagatccaggaaaggtgcgctgtaatggattgtgttgtgcgaggggtattgtcacagctcctttccgaggtaccgtggtggtattgaggcacatggtgacatgatgtggggctgtgtcttgtgggtacagtggtacacctctgatcagagtaaaactattcgaatagccgtgcccgcggttatgggcgggtctaacaatgtctttcgtgattagtctcacacttctcaccatagtaaatgatgctataattggtaataatttgattagctcctggtttggaatggtatattcctggtttggagatagaactgtgcagccggggcggttgttcagaatggttgggcctatacaacagggtacgttgtatagtgttggattaatattgtttaattattacttaacagttttattaaattctcaaatgtttgctaaatgctgcttttgcaaatggaaccctattatgccatcctttgttatcctgtgcacttgcatatttgctgcgtggcttgctgagtatgtcatatactcaccttgcaatcattcatcagaggaagagttctacagtgaagctgatggtgtggaggattaggtgtagccctggtcaagctgcttgtggagtggagccgtctgcaccgtttatcttattttccgctgcttagatctttattgattgagaggaactatctacctctgtaatgacattttattcgcttattaattagagtaataattgtactctattatcaatttgttattgtgtgcctcggctgattcctggacgagggctcacacacatgtaagcgttttgaattttggatagaaattccgggcgtgacaagttaggaaataaaatggtcagggttaatcatagattatttttggaaattcctcgagcgtaatagtatttcggtcgaaattccgagttaattataaaaatatgtttcttgaacagattagattaaaattggtagtaatttagatataattagtagctaaacaattagatgaattcttatagattattatagattatttttggtaatctctataagtcatcggttcacggtagaaattcggatttaattactaggaatcttagccgtgtatcatatttaatcgtttagtcatagactaaattaagttgtataatatttctaggatttcgttcgatatttagctcgtaatagaaatttctaacctattatatggatacaatgctcggggagagtaaattaaaaacttatgacaacgaaataattatacccgcaaaatagtttaaatcaaaattgggtttgccgtagttcgcagatagtaaagttaataaaaaggaatcgactttcgcattcgactttcatttggatttatttggatttttatttgaattctaaccgaattcaaatcaatttttgcacgtaactatagagcccgagggagttgcggatccaagcgaaggccaagacccgcaagactttgagcaaggcaagtcatcactattccttgaacatgttgatcctaattgcgaaattgttttgtttacaaacaaagttgcatgcaatgatgaacatcctacttgtgattatgccatgccttgattattgtttacccttaaatctttgtaaccatgtttacgtatgagtccctagtcaactatgacaattgcttagaaatgctattctagaatcatgcatactcatatttatcaaatgctatatgcttgggtaattacctttgggaaggtaattgagatgcggcatgtggagacatgagcgccacattgccatgatgttgatgacatgatttgtgaaaggagaaataaaattaaacaattgttttcgactggggcggacggagaatttgggttgtatctggaaaaggctagtaccgtccccagtcaattaaggaccgagccatgaagttaagcatgaaacgacccccgtacaaccgtacttctcgaatgggtatagacctagcggattagatagccgagcggaggcagtatccctgcatagatggttcacccctgagtgaggcaggtgcgctacgatgggacagccgttgaggtagggccgagaagcgtgccctacatcggtgtcgccattggtaggactgccatgagtgtgtgagagagagaacttaacttgaaccataatttaatatgcgtgtgagacttctctttccccgggagcgccagaactcctctcactgctagaaacatggacgcctagagtgcatgaggatttaagttcatggagcgggtactggcaatgcgaggttatcgaaaagctttgccgtgacgcgtctcatgtgttgggacgaggctcatgtgttgggcagtcgcggagtgcgggtaaaatgtacatccactgtagtgtgagtaaaccaaatctattcgaacagccgtgctcgcggttattgagcaccgggacatgtattacacttggctagactctaaattctttaacttgtgtgggatgggatattacatgatgatttttatgctgatggagccacttcctgagaggcgggaatgtggatgtcctcagaaaaccataacgactcaatggcgggaagctatccttgggatcacaatggatggtggacagaaccgtcattgttaaatatgaacactggtaataaaacttgatcagtctatgctaggtcttaggcttgtgaaaataattacaaaacttgcttgcgcaaaagaaccatagccatcctttgaattcctctgtcatgtgcatcattgctgtggtggcttgctgagtacggttggtactcacccttgcaaatataaaattaatcagaagcgggagatgaagcctcggaggatccctatacctactaccaggagggagatgaagacgatggcactcagtaggtcttagtacggtcgttgcctgtggcaatggcatgccgctgcctgaattccgctgccttatctatttctgcttttggatgtattccggaccgctcggtccgatgatttaagactatgcctgcgggcttatgatgtaataattcgaattagacactcgtgtatgtgcacttggtattccagctatgaattcgtgcgtaccagatctgatccagggaaatggtactgtttacacgattgactcctgttataaaaacgggggtccacagcatggctaagcatcctaagcactttagctaaaaccatataatgttctagctaatccaattattaaccaagtgacaaagtataggtaagcaataacaaaggcaataggttccacccaatgacattcaaaaataaatgcaatagttgaatagaaacaatagctttaaacaggatcaacatgctcaaagggtcttttgggatctgtgtgacttgccttgctggccttggaactcttcaaagtcttctcctgcaaattcggactctccgggaatgtcggaatctaagcaaaaaagagcaaaatcaccaaaaaagcacataaacaatcatgaacagtacatgtggatatttttaacatgtagatctcaattttataaaaatttagagacttgaaccaactaaatctgagctaagatgacttagttatgaatttttaaagattaaaccggattaaatcatttatatagattttaattgaattatgacgcaataaagaattatttttgaaaaggaaaagatatttattgcatcagcggtcttgggtttacagtggaccgggtgcacggggatggtctacggaacgaacggccgtgatctaatcttatccaaaacaaacggccgagatcgaatcggtctaccgcgggtctacggctgacgcggtgctgacgttggcgatgacgtcatcaccggcggtggcttggcaactcacgctcgccggagaacgacggcgcggcgacgcaaacggagggcaccaacaggtagcgggcgacgcggcgaactcaccgagggcttagacgatggcgaacgacaacggacggcgacggcggtgaggttgaagctgcggcggcgttcgggtcaacgatgatggcggtgctccggcggtcttcggcggaaacagagggcgggacgaggacggcgacgacttggcgatcccgacggcggccttcccgaccgacgacgacgaccggagtggcggcggcgcacggctggactcccttcggcggcggcggagcacgggctctagtgcctagggcgctacgagcgacggcgagctaaagcgagggtggcggcggatagaggaggtcccgggagtccttatataggggctaggagcggtgacggaggcccacggcgaccggcgacggcgatggaaagtttagggttcgggaggaaaaacgaatccgaatcgagctcgaatcccacgatttccaaacgaaactagatgatgtttctataggagaaaagatagaggagatcaacgggatcatttcccctctaccaatttgatcggatcgggaacgacgcggccgaatttggaaggaggcggcggtggcttgcgtgcggcgggctagggtgcggctggcccgaggaggacgacgaccctgacaggtgggacccccacctgtcagggggagagagagagggagagcggcggctcggctcggcgggctaactacaccggggcgctagcaggccgaggagagagagaggggttttgggccgactttcggcccaaagccaaaagaggacttttaaaacctttttcattttaaattattcatgaaatgcaattccatttattaaaaatactttcttggctcaaataaatcctagaattatctaggaactatagaatcaaatgaagtatttaataaaattttatctggcccacttttatattggaatttattatttaataattagatcttttcttctagacttttaaaatcatttctaataattccaattaaacaacaatttatacatttgggatttttagggtgtgaaaaacctacccccttcaacataatctcgtcctcgagattcggaagagctggcgaaaagatgcggatgggctgactttaattcatcttcttgttcccaggtagcttcttcttccgagtgattactccattggaccttacagaaacggataactcagttcctggttcttctttcatctatctccaagatacggattagttgatcgcaccagctcgaccttctcctcctcgtgcgttcacctcgctgtactcccacgccgataagcaccgcaaactagcggcgcctctaccggtatccacacgtacagggacggaacgccacgcgcagatgtgctagcacccgcgcgcagctagggttttgcttggggagggatgtgacggctagggtttctcacgtgatgcaatgcctctgccggtcacacccctcacgaatataaaggattcatcactcgggcctccaaggtccgtaggactcctattcggatccctatccgaattaagctcattttggatctctatccaatccccttattccgacccattaagcatgcgaccctgtaggttcatatatactcggctgtaacccgaaaactccttttcggtccacgcatcaatagcggcccctagcagaatatattgacccaccgggcatacataaaaatcatattttctgaacctctagtgtatacttgtatgaacccctttgcatcacgattatcgattaagctcaaggctagatatgtgccatcctctaatagctcaatcattcactcgaatctgttgatggattatataacttgtgattgactcctcattcacctttggcatggccatgcacttccataatctacaacattgaggggcccagagatatctctccataggaggggcaaatcccatcttgattattcatatcccactacatgtttcatagcatacccgaaaactacttttataactacccaattatggagtagcgtttagcagtccctaagtaagctactacacatgttgagaaccatgataatctcaggtctaaggattcaacatcaacactcaatgagatcactgatgacacaatacatatggctcttgcagtgtctcatgttgggtctatccaacaacatattcaccaacatgtgtccacattattaatttggtatctttataccatgatccatgagacatgatcatcaattaatacatgtgctgatcatataaacacatttgttccacatatgatatttgatttgggatcctttagaaatagtaacaaacaacataaagagtctcatgaaagaatcacatattcattaaccaataaggagttatctatttcaaggaacaatgtcggataaatatgtaaacatagtatgtgatacaatcatctctatgattgcaactagggcatatcactaacagtctcccacttgcactagagtcaatcatgaatgtatcttacgcccattgccctagtgtgtgcctgatgcttaggttgagggagtggctttgtcaacggatctgcaacattgaaatccgtatgtattttgcatatcttcacaactcctcttcccactatctcgcgaatgaggtgataccgccataaaatgttggacttttgatgcgatctaggctccttggcttgcgcaatagcaccactattatcgcaataaaggtccatagggctagaagcactagtcatcacacctagttgaaaaacgaatttctttatccaaacagcctcctttgctgcttcagaagcggcaatgtattcggcttctgttatagaatcaaccactgtatcttgcttggaactcttccaactcacagcgcctccattcaggcagaacacaaatccagactgcgatctaaaatcatctttgtcggtttggaagcttgcgtcagtgtaaccttttacaacgagctcttcctgtcctccatagactaggaacatatccttagttcttctcaagtacttcaggatattctttacagctatccagtgactctcacctggatctgattggtatcggcttgttgcactaagtgcatatgaaacatctggatgtgtacatagcatagcatacataatggatccgattgccgaggcatatggaatcacactcatcttgtttcgctcatcagtcgtttgaggacactgattcttgccaagattaatgccatgtgacatcggtaagaaacctttcttagaatcttgcatattgaacctcttcaacaccttgtcaatatatgtactctggcttaatccaattagcctctttgatctatctctatagatccttatgcccagaatatatgctgcttcccctaagtccttcattgaaaaactatttttcaacgatgtcttaacggattcaagcataggaatatcattcccaatcaataatatgtcatctacatataggacaaggcttttcttcgtttttgacaaagcccacgccttgactacttcgtcaaaacgaatattccaactccgagatgcttgctttaacccataaatggatttttgcaatttgcatatctttttagctgattgtggatcaacaaatcccttgagttgtgtcatgtacacatcctcatcgatatttccattgacgaaagctgttttgacatccatttgccatatctcataatcgaaataggcagttatcgctaaaacaatctgaatagattttagcatggcgactagcgagaaagtttcatcataatcaacaccttgaatttgtctgaaacctttcgccaccaatcgtgccttgtagatgtgaacatttccatctacatctgtctttttcttaaagacccatttccactcaatggcttttacaccatcaggtggatcaaccaagttccaaacttgattgacatgcatggattctatttcggatttcatggctccaagtcccaccattgcttcctcataggtagttggttcatcgttttctaacaacaatatatcacgttgtcctgtagttaataacgcatacctcgcaggtgtacaccgtatcctttcggaccttcgtgaagctggtgcttccacaactggttcaacaacaacttgttcaacctgttgaacaacatcttgctcagcttgtggttgtgtggacgttgaagcgttttccagtgtttcctaaatttcttcaagtcgcaccatgctcccactattctttcttaaaataaactctttttccaagaaaacaccatgtcgggcgacaaacactttgccctcttcccgattataaaaataatatcctttcgtttccttaggataccccacaaagaagcatttatctgatttaggtgtgagtttgtccgattgcaaacgttttacatagacctcacagccccaaatctttaggaaagacaaactgggacgcttccctgtccatatctcatatggtgtcttattcactgattttgatggaaccttgtttagtgtgaacgcagctttctctagagcgtaagcccaaaagcttagcggcagatcagtttggctcatcattgatcgcactatgtctaacaatgtacgattcctccgttcagacaccccattccactgaggcgttcctggtggagtgagttgtggaacaattccacactcctttagatgattgccaaattcaaggctcaagtactctccaccacgatcagatcgtagatacttgattgtcttgcccaaatgattttgtactcagacttatgcttcattaagtagacataaccatatctactaaagtcatcggtaaaggtaataaagtacccaaaaccacctctggcagttgagctcattggtccacatacatcagtatgtactagtcccaatagttcacttgccctttcactttgacccgtgaaaggtgcctttgtcattttgtcaagtaaacaagattaacatgtctcaaatgattcaaaatcaaacgagtgtagaagtccatctctatgaagcttctccatgcgtttctcatttatatgacccaggcgacaatgccaaataaaagtgggattcaaatcattaggacgtcgccgttttgcattaatgttatagaccgaacatccatcaagattcacaatgtataagccattcatcatgggtgcatggaaatagaaaatgtcattataatagactgaacaaccattgtccacagatctaaaaccataaccctctgcttgcaaacaagaagcagagataacgttcttacacaaagctggaatgcaataacaattatttaactccaaaactaatcctgacggtaaagataatggcatagtgccgaccgcaacagcagcaactcttgctccattgcccacgcgaatatccacttcgcctcttgctaagctcctacttctttttagcccctgcaacgatttgcatatgtgagcaactgatccggtatcaaatacccaagaatcagtagaggaagtagcaagattaatttctataacattaatacctgaggtgaaactctttccatcctgctgcttctgcttgagctactctaggtatttcttacagtttctcttccaatgacctgtctccttgcaaaagaagcactctgcatccttagcgggccctgtcttttgaaccttggtcttagagttgctagtactcgtgatctcatcagagtttagctttctcttttgaccactcttcttgttgttgggcttgctcttatgcataaccatcacatggttggagtttttcttaatgctttccttcgcagtctttagcatcccatgcaattctgccaaggtcttattcaggttgttcatgttgaaattcattatgaacggctcaaagctgggagggagcgactggagaatcaaatcagtagccaactcttggctaaggggaaagccaagcttatccagactctcggtataaccaatcattttgatcatatgtgggctcactggattaccttctgcaagcctgcacgcaaacaaggacttttaggtattaaacctctcagctcttgcttggtcctcaaacatgttacatagtcccgtgattatcgtatgagcatccaatgcctcatattgcctttgaagctcaggggacatagtagcaagcatgagacagcttatatcaaagtattcattgcatcgcatttcatgctccctacgttgagcagcacgagcattgttgggcaagtcagctagaaaaggttgtgtaagcacaaactctttgtgctcttgcctgagaacaattctcaggttgcgataccaatccatgaagtttattccagtcaacttctctttctcaagaatagaccgcaagttaaaattggatggtgcaggagctgccatgatctacaatagaaatatatgtatgcaaagtcagcaccatgtttacatttaacctttcattaaacaatttaacaaaagatactcccactatgtattgtgaaacaaaattccctctagtaacatagtgagtcaagatcctcattttattagtgtctagtgagctttggcatcacagctatacaactatcaaaataggtaagcaacaccttactaatcacatcatatgtgactcttgtgttgttgggtgacatctccatgtccaacccaacctatgccccaaggtccaaaactgttttgataaccttgtcaagtaaactaataatctccgcatatagatgtccgacatctatcctattttatcatgataaaaagtgacactttgctatggcaaacccatcacttatgatcacaaccgtaataggtgcaattattggaagagcataaactacacttaatttttctgagggaatctatcctaccatgtcatatcaaatatacaaacaacaataaagtaagatagatataaaaaccccaagcgaaatctaaggggcaacgcacacggcggtcccacgggtttcagggcagcgccctgaaaaggtcacggggtacatagatctcatctacgattcgccatgtgaaaaccttaacagcgtaatcaaattatgccaaaaccgagtcaatctcactggctcgtttttctcattggcgtgcagttccagtggacatcggactatccgatgaacacaattgcactcggccttggtgagtactagacattccagtgaagtcaccaacacacataccgattgatcttatcaacccatgcggctaccagttcatctcatgttccgatcacctaagaacacatatacaacataatagatctcatctactacatccgcatatcaattatatgcaatgatctagatcataaactatacaaggcggctctgataccactgttgggatacgcgtaggctatgatagcatagatcaaaattttctatcgcgtaaaccaggaaccatgaagtgttagatcatagatcgttaccactcgacgtgctgcgcagcggaagaagacactgagaagttgaaggaactctcgcgaagtagcgcgcgtcgatgtagaggaagtagtcgatcgcaccggctcgaccttctcctcctcgtgcgttctcctcgccgtactcccacgccgatcagcaccgcaaaccagcggcgcctctaccggtatccacacatacagggacggaacgccacgcgcagatgtgctagcacccgcgcgtggctagggtttttctcggggagggaagtgatggctagggtttctcacgtgatgcaatgtatccgccggtcacacccctcacgaatatataggatccatcactcgggcctccaaggcccgtaggactcctattcggatccctatccgaattaagctcatattggatctctatccaatccccttattccggcccattaagcatgcgaccctgtaggttcatatatactcggctgtaacccgaaaactcctttttggtccacgcgtcaacagcagcccctagcataacgtattgacccaccgggcatacataaagatcatatcggctgaacctctagtgtatacttgtatgaacccctttgcctcacgattatcgattaagctcaaggccagatatgtgccatcctctaatagctcaatcattcactcgaacctgttgatggattatataacttgtgattgactcctcaatcacctttggcatggccatgcacttccataatcgacaacatcgaggggcccagagatatctctccataggaggggcaaatcccatattgattatttatattccactacatgtttcatagcatacctgaaaactacttttataactatctaattatggagtagcgtttagcagtccctaagtaagctactacacatgttgagaaccacgataatctcaggtctaaggattcaacaccaatactcaataagatcactgatgacacaacacatatggctcttgcagtgtctcatattgggtctatccaacaacatgtttaccaacatgtgtccacattattaatttggtatctttataccatgatccatgagacatgatcatcaattaatacatgtgctgatcatataaacatatttgttccacatatgatatttgatctgggatcctttagaaatagtaacaaacaacataaagagtctcgtgaaagaatcacatattcattaaccaataaggagttatctatttcaaggaacaatgtcggataaatatgtaaacatagtatgtgatacaattatctctatgattgcctctagggcatatcattaacagccaccgccagcttctcattccatgaagctagctagcagacaatggaagccactgggatgcagctgacgcactcatcttccttttctccccacctccgccgctcccggacttgcattagagcgtcgccgtgcatgtcgcctcgctttgacgccaacctcgccaaatctgccccgctgccgcggcatcgcttccttccatggcagcctcgatgagccatcgggctgtaatttgcggatgccgaggaacccatccgcccacccattttggcccacacgaagagctgctccaccattgctgtggggaggtccaccccgtcacatgcaggccatggcaactagccgacgcagagcgagagagcacaccagtggcaagcagttggtggtgaccatggcacgcggtggccgccagcgcacaggatgaggagatcgagcgtcgatgtcgacagcatggctagaccatgacatggtggctggcgcaaggttcttccgtcatcgaagctctacagtggcatcctagggaacccctgtttaaccttggcaatttatcgaatcctatttgaatgacggcatgttagcgaagctagtttttttttcaattacatagatgcaaatttttttgactatatgttcatcaagtaatgagaaaccataaaacactagtacagatcctcccatcaatgaaggcctctcacataactgggttttgtgttccgtcactccagatttgcccgagacatgcacctaaggagaaaatcgcaatcgggccgaaataaacaccgacgtagatcaactcgtacagatataattgagttgcatatatcaagtgcccatcaccgatgagactcatctgtgacgggcctacgtttaggcccgattgagattatctctacaatctttgtcgggcccaacacttaagcctgcaatggatgagtatcatcggtgacgggcgacaaacacatcccgattaacataaatttaaggcctatcaccaatgagcagttatcgatgacgggcttattggtatgcccgtttgagataactgaacgcccgtgaccgatgttctttcattggccgttactgatatctattgtacactacaaatactccaccccattgttctctgaagttatcccactgttcactattttggtgagaggttgaagggggtgaatttttgtgtatttttccaagaaaaacagaaaattcataaagtcagtgaagaatactaatcaattctcattaatttagtaatacttatcctataagatgtttctctaatattttttcatttttgcaatgatgaatcgaagttggatatatgggaagactgtgaaacgtcatagcaaggagtatagaaatgatgtattaaattttataaatgcagcggaggaggataagaaaagaagaaacaacgattacatgtgttgtccatgtgtggattgcaagaatgagaatatgtttgatagcagagtggacatacatggtcatatgatacaacgaggattcatggagggctacgcatgttgggtgaagcgtggagagcaagaagttacttctgcagatagaagtggtgcaaaaaatcaggaagaagaagatgagcatgatatgtttgtaccttctccattgggcagtgaaatggttgatgtggatcacgatctgctgcaggacatgttacgtgacgttgaggacccagcttacaacaagagagattctatgaagttcagaaggttggtcagtgactcggagacacctctatacgctggatgcagggcaaaacacaccaaattgtcagctaccttggacctaatgaagctgaaggcaagtagtggatggacagacaagagtttcacacaaattttgggaatattgaaggccatgcttcctgatgatatcctaaccaaccggacaaggaattgggcaagggcaagggtgaagaagaatagcgacggaacacttacgttcccaaatgccgaagatcaagcagtgtatcagaaaattgtaagttcaacacatcgcatatgttcaatttgtgtttgtgtctatcgtagtgtcgatttaacctggccttaattgtgcggcaagtcgaccttactgcctagagacagttctcgcaagaggtctcctcacaaagatgggatgatgacatcctcacggtagcgttgggaaacgaagaacaccgtggatggataagcggcattggctccgatattccatggaagcatgggtttccccaatacgcgtggcagtacaagaagaacaaactgacaaaggcggagaaagatgcacgcctcaaggaacaacttatggaggacatcagagctgagctaagctctgaattcgatgagaagttgtcacgggtggaggcacgcatcaggggtgagcaccagcaagggaacgtcgaccccgccgacgctcccagagtagaagtgagccccacggaaaggcgtagcagctgcgcatcaactgaagcggcggaagaacaaccaccagtccctaccgcagtggaccacacaatggtaaaaccaacaaataaagcatatgttgtcttagctcatcaatatgttatgacatattctaagaacatgtatgaatctatcacagggtcccatagagtgcaccctagtcgttagggtgacacaagcatttacacttcctaccgccaagggtcttgcgttcaagcctacaccgaaaacccgagttcatcgggcgtagttgatggccaggcatgctaaagtacaagtggacttagtcaagcccgaatgggtaggctccactctgatgcatccaccaaatgacgaggttttgaccctaggagttgcacatgggacctttatccaatggcccaagcataacattcagataaaatataagtcctaggccaacaccaagtactagacccactacaactcttatatctgcccctcctgccattgaagaaggagatgaagatctccaattgtaatatgatacagattttggggatgagggtttggaagtcgacagcatggcgtactttccccctcctgccaaaaagagcaagaaggcccaatcttctccaccacagcatgaaacaaaaaagaaagctgttgggagggggagaggaagaggaaaggtagaagcctcgcttctagttcccaataagccaaatcttggcaaggcaccatcagctcgtcccacggctccgaccgacttcacattaggcatgccactggttggagacgacatgttagcgaagatgggccctgcttgcaaggagttgcacgggtactacatggagatgtccaacacaaggaggaagcatagagagacctgcatgacgggccatcacgatagacagccattccttgggcctccaagctttattgctgttggtatttcttaatgtcacagataaaatccgcaagcgcacggaagataccgatgtagcacttcacctgggagtattccaaggtatagatttccacaggaacttgtgtgtcatctcttcactaggttcatccaaggacacaaagctaaggtaggctaagggtagagaggatttactagtgagagacagtgtctatagaaagctcagtttaatcctaacgcggtacttcgggcgctggccagtccgctgctcccagatatggctcttcaaagtacccagatagggatgactttagtgttttgagggctatcaccacctctacacctacctcaaacatactgtgggatatgaagcaaataccgaaaattaactacccagataccacgtctacgaagtttaataactactttaatgttagctaaacactaaagcaaccactatattttattggattatagtgatcagtgaccccataagttgattaggaactaaccaagaggtaactctcacagaataaatattaattactcccaatgatatttcgattaaagcagagtacttaacagagtgaaagaaataagaaaaggattaccgacaactccggaattcctccgacttcctctactctactctctccctaattctagtatataatatagtacaatagcgcctcttataatttagctcaagctttaagttgtgttgaaagtgaagtgaaaaactccttttatagggcaagtatgatgattataacgatgcaaaatgtcttaattgccccgcggttgacggtcgttatcgaccagtttcgaccatcaaaccatgtgaagaatggttgcacgttgttgcgagaaatcggtacaagtaagagaggacctcgagttaagtaccgtgaactacagggtttgaaatacagggttaaactctattgtttcctatgcaagagactataaaatgtaatcgcctagaaccaaaagagttggaatggaatgcatcaagaatactaagagtacggaaaagctgtttctggccctcctagaagatagtaccccatatgcatatggttttcttctagcatgactttctctttatggagacaactcttcccgttaagatataacagaaaaatagttttgttgctgctgacttgctaaagtatatacatagagttctctacattggtgtttaccctatcatgcaataggaaacggctggttaatttccattatttttcctaaataagaaaagatcatgccgctatttttttcattccaaggtgttttgagtatcgtaaatgggctatacatgttagactgttagcaaaaatgtactttgtttcaaattagtacttagaattgtaataggtgtatgatagacttagagtcatagtctactctaggttatcccttctttctataaagttaagacccaaagctaatatttagttaagccacgtcatcatttaattgtcagccgttggattacatctgagcggtcctcattgcgttttcgtagcacgtcctcggtcccttcgctcgccccccaccgcatcgccttccacaccggaccccacggctatttgcctccccccagcctcatcgcctattcgcctcctccctggccctggcaacaatgacgacggcggcgacggactctgtcgatgacgacagtgacagcggcggtcgcggacgagtgtggcgacaagggcagcagcggcggcggaggtcacggacgaggacgacggcgatcgagggcagcggcggacacggaagagggaggcagcagcatttgagggcggcagtggacgcggacgagggcagcagcgttggtcacggcgaacgagggctacagcgccggtcttaggcatatttggtactaatatgttctgtgatttatctgttttgcagctctgatgtgtagatgagtagcatatgactctccgtcgcaaatcgataatgcctattgcctgtgattctcccgcatgtctagccgaataattgcatccttcctcacaagcatggtgcagcgccaccaagtctctctctccaaatccaggaaactgcaaggcatcaactgtggcaattaaatcaattatcaattccatcagcacacttgagttttctcagaaatcgatttcttcaacctgcatccggttcctggccacagatgtcttctcacagtgtttgggtatgacttgaggactttatcttcatgtttcctttttctcatgtttttttcttctacttttatctaagcccctttcagcttattgcatcgaggtttggtattgcttgagctaaatcatatttatatgtgcagagcatccgcagatttggttcattggtttcgttcaagcttcactctttcattgtactgttaggtgatgtttgatgttctctttcatgctatatcttgcattcctactttcccgtggattttatagcacttacctctaaatttcgccttcaattttcagttttatttttttctcgaaaacactggagagctgcatttcatttcatttcagttttattttctgtgatgaggttttttttttctttaatgcaaaggtgatttatcaaactttcagaactgcaatatgctattctctgtttaattcttattatcggaatataccatattatgccagtgtcaatcatatcaagcacttttaatattatgccaggggcaatcatatcaagcacttttaatcaaagaacaaatgaacgcaattctcagcagcgtacagtaccaggtatattctgctattctataattgtatcccattaacctgcatttaattttttttctatcttgcaataacaatttgcatgggccttttactaaccatacaaaacacttctacattttgcaaatgaaatttcctatttcatcacacttctacattttgatggtgttttgcctattttcatcaagtagtgttattaccaccctacagggtgactttcctagatcatgtcatcaattatgatgtattctttagttgttgtttacccacaaacaagctctgatgcccaatattcagctacatgttcagctaatgagaatgtgtccaatcataggctaagtgacgtttcagtgttttaagataatttcacattcttatgttggacactcaattaattgtacatgtttttaatttcaggcttgaatatgatctgctaattacacaatatccattgcctccacggtttgaaactatctgctcacacttctatgaaccccgcaatgctcctttactaatcaagtaatcactccagttggtagctagattagggtttgtacgatacttaaaaggagttcagaagcagcacaccacttaaacaggtaaatatacagcagtttttttattagagattcattaattgttggaaattaagatgttcaggaaatcacacattcacacttgacaagttgatagctacttctagctatacaaatgcactatcgctgaattgagatctgctattttcaatgaagaactcccattattcgcaccagactacatgtatatatttgtacaacattcatattgcccttcttcagagttatttgcactgttcctaccctagttgattactttgttgtgtaatgcttgggcatttgtcagcacttaaaatatcatgatcacttcttacaaatcccgcagcaacgcgcggggtatcacctagtttgttaaatagagaagcacatataaccgtatggtaactatagcacatttttttaattagataatagattaaaaacccagtcactacatccaaaagctgtacacaaccaggtgactgtagcacatgcgagggatgattgggcggcagcctagtcggttgatggataccttgatgcgctgtaaccatgctatatcagggaggagcgttcataatcagaactttcagagatgtgggctatggctagactccatttctaaatattgtgcatccatatcgttattactttggatcttgtatggtgttgttccgcgcttgactacctatgttgatttcggtgcatgttttataacaatgcatttgcaacattatacccatatgaatattaatgagctatgttaggactattagaatacgcgtagactacgatagcataaatcaaaattttctaccacgtaaaccaggaaccgtgcaagtagtagatcatagatcgttaccacacgacgcgctgcgcagcgcaagaaagcgctaagaaggcgaaggaaccctcgcgatgtagcgcatcgatgtagaggaagtaattgatcgcaccggctcgaccttctcctcctcgtgcgttctcctcgccgtactcccacaccgatcagcaccgcaaggcaacgacgactctaccggtatctacacatacagggacagaacgccacgcgcagatgtgctagcactcgcacgcggctagggttttttgctcgggaaggagagtggcggctagggtttctcacgtgatgcaatgcctccaccggtcacatctctcacgaatatataggatccatctccaaggcccataggactcctattcggatccctacccgaattaagcacatattggatctccatccaatccccttatttcggcccattaagcgtgcgactctgtaggttcatgcacactcggctgtaacccgaaaactccttttcagtccacatgtcaacagtggcccctagcagaacgtattgactgaccgggcatacacaaagatcataacggttgaacctctagtgtatacttgtataaacccctttgcctcacgatatcgattaagctcaaggctacatatgtgacattctttaatagctcaatcattcactcaaacttgtgatagattacataacttgtgattgactcctcaaccacctttggcatggctatgcacttctataatctataacatcaaggggcccagagatatctctccataggaggggcaaatctcatcttgattattcatatcccactacatgttttatagcatactcgaaaactacttttataactacccaattacggagtagtgtttagcagtccctatataagttactacacatgttgggaaccatgataatcttaggtctaaggattcaacaccaacactaaatgaaatcactgatgacacaacacatatggctcttgcagtatctatctaacaacatgttccccaagatgtgtccatattattaatttagtatctctataccatgatccataagacatgatcatcaattaatacatgtgcttatcattaaaatatatttgttctacatattatatttgatcagggatcctttaaaaatagcaacatacaacgcaaagagtctcatgaaagaatcacatattcattaaccaataatgagttatctatttcaaacaacaatattagataaatatataaacatagtatataatacaaccgtctttatgatttcctttagggcatatcaccaacaaggacatgaagtaacaaatgagtagaattttgcctttgccaagaagatgtatgcacgtattcattataaaatttataatggcagatcttgtatgaacacggctagaaggctagaaattggaaactaattaaggttgaggtggaggattatgttacttccattaagcacaagcatattaattgttttgctactagtcagtaccacacatatggctagaagctttatctaacgcaattttttttgttaggacgtgtgaaatcatatgacaacacatgggaaacaaaatagaataaggccctgtttgattcagattaggattattataatttagattattaggaataaagtgaaacaaacagatagcctattatgatggattattataatctataagccagattactttaatctagtaatctactctaaatgttctttttttagtttattgggttgctaacagctaacaaacagcttataatccagagaaacaaacagcttatagcttattctatatatgttggcttattataattcagcttacagtaatctaactcaacaatctacgttacaataatattaagccgaaacaaacaggtcctaattcagtgtagagtcatttttgtacgtgcacgaaactgcttttccaaatcttgtttcatcttcaggtccatggatcgtcacaggttgtgcatgtatgaaatcaatactgtaacaatatcaccacaggagagtaatacctatgttttgcgcagaaatttcatcgttgaacagtggtttcatcctatttaactgagaattcactacatctattgtgtcacacatttggtctgcagtctgcacctagtacatttatatgaaatagtgggtcaccttctgcgatctgccaattgctccgagtcaagatcttgccaatatacattaagagcctattcgcttttgatgtcatttttaaccatattatttttggtaaagttgctaaaaaaatgtctacgtttagcttgttgccaaaattggtaaatacataagaaatcctaccaaaattttgatactattatcatcttaccaaaattttgttactgctaaaatttggtactccctccatcccataatataagagattttgagtttttgcttgcaatatttgaccattcgtcttattaaaaaaaatttaaaattattatttattttatttgtgacttgctttattatctacagtattttaagcataacttttcgttttttatatttgcaaaaaaaattgaataagacgagtggtcaaaaactcaaaatctcttatattgtgggacggagggagtaagatttattttagatataatctaaatatgccctaaaacagaaactataaattagagatcagtagaattgaaaacttcacatgatggaccagatgtttctggagtccatcaaagatctaccgacttcttcatcgtcggctagccagtgggcggactagtacatttcctgtgcatcgacaattaacgtctacctacttttggatcatagcgaaaaaagtcggatcggggattaaccttgtgcagggttagcgatctcgaaattatgttttttcgggggagggtagaactgaaatttctgaaacatcggaaaattgatggccgaatttattttaaaatataacgaatttaaataaacttttatcaaattcacaggaaattggaaaaagatgaaaattttggatgagatttttgcttgccggtggggaaatttctgaaatttcgaaccgaaatttcaatcactaacctagtgaggtcgtcggttcacggtccaccagttcaccagttagatgacataattattctttcactttaattaattttaacagtgcgaaatataatactttaccctttgatatctagtaaatttcacttgcacagctggttacgtggaaacgcgcggtacgcttaccgtatgtcatcatgccatgcacgaggtcatgggttcaactccccacttttgcaacatttcgctagagaaccatccggtttgatggttttccactggttcacatgcatgaacggaatttcctacaaaccgtactgcgccaggctttggttctagtttaactgtcggttcggtctggttttttctactatattagtttaaccgcgtgctcggtccgtttttttctactatattaggacagcagtagcttatatatcagccggcatactgtttgtgttgcaaaaggagacctcactgatctcctgggaaagacaaagaagtgatacacaatggctgacaatgtcgatgatgactctcaatgggtggaagtggtgatgatcaatagttatgccctatttatggggtacttgtccatggccatcagagggatgggcttcctggtggttttgtggactaccttcatcctcctcggtggcttcgtctccatgctcgagaaggacttctggagtctcaccgtcatcaccctcgcacaaacaactgggttagtgatctatatttaacttgctcctcaagcttcatttgctgcttattaattcgttgtctccttttttttttttgtttctggtaataaatttgagaaaggagaaaaggcttttggagcttggaacttcgaaaaaaagctccttgactcactcctccgcatcatttctgatgttcatgtagttttatccggaatatataagaatttgtgatgcaaaggaattacataggaattaacactagcagtcctatagaaacacgttgtcagtaattagaaagagcacaggttaattgcttgacgggagtcaataataaaatcagcgcgaaaatagtgctgattgaggaaaatgtacaccgttggcgaatggcgatagatgttttgctcctccttgtccagatagctgatcaatgatctgctccaataatttccatgatgacagcactgatgtcagagattccaggacagctgtgacgtcaaagagcgacagggagggacagaataataaagatgaagtaatgggcgtggttgactggctaaccacgactgtgtttaggtcacactgaagtttaaaagcttggttgaaattagtatgatgtgatagaaaagttgtgtgtgtataaaaggtttaatgtgatagaaagttggaagtttggaaaaaaactttagaactaaacagggcccaaaattctttgggatctattctttcttcctctcttctaaattttactctcatgtttttcatgcgcacgccttctaaattatgtgtttttacgcatatttttagaaaagttgctttaaaaattatattaatatattttcaaataaaatgtaggtaatacttaattaatcatcactactggatagctttactcccggttggtaaccccctatagtcctggttatgcaaccgggactacgaatccaggattaaagatgctcatctttagtcctgggtaaaataactagagtaaaaattcattttctagtcccggcactaaccaggactaaagatggagccaggccaggtccatttgctctctttttcctttttcattgtttttaacattaaatattgatttcactctgtcggtgacatggaaccgggagtatcatgactagaggcttgaggcagacacaatcgcccacgtagcctggcaccctcggggggcgtcgggcccgagggtgatgcgttcgccctcctcttagtccccccgagggggtcggtccacacccccct

SEQ ID NO: 10333 - DNA, 31054 bp, Oryza sativa
agtcgtcgtcgtcgtcgctgtcgtccggcgactactcctccggggctaggatcctcgacaagctcctgtcacaggcctggctgcgggagcagcacgagctcatcaggcagctcgtcgggtcgtccaccgacctgatggacaagctgctgcagacgctccggtgcacggggacccgcgaccgcggcgttcgggagcacgccgcgaggatcgtggcgcacctcgccggcgagatcacgctcgccaggttcccgcaagggatccggtgcatatactcgctgctcaccaccccgagaaaccagcagcaagacgacgacaacgacgacgacgacgacgacagcgcccagtcctccgatcactacaagaagctcatggtgcagggcctcgtcatcctccacaagctagccgccgcggagcacaaccggcggatcatcatcaacagcacccagggacggcagctgctctccatggccatggcgcccgtcagcgccgacctgctccaccgcatcgaccacgaagcgtggaacgacatcgtcgcctgctcgctgcagctcatgtgccggctcgtcaccgcccccggcgagaccggcgacaagctgcgttcccaggtgctgaacgacaaggacgccatcggcaccatggagaggatcctcaactgcgacggatgcaacgagaagaggctctatattctcgccattaacatcctcacgcagcttcccatggcggcgaagaacaaggtggtggacgaggcttcgagcatgagcgtcgagagcagaaggaaattcaccaagctacttctactcatctataccgacgaagagaaggacgcctttatgagacaaatggcaggtgaagcattggcaatgctgtccgaacgaagcaagagcgacgccacaatcatcttgaaagcaagtgacagcactctcaaggacctcaccgcaatgctcttggatgtaaatagcaacagaggatacagaatatgtgcagctgaaatcctggagcatctgtacattcgatacaccaagcaagatggctatctcaacaatctgacggaagccatgaaagatgtgttgccaaaggtgatcaatatcgaataaatgaatatattatttagtttgtttcatgttgattaactaataagagcaatgtctgtaacaatatatatatatatatatatatatatatatatatatatatatatatatcttgctgttcgtttcaggtgctcggagaaatttttcttgtgtcatggacgcataaagaaaagcaaccaggaatgacagaacaaggaacagagggagttaatttctcggcacaaaaagctgacattgaaagtcaagatcccgttgcttgtcaacatgaaaaggttaaagaggaaaacgaaaaggttaaagaggaaaatgaaaaagttaaagagcaagatgaaaaggttaaagagcaaactgtggatatgaaactttatgcagctttactgtcacttagtgaggcaatatttcaaagattggtcaatgatgataaagatttggctgaactgactgataaaattgccccaggaggaggcactgcatttagcttcgccggaaagctcaaggagatggtagaaggaaacagtgaacaagcaacagccaattgcctgagaatgctgaagattactaccaggatgatcatatcattgataaatctcaatggagccaaagtcggagcagacctggagagcttgatgcattctctgttaaaagcttcagaaaagatgttggaactggagggcttcatgattttctctagcagcgatcgtaccgaaagcacgaatcctgccaacattctcgcttccctcgtgaaagaagcacaggagcttctggagaagaagaggcaggcacaaactacacccgctccatcaatggagaccagctgattgagtaaacagactatcaacacgatcgtatgctgatctgcagactgttggcagtaatacctggaaactgacaccgtacaatccctgaaaactgtctctgtaatctgtatgtgtgctgaaacttatctatcttgtcaattgtcccatctatttcaaaaactttcaagttgaactttacaacaaactgttgagctttattggcagttcgtataatatcctcttggaacagtagataaaacctatctgaagaggtgaagaggccaaggatctgcatcaacctactgcacattcagtacttgctcacctatgttaggggtgaaacaactattacataattcgggtattttgtatgcattttaaaacaagttggataatcagagacaccaattctgatgtactcgtctaataaatttatccaggacttcggacggaactcagcccatctgaagtattcagttagtttgttaggctttgttagatagggttgttagtcaattagaatcaatcaatcaagaaagttaaatctatatctagtcctcccttctatgtccatcctcattcaagctctgggacagggaggctgcaggcctcgcccttcgccctcccgtcgagcaccccaattcaatctacgcacacaatatcttggtatcagattcaagcgatcctttcctagctttcaccgtggctgccatcatgacgacctccatggccttcgtcattcatccatggccatgcagaacgccatcacagagatcaaggatgggctcgacaaagtgacaaaatcggtattggccctccgcgcggggtttgaggcaaagaaggtgcggggagaaacaacgacgatgacgacgacgccgtctctgtcggccacgtggtcggaggtggaattgctgcaagccactcgctgatgtggcgccactttctcagccgttgtccttatccaaggctgtggtagtggtgccatgcctcgtcatagtccagtctattattcaacccctgtgctacatccgtagtctagagaggttgtgtaatatctataaaagtgaagatacaagatataggatgggactctcttctcattcttcattctatcatcctcaagcacaagtccaacaatgagcagcccccctcctctttatgtagctataatgcacatatggacggtttagatgtgggcccaattagtgtatatatagaaggtttccatgttgcatatatggaaggtttcttgacactcctcccttgggtactcaccgtgtgatgtctatgcctcatcaaaactccagaaaacccagtgggaaaaaattgaagaaagagtacatagcgtacgcttgcaatgtcgcacggattgcctctttaaaaacctggataagaaacttttgggaaaacttatctaaggaaaaaagagtacaatgcacccaattctttgttcaatcattctagattgattttgggtacttgatttctatatcaagattctgtaatgagtcggcgaaattctccccctaaattttgcatttctctaagtctcattattccgatttcttggacacacctattcaaaagatgtcaataatgagttagtggacaaatctgcaggacttatgcattacttagttcgttgcttctatgcaattgatgcacatagaagagcttggggttcatgtgcttagtgagtttgctcctcaagtaactcatttgcatatatgcgacatatactgctttagtttcataaatggtggggggttgagatagttttcaaactgcgattgctgttgcaggtaaccatctctcaaaaccatacctagactttgaataattcaacgatgcttagttcggtttagttcaactggccaagtattcttgtgctgctacgacacactcgtgtttgggaattttgtcccaatttggcggtaattaattattctaaagccatgcaccatgaacatttctatatgtggttggactgatgtactagacttccatctgtcgtatgcctttagctgcaagcgtaagtatgatttggatttggccaaatatttcaaattaaacataaattcaaaacgaacgagtttgtttcttcaattattttctagtttattctattctttatgtgttggttcgggacctagtacttcttcatgtactattatgcaagtgttcgatccaagctcctgaaatgcattcattaattctatcgtcaatgcttaccaacattcaggttgatttcttcttttcaacttctagttcattaattccattcaaatcctggttgactgctaatgagttttgttgtctaaaagagacattacccataataggtctcattgccaacttctactggttgcatgaggctctatgcgagtatccatggacatacaaggagatgattttcatatgcttcttcttcttcttcttattgcttaatgcctcttgatgtgggcatgtaccaatgttagtgtgcactccagcagttggttttcttccttgatgggaaggtgcggtacacctattttgaggtttcgtgccgtttgctagatctcaactagccccccttctattcgatggggtactttttgtgactttgagtatgatagtccctcttgccctgttttcaccagacgtctccagttactttaggggcatgaggagccggagtttcttgtccaattgtttcttttgttcgaggcctctagacatgatgagggatacctttgctttcttcggtatttcaccctcctccggtgcattaattcatgcaacttagtcaaactcttcgaaatcataaaagtatttacaaagtgattttggcagtttcaattctttctgcatactacattcactactagtgcggtgtaacatgtattagtccctttctactatcatatttgctgacatatcctatttaggggttcattctctccaagcctcgaacaaggatactttgctgactgaatttcagtacattgacttcaagcctctcgtgacattgatggtacaaggtttaccatatcattgatttcttgcttgctcaacggccctcatgtcacatttttgaaggggcatttctattcagcacttatgtacctgctacttcccaactacagcagcatattttggttcaaaaaacagaacaaaaagttgagcccagtgagtacagctacacatagaagaacaaatttttgtgtaataatacattggaagatggcctatatcatgatagtcaataaaacatgcatgtatttgttctgaattcacaattaaaacaaattggattggatgaatttctaatgttctgttaccttctcaagcatataagcttactacagaagccttaaaagccatgttttaggtggggctttcctttgctgtgggaaagaatgtgcaacctctttgtacaaactgtagttaatgctggccaataaaaatagatgggggtagagtgctggcttatgctacttgtagcttttcatttttctcatgcatgattttcatggacgactatccattttgtattgtttttccgttgttgcattcgaccttaggtataggaggcatccaggagtccctcatctatacagcagtatattaaaaagttccatggaaatttaaaagcaggaacttgcacttcttcagtatgcaatcatgatttccactaatttagttgtctattcagatttcagaagatgacagatggatctactgcctggttggaggattaaaccatctttgctatcctaatcgatgttaaagagagcttcttcaatcctataaactcataatctctcgctaaggcatgtgaagttgtaacaagaccaatggacgacgattagcccaagcagaagtgtcccacccttttcttccgcctttctctactgcaaaaatagattgaaagatgctagaaaagaagcgttcttggtaatacaggaacatgaggaaaataaatagactataagctgctttgacatgggtgagtacacctgttatttttatgcaggtcctattttttttatcaaataaactttgcctcatattcatatcattaacggtttggaccatcatcaaaatgcatgtaattggacagttttactctatgtggtgctaatatgagctatcacagttattttatgccaaagtattgcacaatgaacaagttaatggttaaatacgataaggaaaaataatttcggctatgagaacatgttccagcaacaaaataattatgaagagtctatgacccaagcttgggaatatgttattgctgaaacaaatatgatatcttgtttggtcaaatcattacaaggttccctcccttcctctattatcttaacctccagcctaaccggtccctctctttctattccaccgttgggcccagcagtcatccaggtgagctggtgtcttgaggccctctcacccatgctgctgcttaggtatgagccgaaccagttgtgccacgtccaaccatttaatgcgttgtgcctgcctatcttctccctccagctacaaaaccattacttttcagttcattacatgaataagcaaaaaaagaacattattagagttgtcgaattagacttatgactgaattgaaggttgattaagcctgaagactaaaacaaaccattttaagagtaaaccttcaacaacaacaacatttatgttagcatacttagaacaggataaatattatgtgccttccatcacatttcaaatatctatatataaactaataatataaagatacaattctattattgacaatggttttgacttttgataatgcccttctgataggatatgtgtaatttttccaaatttactaatttaaacaaataaagaaattgtatacaaaataacctcatgccagtaaagagacccatgctgggctcccatatggcaaccaagcaattaaggcaaatcgattacactttcaatatttgagcttctacacatgaggcatcagaatgtctggtatcatgcttcagattcctcgtgctagttctttccaccgaactagagatttctcatgccaattcacaattgaattcccatctggttgtctgttcaggcagttaacaagacattccccacttttatgctacaacaagggcctcatcctatatacctatacaaatcatcctcactaatatgaatttgctgccatgaggtgcagccacgtcacttaaattgtttcagccgttagatgagcatctatcaacaatagcaaccgtcagatcaaaagatcaaaagctcagatagcatactggtacatgtccatttatttggcccatcccaaccgccgcttccattacggcccattgcatttgcaccagccgcctctcccaaaattttctccgatcaccacagccatcgcttcgcctccgtcttccgctctggcgccctcccatctcctcccaaccctagcgcgcgcgttcagagttccacaccgcgcacacgccgccacctgcatttctctcgtgtcgtctgcgctccgctcgcaccacctagcaatccccgatcccctgcggcgcatccaagggaaacgccccgcgtctcatccctttcccctccccggcgacaggcaggggaatcgacggccaccgcctcagtccgcttcgtctttgggtcttccctgcctaccgccgacaaccaccaacgagcagcttttcatgttttccatgaaaacaattacttcctgtagctgtagcgtaacagccaaatcaccgttgcccttcattgaaatatgaatattagtcgatggtaacgcccgtctacaaaagttgattgccttgcatttttcatagtcacacgccggaatcagcagtctcttttccgttgcattggcgacctgcagcaaggtgccatttttgttccacccatcctccttccttgctatacactttcttatttgtttgtctccttcacctgtccttcctgcagaattgcctcttgctttctctaaactttccttcacaatgtgctgtacgcctttacatgtgcaattttcttaacattttctctcttttttctgtgtatgtacattctgattcggctacctatcggggttgtgggggaggtaaaggtaaatcctgatgcccaattttactgcaggtgagagaatcataccaattaaaggtattttgctgttctggagcaatcgatcaagtaattcgttacttttaggggtgtcaaccttatgtatgtatgatttgcaaagctgtccatcattgttttattatatatactcatatagctagagattttgtaggcgaatttcttatgtctttgatacttgacatattttgtaacgtgaaccttccatcgccacaaactactatgtgcacggttgttttttcctggtaaaacactaaaacatgaatggtctcagctcatcaccagacaattggatggaaggaataaaccgaatccggtctcttcctcttcaagcttacattggtggaaatattgaagggcttcatcttacatgatctcactggtacgtaaacttgagttcagcatataaatatagtagtatgtgttttctcaatgtttacaaccactgcatagcacagcaccatttggtttcatgaagctcactcactgtatcgattagcatctggttatccaagaacaattcaagttattatggctttacctagccatgtgttgtctacacatttttttgtttaatctatgattacaatcaactgcacaattttcctttttttcccttcctgcacatgtcgtttagtctgtaaacaatagaaatcccctgtcaacttataggtgagtctgttagattgctatgtcgcatattatatccccatcaacatatatgattatgtcagttcattggcttctctttttttctttaaaaaaaagctatttcataatcctacaatatgctattccacaatgttccgcagcaacgcgcagggtaccatctagtttactaggaaaatagtccctattttgtttctttggatacacagtgtgtacttatcttgctatcgaactacttgctctctctaaaccttaatttgtaaactaaggcctctgagtgttttcagtcatatgcctatgttgaaaacaaatagttggcttaagcgtgcacatttgaaaattggttttcataggcgagccacgagcagcttaagccactttcttgtgaaaataaaattttaataaataacacatatctatacataacttttccatataaaattggatgaagattaactttataataaaattttagatcttgacgagacctacaactttgtagttgataaccttttcatttgagaatttgttagaggccgaaacattcattacaagatctcatatatatttttataaaatatcatatatatctttcaaacatcaaagttatagggctcgatcagatctacaactttggtactaatgacctttttatttaagatcatttagaggaccaaataagcgtttcaagtcttgtagatgtaatgttttagaaaatagtgtgatggtaagaatagatgtgtgtggactatgggtcttgagttcgagtccttaacaccacacatgtgcgtacatagagaaataaagaaaatgatgtggcttgtgacttggtgtataaatgtgtatagacgcctactcaaattcaaaatgtgtatagaaattatcatagttgggcagtccagctatgataatctctagttccatagacaccaagaggggggcgggtcactcaaccacttatcaaaatgggttttgaccatctgcaaagatcgatcatttatgtagcactggctttcactcattttttaagcatgggcaagggaggcatctggaaattggttttcatggctgctatgaaggagacttgagagttgaatctcctgttcagcaattgcgctcatcatcgatcacctccaactgcgatgaagtcattcccattaaagcggaagcgcccagcatgtgtcgctctctttgatcatgaaatccaccaataccagttaggtgatctttctcttgctttattccttcatcttgccttccatgtcatccaaggattttgtttcaagagttgtgcgtgagaggagcacataccactattactatgtgggaactatatacaaatgttaacttagacgaactttggaaggatactaacacagcacaagagcaattagctgatttttggaaaaggttagctatggagctttaaactggtatggatggaaaatttccatttggcattgtgcagcttgaacacatttcaattatgttatataggtttgatgcatcttaattttttagtcccctccagaaactttgcattaaaattgtgcatattttcatttcaatatcagagaccaagagttgattcttccactatggtctcactttttatatgacagaaccaccataactactagaaccgtcaaaccaaaaccatatataccacgaattttaatttgcacttggcttcttgatgtactacactactgaaaaagaatgttttcacaggtggccaaaatggctctatatatgcaggtggccacaggttctgcctgcaactaaaagtctgcgaagatagattgatatagttgtgatatgggcctcgtttctagtagtgcaacatgcacatgggctcgtttttattgtgcctgtaattatgtaaggcaagtgaaaaattgaattcacataacaataatgttggcaaagaagaggttcatcttgcttcgctacagatataaaaaaggagtgtgttgtagacccaataaaacaatagtacaatgctagctgacatgaaggtttttccccaagcaactttttttacatgccctcgctccattttgaaattatcagaaaaccgatgtttgagtactggattggatggcctcggggacatcagtttctatttcagatacaggcatacagctacagtttttgtgatagctgagtgcacacaaacctcaccgagtcgacaccgcacactgacatcaacctgagaagaacaaacaatcgttgatgccactgtgatcttaagtgtgggttgtggtggtgactctacgcgagcatcatctctgaatctctgtacacacaaacatttgcttgtgaaatgcttacccttgcacctgatattacaacggccaccaacgacaggaaaatgttttaccgacagacaacaacctactgcaagatgtgatggtgtaacaatatggcctagccgtattgttttgctccatgggaaaaaatgtactacagcctttctttgaaccaacacgacacaagtgatcaagcattgggccgggttcacctgatatcactcacggcgtaacatgagtaatgtgttaatccaacttggcctagtgacaaatcgatcctgggcagtagtttctggtgtgactgtcactactacaaaaatcgtttttctgtacaagggggtcggtaggttccatggccgcttgtggcggcgcctgcaaaaaccgcccccccgggggcgggttgattagccacatgcgaagatccattatcgcatgcggctgcttaagacagccgcatgcgataataggtctattttcgcatgcggctggcttaagggaccgcatgcgatgatcggccatatatgctcctccaggcctgagcttgaccatttgaaaacgaagctttctctctcctaaagcaagcaccaattagggggggaggttttcaactcgaaatttttacttgaactctatacgaaaggtgaagaactctctatcctgcttcatttggctccatttttgttatatttcgttggtggaaagtggagtttttttaatattttgacaaggtttgttctaactattttttgcaaaatctagcttcaaaatatatgttttgatgggcaaattttgcatgtaatcaattgtacatactagttacatgtattgttgtattttttttgggagacaaatgcatttaaacttttgtatgaaatacctgcggtctatttttttatctgtaacttttttgcctttatataattagatggatcggtcgtcatggatgtatgagatgtggagaacgcagccgatatttattaaggaagtatctaaatttattgatcaggctaaggcgcatgctttgagggagaatatgacaaagatcttttgtccgtgccgtcattgcaagaatcagaaattgttggtagatcctggtgaaatattgggtcacataatggagtacggattcaccaccaactacaaggtttggacctatcacggggaattcgccaatccggaagatgacgatgaagagttaagtttcgagatgaatgaggcagagaattttataatcgaagacatgtcgcgtgaaagaatggttgtcgatgtttccaccgatagtgatgatttcgatggtggttttgatttagaggatatgctacgccatgttgaaccagatgtgctagcgggcaggtcacgaggattggagaattggcaggcattagagaaggcatcgaaggatcgtcttttcgatgaaacgaagggatgtgataaggatttcacagtcttgcgttcagtgcttgaacttctgagattgaaggctaaacatggatggtcggacacaagttttaatgatctgatgagtttgttgcgtgtgttgcttcctaagcctaactttgtaccatcgaacacgtatgaagcgaagaaactcatatgtcctttatctcttggtgtagaaaagattcatgcttgtaagaatcactgcatattataccgtaaagaatatgcggaattgaaatgttgcccaacgtgtggcacaagtcggtataaaacggggaatgggcccgtagattcagagtgtaccgatccagattctgataagggtaagcgcgggaagattccttcaatggtgatgtggtacctaccaattaaggaccgcctgaagcgtctgtactcaaacccgactgatgctgagttgatgagatggcatcaagagagccggaaaatagatggtatgattcgacatcccgccgacgctcgccagtggaagacatttgatgcaaaacacccagaatttgctaaggatcctaggaatgtaaggtttgcgttgagcactgatggaatgaacccgtttggtgacttaagcagctcgcacagcacatggccagtccttctcacaatgtataatcttccaacatggatatgtcagaaacgaaagtacattctactcactatcctcatacaaggtccaaaccaacctggaatcgacatagatgttttccttgagcctttgatggaggacatggaggagctttggaaagaggggttacgactatgggatgagtttaagcgggagcacttcaatctacgtgcgatcatattcgttaccatcaatgacctacctgtaaacttttcattatctgggcagattaaagggaagactggatgtctgatatgtctggaaaaaacttcatacaaatacctgacgtcgtctttgaagacagtgtacatgcgacatcgacggttcctaccacaaagacataggtaccgtaagatggctagattgttcgataatacagtggagaatgacaatgccccagtagcaagaggtggtacatacatgtatgagataacaaagaagattaaggttgtatatggaaaaggaaagaagaagacagtaaagaggaagaaagctgatggtgacaacggtactgcgtcgcctttcaagaagcactcaattttcttcaaatacttagattactggaagaacctagagattcgacatgcaattgatgttatgcacctcgagaagaacgtgtttgatagcaccgttggcacattgctggacatcccgagtaaaacgaaggatggattgaagtcacgtaacgaccttgtagatttgtccatacggcataaccttcacccagtagtgctgccaaatgggaagaccgagattcctcctgcttgttactcgttgacacttgaagagaaaaaagccttctgtaaatgtttacaaggggttagagtgcctactggtttcgcatcgaacatcaggaagctagtatcaatgaaggatttgtccatttcgggatacaatgcgcatgactgtcataggttgctaacggtgttcctaccaattgctataagggcagtcaaaccagtccatacaaaggtggttataacaaagttgtgctactttttcaatcgaatttcgcagaaggtatttgatcctttggaattaggtccgcttcagacatttgccgtcgagactgtatgccagcttgagatgtatttcccaccatcatttttagatatgatggagcatttgatcattcacatcgtccctcagattattgaacttggtccattatacttacatcagatgtgggcctatgagcgttacatgtcgatcctcaaaggctatgtacgcaatcgcactcacccggaaggatcaatgatagagggatacacaactgaagaggcagtcgagtgttgtatggactacataaaggatgctaatgccattggcattcctgttcatcgacatgaaggtagattgtctggaaggggtactgttggtaggaagcagttcttcaataatgattacaaaaaggtgtccgcggcacacaacagcgttcttcaacagctcgctatcgttgagccattcattgagcgacacctagaagaaatcaaagcctgcttcccagggcggtccaatgattggatatcaagagagcacaagcgtcgctttcctctatggttgaaagatctaaacctgccagttggtgattctgtggaggaacttactttacaaagactggcatgtgggccttcaagtattgtcaattcatggcaaggttacgacatcaatggatttaccttgagtacgactacgaaggacatgaaaagcaccgcacaaaacagtgggatccgtgtcgaagcgattgacacgagtggagaaaagaggtcgtattatgggaccattcaagaaatatgggaactggactatggcctaaacatccagatccctgtgctctattgtgaatgggttaaagacacaataggggtttccgttgatgactacgggctaacgatagtcgatcacagtaaaacaggccacaaggatgatccatgggttttagcagagcgtgtggctcaagtgttttatgtgaaggacccttcagatgaaagaaaaactattgtcatatccggaaagcaacagatcgtcggcatcgacaacatcgaagaccccaatgattacaaccagttcgacgatgtaccattgtttactgatcttcctatgcgaattaagaaggttgagagaacaatcgatgaagcaaatatatcgtacgttcgagcagatggtgttgccaaggttattaagtcatagttatttcgtaacctttagttctcattgtattccaaatgtacgtgcatgaatttaggtcccccttatgtagtaatcattagcatgtaacatttgattacgagttttgagcaattttcatgagttttcttagtgccaaaaacatttggaatgtataattgtggcgaaatattgggaaaaaaatatatatggacagtttacttagagaaaaaaaaatatgagtttttttggtaaaaagatctttctatgcggacgacttaagccagccggatggaaagatctttttcccatgcggccggctttatggcccgcacggaaagatctttttcgcatgcggctggcttaacagcccgcatggaaatatctttttcgcatgcggccggcttaacagcccgcatggaaagatctttttcgcatgcggccggcttatgtcgaccgcatggaaagatatttttttcatgcggtcccttaagccgcccgcatgcgatgatctgcgcctatatatagggagagcggggagccaaaattttctaagtcccggctcccgcgaaaccctagccgccaggctgccaaaatttcccaagtcgccgtcgccgtcgtccccgccaccgccggctcctccccaaagtcgccctgccccacgccgtcgccgccgccgccgtcaggacctctccccctcgccgttgccgtcgccgccgccaggacctctcccccctcgccgtcgccgtcgccgtcgccgccgccaggtcaccgtcgccaccgcacgaaacgctcccccctcgccgttgccatcgccgccgccaggtcgtccccgccgccaagtcgtccccgctaccgccggctcctccccgaagtcgccccgcccctcgccgtcgccgaggccactgccaggacctctcccccctcgccgtcgccgtcgccgccgctaggtcgccgtcgccgccgcacggacctctcccccctcgccgttgccatcgccgccgccaggtcgtccccgccgccaggtcgtccccgctgtcgctcggtaacatttacttttaaaaaaagaaatgtgaaatgtgcaattgtggattgtggattgtttaattgtgcatcgtggattgtgatatgtgcaattgtggattgtttaattttgagaaggtttaattgtggattgttaaatggagatttatgtttaaattgggacttatgtttaaattgggacttatgttaaattgggatttatgtataattgggacttttgttaaattgagatttatgtataattgggacttttgttaaattggcacctatgttaaattgtgacttatgtttaaattgagacttatgttatattgggatttatgtataattgtgatttttgttaaactgagatttatgtataattgggacttttgttaaattgggacctatgtcaaatggagatttctgtttaattgtgactgatgctaaattgggacctatgttaaattgggacttatgtgaaattaagttattgggacttatgtgaaaataagttaaattgtgacctatgttaaattgagatttatgtataattgggacttatgttaaattgagatttatgtataattgggacttatgttaaattaggacttatgtcaaattgagacttatgtgaaattgcgttaaattgggacttacgtaaaattgggacttatgtcaaatttttttacgtcaagttggaagatgtcgaacgaaaaggttccatcgaacgcaccaatagtgcctcaagaaggtaacgctcctcaaaattccggtagcaataagcagccagacgcttctagtgaagaaacgtggcgcacaccaagtgacccgtttccaatggaaataacacaagtcgccccccgcgatgatgatccggactacatacctatcgaacaggccgtaagtgctgaaaatcgttagccatgtattattccctaactatgatgtgacatgaacctaatggtgtatagagttacctattctgtgcagatggtagtccgacgccgctcgaaacgtggaagtccgatctaaatcgggattatgttcagaagaatctcccaccgtttacggattatggacatatatcgcaggctgactgggacacgtttgttgcggatcatacaacagctgaagcattggctttgaggaaaaaaatgtccgagctcgcgaagaagaacaaatatccccatagattggggtcgagcggatacgctggtcacgtcgatcaatggcaggagatcgagcaaagatttgccgcggccggtaagcccctgctggtagaccccatggttgaacgtagcaagaactgggtttgggcgcgcagcacaggtcaagtctcggatgagggagacatactattcgagactccagacatagaagaagtgactactaatttgcagcagatagtcgagaaagaaagatcaggacagttcgtcccacggagggagcgagatcagcttactgcggcgttggggacggctgaacactctggacgtgtaaggggtttgtcctcaaagacaagttggaaggtcgggtttccacaagacgcaccaagttataagaagagagacaaatacaaagaacaactatcggacaagatctatgcgcaagtgaaggaacacttctactcgttggcagctgaaaacccgacagcctttccaaggttattccctgatagccagtaacccacacaatccgcacagcaaacaactaatgtacccagcagtgtaggctcagtgcagacaactaccttccctgtggatagtataactggaccaactccgtgcagtctcgtcgtaccaatcggccgtgctggaaagactaagaaggttgcaacgggtttagcgatacccggacgtcaattccacaacacggcaatccctgaggattacgcaagggtacaggtcgccaaggtccatagcgaccacgtttccttggaactagacatacctgcacctgaggggattgaacttctcggtgatgcagtgaatcagtttatcttgtggcaccgcagagacataatcctgagcgcggccgttcctgcagcaggatcttcaaccccatcttcatcgcaggcaatgactgctgccgctcctgcaccaccgtcgcctcctgaaccaccgtcacctcgacatccgccgtcaccaccaccgcttaggtcaccgcctcgccaacctacaccaccaccctccccttctcaacaaccgcctctcccggccccgcaaccagttcaagcctctcccacctccctagctaaacagcatgctcccccggctccgccctcagttcaaacctctccacctacgccccaatctgctctggtagaacaagtgcacataccagatggtactacatccgaaccaaagtctaatactttggaactgagtcgtataattccaaagttgatatcgacatacgacccaaaggagattgacaaggataaggagaagttcatgttttcagctttcaggaattctgagaagagaaaagaacttgctcacgtcttgtcagactcccagaagtcagtactagcggcccaagatgaagtgcaatcctggttatctgccgatgtgcctgaaacttatgagtatggcaagccattcttgccaacttatcttatgaacaagctaccatgggaaatgagggtaatgcacgaatggtatatgaaggcatctaggaaaggtctcggtttcataagcgtcgccgtcccggaaggcgctttcatgagtggtcctaatgggatattttttatctctttccaagaccattacgccctctacaagctagataaaatggacgttaatctcgttgcggctttctgtctgtaagtctgaactctttattacatgttgcacgtttcattcgaaacaaataaaccaaatctcatttcttctttattcattgtacagtatgcaattccacgaagctgatagaactggagcaaaggttggatacgtcgatccaacaagaatatgcaaaacacaacacaccgtagagctgagagaggactgcgagcaattggttggcaagaccccggaagaaaaggaagaatatgtgaagacattgcacaagaggaagaagctagaagtagcaacatacttggcaatagcaatgttggcgcacgccgacaaagatgtcttaatggtcccctaccagttcacgtaagctctctcttctttttgtttaattaatttatcttcttcggaattttctgtctcgaataagcctatcttatatgtagagaccactacatattattccttgtatatccgaaagaccaattgatcatatcattggaccccgcacactatgacaaggagacatttatggaatttctcactattttgaatttgtaagtgataaacatttcattactataaattgtttaggtcgatcaccggtcttctaactactaataaaacaattgtttccttcaaacagagcacacaagtactaccgcaaaagaggtggaccagtacatattccatcccagaagaagttatctgtcaggactggctggccggtactatcaaatttataccaatacaactaattatcgaacagtacatatatactaaatatatctactgagatcggtccccataattatatcgcagtgctacaaacaaccaccaggaaccaacttgtgtggttattacgtgtgcgagatgctcagagtaaatgggaggtacaaaacaaccagtaaccgagtaggtcatcgaactcttctctacaaagaaacccatctcgcacacacttctcactgagtaccattttattttcctttctgtgtgcagatccccgaaatcccatatattgcacaacgattcaacgacactactatcttgaacgtggccgctgacctctgccgattcatccgtcgcgatgtctacaacgcaagaggtctcttctacgacaaccagagtgaactcgcaatggacgacaaatttaaacctctcagagagtgggagaaagaacatatgcaataacatgtacactacttatacatatgcaataacatgaaaaaactgtgccacttgctattatatatttgtatgtaaattacgattgaattaatggttatgtattacatgtttgttactgcggcacttgtcttatcttatatgcttactactccgaaatacgataataaatccctcaataatttaatattaattacgaatcaccaaaatgctagaataaatattattttagctattcggaaattgaatttcgcatgcggtctacttaagacgcccgcatgcgaaaatagaacttcgcatgcggtcttcttaggtcgaccgcatgggaaaatatatcttcgcatgcggcttcttatatggaccgcatgcgaagatctattttcgcatgcggccgtcttaagggaccgcatgcgaagatcgatcttcgcatgcggctgcgacggccgcatgcgcaaatggtgatctttgcagaccatttcgcgcatgcgggctggccaaccgcatgtgaagatcgattccgcccgtatgcaaaaacgctttctgtagtagtgtgttaatttcaccacgaacaagcaataagtccagtgcaatatctttgagtggagttcccagaatatttgtcccatgtgtccccgtggtacggtaggggtggttgataattttggaagattattgggaatagaaagttcattttttaggcaaataattaaatgtgcaacacatatggttctatgacaaataattaaatagaatattgtcacagctctaactccagctccacttctcctggatctgaagctcaaccaaacagtttcagctccacctaaaataagagtgaagctgggtggagctctctcacgaaatgatctagagaggtggagctggatttaggcagctccacaattccactccagacccaactcctttagctaaatttaggagttggaccctactaaacaggccctgcataagaaatccttatctctccaataggtttgagtttaactattctactagcagtttcatcctcatggtctataaaaaacactcgctagattaaaacttggataaatattaataagagaagggcaggtctatagctagaaacaagggtttttatgggtggtggaagtagtaaaaagcatggtggacgttttctgacgagttaagatagcgagttattaactactccctccatctaaaaaaaagttagcttctaactataaatttgaattttgttgaggttcataaccataaattcttttttttaatggagagagtacttaatttgaagcatcaagtataaaatacaagtacatgaagacgtcatgtcacacttaaatccggtaccaaaatttgtttcagagaggtataaagcattgcatttcttgttgagtcatccaatgaagttgaacgattagcaatgtagtactataaatcgagacatgcatgtccagattgatattcatatcatcagaaagtgttccctccggttctatgttgctgtattatgggatggaaagagtaatttcgttagtttgcacatacataatattataggaagtagaggcatcatgagtgaaatgtgttcaaaacatgtacgtttcttctcccaatttcgatccaagggcacttcatgttcatgaagtttgatcccctcgaaaaaaaaatgttcatgaagtttgtgggaattctgcggcatcctgtcacaccgagttgggtacagaaattatgtggatttccaatgattatcctaaacttgtacacgtggatcatgcataggttccgacttccgagccgagacgaggagatcagtcataatcaggaattaggcagaatttatgctccaaaggaaacaacagccaactattacatatttttggcttaaaccctaaaaaagtagctaccataaagtgaaacagaatataagtaatcactccacaagcaaaagaagtgatacatcttattcatacaaaaatgctattagaaaatctccattgaaagttggcaaaaatttgtttgtataaccgtaatctctacagtacaacaagcaagatcaatggattcttcctcctcattacacctttgtaggtttgctcaaaaccgaagccaatatgttgctatgaagagtatatgcatataagatttagttatagttttgatattgagtctatgccaacaagccaattaccaaacatatgggcaaaattatgagaaaattttaaaccaaaggatacaagaactgttctccaaagaaatttagcaatataacaatcaaagaatacatgttggatattctcatcatgcataaaaaacaatattttgtattaccatttcaattcatttttgctaaattttccagggttaaaaccacccctttatgcaagtagtacataaaggtcttaattttaattttacgagacatcttcaatctttataaaacttgtttactctctgcgtaaccattagcaattagagctacatagagtgaacataaaacaatccattctggtgaaaattccatataaacatatccttatcaccattaagttgaatatgcacaattttcgcaaccacattattccaattttcaaaatttgtcccactaaattccttctaaagtaaacattaagtgaaactgtactcataacagttataattgatgcattttttctacaaacaatgttgtatagagatggaagtgtttcttaaaggaggaattctcattgcatccatcttcccataatctaatttgttttccactgtttactatgaaaaatccaaggctcaaaatttatctttatctttcattaagcccgacaaaaaagggagtcacccggttatctgactacctcagtgatcgtttgattcttaaatatttttttctccttagtaaatcttgcaaaacaccatcctcattaatcaacttaaataaccatttacttagtagatattgattttgcacatctatcttaagaattcctagtccaccctgtccttttatttgacaaataatattccatctcattggtatattctttttcttatattcatcgctttgtcaaaataatctaataaacaattttttgaagtactcttcttggaatctaaaaaacgacatcgtagatatatgtaccaatgaatgatttttttttgctggtaccgcaagcagctagcaggttgaaacttcataccggtaaagaatgttgctcaataatgctatgatctgcattgttattcatcaagaagcagagtaatttatgaatgctcaatttctaccgttggatttttctttttttttaaaaaaaatgaatagtttatggtgatccgttctgtttcgcatcgatcttattcttcaaaaaggaaaaatgaaatgcacagataatgcctttttaacatagacaagtacactcacactcactggtggagaaactatctttagtcggtcgaccaaattccacaatagtcccggtttcattaaaaaccgggattaaaaacgacttttagttccggttaaaaaaattttgatctttagtcccggttaaaagatgttttttagtcccggttcatcctctgtcagaggcatgtcagggggccgaggatctttactcccggttgatactaccaaccgaactaaagatctaaatgatctaccaaccgggactaaagtggtaatctttactcctggttggtagtatcaaccgggactaaaattcaacatagtatataatccctattccttatcctctcctccacaatcacaaccacttcctcacctacggatcgatcctcctctcttctcccccttcccctctcctccccttcctccttccttccccctcccttcctcctccctcccctggagacggatgaggctgctcctccttccttccccttcctcctccctcccctggagatggatgaggccgctgatgaggccacgccgcgcggacacggtggacgaacggacgtgccgcgtctgcgcaggcgtgcggcgcagacgaccgtctctttttttttttgatattttgtgattcacttagatgtaattttgtgattcattgtatggatttgagatgtataatctgtgatgtatttgatttgtgcgtaatttttttaggatttgtgatgttttagatttgtgtgtataagtaactttaagatttgtgatgtggatttgggatttgtgatgtggatttgagatgttactttatttgggatttgtggtttgatttgggatgtgcatgccatctgattcggaaaaaaataaaaaagtaacaaaaaaaaaggaccatccgggattgtccctatcctctctttagtcctggttggtaacaccaaccgggactaaagatccctctctttagtcccggttggtgttatcaactgggactaaagatagatctttactcccggttatttcgcccgggactaaagatagctatctttagtcctagattcgtagtcccggttaggaaaccgggactataggggggttataaaccgggagtaaagatagtttctccaccagtgactcattgtttccatcgtatggtcagggtatagtgctcattttggaagattatttggaatagattgcgttttaaggcaaataattcaatgtgcaatgcatatgcttatatgagaaagaaataactgggatattattagaaattactgcatataagaaatccttatcccttgaataggtttgagtttaacttaattgtactagtagtttcatgctcacggtctacacaaaataaaaagaactcactaaccgtcggggccagggttacacgccccgacggtaagcacggtaaccatggtaaccgtggcaaactgtacgaaaccatgtaaaatttatcaaattttcaaattatcttttaaatttatttgaatttaaggaggttgccgtggttttccttttaccgtaccccgtcgtaagcacggtaaccgcacggttgctgacggttttgcaaaccctgctcactagtggtgaaacctcaaatagatattacaaagggagagaactcactagtgataaaacctcgaataaatattgaaatgggaggagcaggtgcatagctagaattagaaataaggcattttaagggatggagagagtagtaaataagcatggtgacatcccttctttctataaagttacgactcaaagctaaaacctcagcgtgccacgtcatcactaattctcagtcgttcaatcggtggatgagatcgcgtataaaccattggatgagaaggtccctagtgagatgtcgagttatcctgatgagcatagccaaatcattgcaaaaagcccaactgatgagcaaggcccatcccattgccctgccccaactgttcgctctccttccccgcttgccgtccttcctcacgcagcaagccagcaccataatctcacccccccccctatgcctcttctgcttccgtcgcacctgttttgctcatcttccctgggtgcttagaaaaacggaaaccctgggcgccaaactctcacccttcacctccctggtgagtaatggccacttatttggtatttcattgcaataatctttctttttaaatagtgtaactgatgataagccaaacttcctggatttatacgcctatgaccatgtaatcactactcagaaataagcagtaccctccctctcctccattgcggcagcaattctttcctcttttccaggtcccatttcccctttctctctcgcatgtgttgctttgttaccttatactggagacaaccaagaagtatttcattgattttaagagtacgtgagtggcgagctacatttttgcacattgcattcattttggcaagcaacaaagcaagcaagcatgtggttgctgttcgtctgttgatttatttattgagtattttccctttctacctctggcaatgttttatttgttgctaccatgtcttataacagaagccttcttacggtgttcaatgatgctcatacagccattattttattcccaattcttaataactgtacaatttggatatttttctatgatataaaattttgctttctagcaaaatggattgtttatgtcacagtttattttgtccatatttctgtattgcgcatcaaaagaatacaagatactgtgatgtgtgtatacctatcttcccttttttttctcttccatggttatagttcattgaattgcaaaacgtttgaagtttttttgattgaatcctttgaaatcccacagcaatgcacagggtatcatctagttatcacacaagttaaagacacagagatttattacactactcctgcttactttggagcatcaagtactccctccgtcccattttaagcgtagccatcgagtactccctcggtcttatttgaatttttttttaaaaaaaaagctaaaaaaaacagaagttatacataaatactattcatattttataatctaacaacaacaaaaattttaatcataaaatttaaaataagctgaacaatcaaagttggacacgaatacttatgactgcgtttaaaatgggacggatggagtatcaaatactagtaggtcaagacgtcaagtcacttaaatcggtagaggtaccaaaagtttcagataagtataaaacattacactacatgttaagtcgagaccatgaaatgaagttgaatggtaccaccattaccacatagaaattcacatatccagttggtccatatatataataggattgagaggcatcaggataacacattacaatgaaatgtgttcgatatgtgcgtttcttcctcatgtttgtttgaataaaatgctgtggcgagctgctgcttccagtatgggtagaaatgatgtacgggtatgtagaaatgatgtgaagcccatgaatttggagccaagaataggatgaatagtcacgtattccctccgtccaaaaaaagacaaaccctgggtttctgtgccaacatttgactgtccgttttatatgaaatttttttataattagtattttcattattgttagatgataaaacatgattaatactttatatgtgacttatctttttaatttttttcataattttttcaaataagacagacggtcaaaacgttggacatgaaaaccagggtttgtctttttttttaggacggagggagtaggaattaggcacaatgctccaaaggaatcaaccgtgaattcagttggcactagtatctactactaatgaatgattttcttttctcgctgggcctggagttatatgctggtagtcaatattgttcaacaatttacaattctgtgatctttttttatcaacaagcttagtaatttattaatgctcaattctcattgccatattttttaaaatgaagaatagtttatgacgcccagttttatatttttcatctttttcttcatagaagaaaataaaatgtatggataatggcttgttttgatcctacaatataatactcattgatgacatctcatctaagttttgtgcttctatacaatatagtctgattgtacaaattaaaattgatttttatgaagcaaaatgcagcaaaataatcaagcgccagcccattaaacgatgcccgtttgccgagctgatatatacttggaccataacaaaacttaaatactcgcaattgtacttctgatggtactccaatgatacttaatgatactagccatgtaataggctaaaacttttagtaaacttttaacaaattctaagagtttggctaaattataaaagactttaagtggacgtgtttgagcaaagttaggcagaaagggccagcggattatgactcattacttagatgatagcacaatatacttatatgtagaacaacaatccttgtgatactcagttcagtttaatggggacgggaggggatccagaaaaaataatttcatacctatggaataaatttctttcaatccctttcacctggagattagctgaaaatattatggaaccctgtacatcactacagggtgtgtggcggtatgtaactacaattaggcagtatgtagttacttgatgtcttatatggctactaaaacattctgtattgcaagatatatcacaccccaaatgatatagtaggacatactcccttcgtcccaccaaaaatcgatttctagtggagagagtttatccctaaaaaatcgatccctgcacaaaacactagaagcaataaatgacattgtcctctctcttctatcactcacgctttaacaccaggaatcttatctctatctcatctctctcctctgccttatctcctactctacccatttctttcctctacgagcaggcaagcagctagccttcaacccttcaccactctgcttctccctctcccgctccaacttcttgcactcttttccgcacctccctccccctctctcctgcaggccctgctccacatccctctccctacccacaaccttccgcatccaccttgatgtggtggcgaggaagaagatcccatggagtctgatggatgcagctcgatgcaccggggcgcgttgtaggcaggggtggcgttgcgatgcagtcggcgatggagcttgtgtgtcttcaatctgcggtagatctaatcttggcgcttgatgcatgagccgccatatttcttttttttctctatattccttttctatctttcttttttctctattctgggttcttcctattgcagtagtagtctgatataggtgaacgaacaataattctttcctcatattgtagagatcagtgaattttttttggcgttgtttattctattccagatgcctcttgcgtgtaattaattactgcagagaaacgacagtgctgataaccggatgtagttaatggggggcattttcgccttttcaccttagtactaaacttgtcttggaaactcacgatgtcccaagcccgtaaacgccaattccccttgctgataggcccacccaagcccaaaccgagacccaaacccaagcccaaagtgcccaacggtcatcacgcccatctccaaaccctcgccgccggcacatcgccattcccagaaaaaaaaacaagaagaagaaattccccaactctctcctcctcccacggatggatccccacgccggcgcagttgccagcggcgaatccgccggcgacgaggacgacggcagcggcgagcacgagacccacccgacgtctcccgcgccctccgccaacagcaggccccggaagcgctcgcgcctgaccgccgccgcagacgaatccacgaccgtcgacgactgctccgccggcggcagcggcagcggcagcggcgacggcggcggcggcggcggcgagtcggtgggcgcctggccctacgacgagagcgcagccagggacgagctcgtgacgctcatcgtctcccaggatctgcccgtcgggatcgcgggcagtgcgtccttcgaggccatggtgctgcaagcgttctgcccccagttcgagcgaatcgacaatgctgtcaccatcagagacatcttggtgttccacgaagaccatgtggcgggattgaaggaggagttcaccggtggtgatctctccttcgcgttgtcatgtgaaatctgggggacttcgtatcataggatgagctatctctgcgtggccgctcactatgtcgatggggatcacattctgaacaagagggtgattagcttcaagcttatcgacggcgcgccgaccgcggaggcgatggcgcggcgcattcttgatgttgccatggaatacggcattgagaatcggattgtttctgttactcttggggatggtttagcagatgctgaaaccatggatgcattggctcctcttcttgggtggtacaccggcggatttgtgttcctgcagaggtgcattttcagcatcctcaatgacatcgttcgagctggtttgactgagatggctgagcctttggatgctattcgttccgcgattgcgtacgtttccagttcggaggcgaatttcgccgagtttgagaagtgctgcgtcgagcgaggccagaaggctaggaagctatggcctgattccaaagtaaggtgggattccacatatgacatgctcaaggaagtgcttccctacaaagaagttctgactgactttgtcaatggcagtatgcagcaagagtttctttccgagcacaattggtcgctcctcagtatatttcacaagttcctcgcgaagttttataaggctgctaccaagttgtctgttgtttacagtcagacatcttccttaactttgatttacatctgtgacatggcagtattgtttcggtcttataggacagaccctgttttctctgccattctgaaaccaatggaagcagtgtttgtcaaatattttcaaagaattccacgcctctattgctatgctttgattttagatcctcggctaaaattacatggcctggaagtggccttgaagatgttaggtgaagccttaaacattgattattcaagcactttcacacaaattgctgatgaatttcttgaagtcctttccatgtatgaagagaagtttggcagcacactccgtccaccaccatcaccgccctcttcactggtctttagattattcgctgctagactgaaggagttggagctgaaggagttggagcttcaaaaggattcctcgccctcttcatcagtacaccaacgaaaagccaaaaacgagttcaacaagaaatacatcgagactccatgctcgttgcgtcttaattctcgtggacctgatcccaatattatcat

SEQ ID NO: 10334 - DNA, 1603 bp, Oryza sativa
attcaacatgaccgcaccaaacatatcgaaattgataggttcttcatcaaagagaagatcgataatggggctcttagactacaatacattaaatcttctgagcagctagctgattgtttaaccaagggattaggtcctagtgagagtgagtcaatgtgtaacaagatgggcatgattgatatcttttgcccatcttgagggggagtgctgatgtaatatgcacttgtattggggaccttcttgcatatgtagctaagtgaaatagtgtgtgtgtgtggctgtgaacaacacaccagaaaaaatccccaaaactgaactttactatctaaggattgtgaaagggtattttcaagaattaagtctatccaacatcatttcaagattttatcacttgaggatccttgatgtacggcaatgcagtggtcactttaatttaccgagtgatatgagtaaccttataaagctgcggcattttcttgacccaaatgattcttttcactctgccattgctaatgtgggaaagctgaaatgcttacaagaattaaagagatttgaagtcaaaggacaagctgaggcatttgcattaagacagatagggcagttggaagagctaaaaggatcactgtgcatttataatcttgaaaatgcacagacaggggaggaagcaaaccttttaaacaaaaggcacttacacaagttagtattagtttggtctgatgattcttcacaagcagaacatgttcttgaaaatcttaaaccacatagcaatcttgcccatcatggttgggtgttaacttgtctaccaaaaacttgcaagctcttcgtttggatagcatacagtggaacaaatttccccctctaggtgagttgtggttggttaatgcgtccggtgaagaatccttgggttgtacaacaagtcagagctttcaaaaattaaaaaggttagagctgcttggcataccacagctagcaaaatgggttggaaatgatgcttcccatgtgttctccctgctagaggtgttcattataagagattgcccagaacttatggagttgccattttcacattcaacttgccctcgatcaggacaggagatgaacttgacccaattccctacactaagggagcttgaggttgtaaattgtccaaagctgtcatcatttcctcacattccttggacaagctctccatgtcgtgttcttattgatgaagtgggatcagattttcagcggttggattactcaaaaaataaccaatctgaattttgcttgaaagttgtgggaaaggatggccatctagatatgtcattctggaatgtattggcatttagtaatctaactgaactgaaagtgttgtatttgaagaaatgtcctcctttgccactgaaacatctcctagtgctatcatgtttgaggagtccctcgatacatgattcaagtaatgtcttgttgaatgttgaagctgagaacactgtcggctgccaatttcagattgagggtctcagtatcgatgactgtaggtgtagcgggaaggaactgacgctgttgctgtctcttttccccaagctgtcaatggtttcattacacggttgtgggaagataa

SEQ ID NO: 10335 - DNA, 3448 bp, Oryza sativa
gggagcggcagcgagggacggggagacggagagcgagggggcgctcggcgcggcggcacacgcgctcacgcgcgcgcggcgcgcgggcggggcggagcggggcggagggagagaggcgctcggggcggctctcgcacgcgcgggcagcgcgcgggtgaggctgagcgggggtgaaggagcgcgccgggggagggagagagagagagagaaagagagcccgggagagagagagagagagatgggccgagcggaattcggcccatcgaaccccgggggaggcaaactaaactttgcggagggaaatcgatttggaaggatttggattcggatttgaactcgacgatagatcggggattgagatcttgagatggcacgggcactagacaacaagcaaggaaacaaatttcgcaattagggtttttaagagataattttcccgctaggcgccacgacggaacgggcgctacacatccgcccatgaccgtgggcacggctgttcgaacagtttgttaacctctgcagagggggtacactttacccacacgacattactaacccggatcacccagcccgtggggatcagccacgtcgggagacctccaagctttcatgacaaggcatttccaaagccgacacaggtttaccatatgccgacgagaggggtcccagaccaacaacaggttaggtcccagaccatactgtgccaggaagcccaggggtcctccccgacaccaccccggcgaatccacatgtctctcggcatcaaggctcccctgataagctagttactcagccaggggtgtcccattccacccatgtggtcgtacttgtcttatgtttggatgaaattccaaggaatcggtccttaagtgcgagagcgggaaaccgtacactcggtacgttccccggtccgcggttttggaaattcatttagttcgcaagcaccgacccaagtgtcgggttttccaagtcttttgtaaaactccagttttacccaagttgttactcagattttaagtttgaaggcgaccgtcgatactcgcacagagtgcgcgagtatcgaggcgcaactgggtggttacaaggggacatggtatagcaattaacaatggaaggatcaaatgcgacaaattaagtaagtccgccaatctgcttcgcagatgggacaacagattaagtgtgatcctatcaatgcataatattttgcaagcaacataattgaatttcaaatataggctcaagatgttcaaaggtggcttgccttgctcgagatctggagcttgatcctcaaaatcctcgcactgcgggtcttcgggctccgaaactacacgcgaaacggggcaactcaacaaacagcgaaaataaagccctattaacgacctctaagcgtgccattagatagatctcgagatttgatgaattttggaagttgaacggagtcaaacggatttacggttggaaagatattgaatttctaagattattggatttttggtctaaaggaaaaggatttaattaaatcccttttttttggaaaagaaaagaaaagaaaaggggagagggagggaatatagacttccctcgggcggctagggcgcggcccgagagaaagggcggctcggccgagcttaacgggccggccggcccaagaaggtggcccagagcggcccaagacgcgcgcgcgcgggagggaggagagagagagccggtggaccgggctcaccatgcgcggtcccgggtgggacccgcttgtcagcggctcggctcaccgtgcggagggagtacgcggctcatgcgcgcgagcgggggagggacgcggtgcacgcgcgcgtttcgcggtggacgcggatgcagcgggcccacgcgcagcctcacggctcgcggtggaacgcgcgcacggggagggactgaccggggtcggctcgacccggtctaggctgagctggcgccgacgtggcgcctacgtggctgccacgcgggccggcgggaggtagacgacgacccggccgcgaatggacggcgggcggcggcggcgagcggcggagcgaaccacggcgatacgggcaaaagctagcacaccgggcggttgttcgtgatgaggggagacgagccaacggctcggattcgccagagggagttcgacggcggcgaatcgcggcggcgacaaccggcggggagggaagagggaaacgccgacgaggtcacgagggaccgattcccggcggtgagagcatctacgcggtttcgggaactcgatgctagcgtcggattggacggagctacaccgagcgaggctggcgacgtgtgggtgctacggagctcgagcggcgacggcggcgagcacacggcgagcgacggcaacggtcggggcggcgccggctaactacggggagtctactcgagctactaccgaaagctagggggaggagatggagcgaggaggaagaacggagggaggcatcacgaggtgaggaggggcgctgtgacgagaggccgacggcgcgggagggatctctccggcatcgggccggttaagaggaggaagacgagcgcccggagtccccttccgcgtcctagtgcgcaccggctcctccggcacacacgcgacggctgcggtcggcgagagggacggcaatggcgcgggcgagaaacagggaagaatgggagaaaagggaagggagggcgcttgggtttatagggggcggcaatgtcagtttggaaaccgactttggcggtcaaggcgcgagctgtcgctccggctagcggccaaaacggcgacaggagggagggaggatgacgccggcgggaggaaaaggggaaaaaggagggagagaaaggggggctcgcccctttcttctttgggaaaaggggaaggggagcgggggcgtcgaggcagagggaggagggctcggcctccgtcccttggcggcttgcgcgcggagtggcggggccgaggcgatgacgacggcgatgacggcggggcggtttggagcggcgcgacgacacgggcgataggcgcgggctggcgcggtagagggtgacggcggcggcgaccagatggtcggccactcggcacgcgcgcgcggcttgcaatgggagggcgcagcggatggagaggcgcggctcgagcacgcgcgctggctgcggggccgagcggctgcaggcgcggcagggcagcggggccgggcggcgaccacgcggtgcgggcgaggaccacgcgggcgcgcgcgcgaacaacagcgcgcgggggccggctttgcgagcggggagctcgccagggagaggagaaggaaagcgaggggaggaggcgctcggcgcggtgactcacgcgcacgcgcgcggacagagcggaggaggaggagcgctcggcgccgctcccgcgcacgtgcgcgcggcgcgcgggcggagcggagcggagctgagggagaggggagaggcagcgcgccgg

SEQ ID NO: 10336 - DNA, 698 bp, Oryza sativa
aaaatctaaagactgatacattgcacatactccgaccggacaagacgcactgtctcatccgtgtcgtttgagaagcactcacttagttgcttttagaaaataattcaaataaaatcaattgcaaaaacaacagcctttccttgaagcctgcattaaacacttatttcccctggcttgctgagtactcccgtactcacccttgctctatataaatattcccccccccccctcagttgctgaagaagatgaagcggatcctgctgatgaagagttcttccaggagcaagccggctacgatgagttttaaggtttcggcctagttcccaagtcgcgcctgtgttgattggtccaagtcctggcttccgctttccttttgtaatgcagttgtgagctcgggatctgtccgcagcccaacatgactgtacatctactctataataaagagacctctgttgctgtgatattctgtctccctgtgataccagcactgtttcctgggactggtatcgattaacaggttaatttggagcgtcacgggctagttccggtcgggactagttcggggcgtgacaccaccccgccgcgcgcgccctcctccttggggccggcccaagccgccctccctctctccccgggacgccgacaggtgggccccacctgttgggcccgtctccttcctccagtcggcgccgccgcgc

SEQ ID NO: 10337 - DNA, 1679 bp, Oryza sativa
aattcctgcagccctaccagtcccaggaaacagtgctggtatcacagggagacagaatatcacaaccaccaaaggctttttgttattaaagtaaatgtccagccttgttgggctgcggacagatcccgagctcacaactgcattacaaaaggaaagcggaagccaggacttggaccaatcaacacaggcgcgacttgggaactaggccgaaaccctaaaactcattgtagccggcttgctcctggaagaactcctcatcagcaggacccgcttcatcttcttcagcaactagggggggattatttatatagtgcaagggtgagtacgggagtactcagcaagccatgggaagtaagtgtttaatgcaggcttcaaggaaaggctgatgtttctgcaattaattttatttgaactcttttctgaaacaactaagtgagtgcttctcaaacgacacggatgagacagtgcgtctcgtccggtcggagtatgtgcaatgtatcagtctttagaatttaaacaaggttggcacccggccaacagctttttcaacggccacccggctaacaacttttcaaacggccacccaggccaacaacttttcaaacggccacccgggcctagctgatcccatcagctgcagatttttcaaacaccgaaccccttttcacacagcaatttcacaagcagtagtcaaacaaaactacgctaggaatcacctcacatccgcccgtgaccgtgggcacggctgttcgaacagtttaatgacctctgaagagggggtacgctttacccacacgacattactaacccgggtcacccagcccgtggggatcagccacgtcgggagacctccaagctttcatgacaaggcatttcgaaagccgatacaggtttaccatatgccgacgagaggggtcccagaccaacaacaggttaggtcccagaccatactgtgccaggaagcccaggggtcctacccgacaccaccccggcgaatccacatgtctctcggcatcaaggctcccctgataagctagttactcagccaggggtgtcccattccacccatgtggtcgtacttgtcttatgtttggatgaaattccaaggaatcggtccttaagtgcgagagcgggaaaccgtacactcggtacgttccccggtccgcggttttggaaattcatttagttcgcaagcaccgacccaagtgtcgggttttccaagtcttttgtaaaactccagttttacccaacttgttactcaaattttaagtttgaaggcaaccgtcgatactcgaccaaagtgcccaagtttcgaggcgcacctgggtggttacaaggggacatggtatagcaattaacaatggaaggatcaaatgcgacaaattaagtaagtccgccaatctgcttcgcagatggaacaacagattaagtgtgatcctatcaatgcataatattttgcaagcaacataattgaatttcaaatataggctcaagatgttcaaaggtggcttgccttgctcgagatctggagcttgatcctcaaaatcctcgcactgcgggtttcgggctccgaaactacacgcgaaacggggcaactcaacaaacagcgaaaataaagccctattaacgacctctaagcgtgccattagatagatctcgagatttgatgaattttggaa

SEQ ID NO: 10338 - DNA, 3613 bp, Oryza sativa
acaagtgtgatttagattggtataaatttgagtacttcaagtgctgaaaatctgatctcacttcttcaatcagagcacggcatggagagtttgtccaaggaacgggaggcaatgatgatagcgttgggcattttacaatctcaagctcctttagtgtagggaattgagtgctgtccatctttgaatatggcaactctataagttctgggcaatctcttactatgaacacttctagctgagagaacacacgggaagcatcatttccggtccatttttctagtcgcggtatgccaactagctctaacctttttaaattccaaaagctttggccttctatacaactcaaggatttttcactgtgctggttaaccaaccataactcccctataggtgggaatttgttccagtctagaccatgcagactaagagattgcaggcctttgattgacaagttaaaacctaaccatgatgggcaagtggcacctccatgcccttcaatttgtagctcttgaagattgttatgtggcttaagactttcaagaatatgttcatcttgggaacaatcctttgttgaccaatgtaatattaacttgtgcaaatgacttttgtttaaaagttttgcttcgtccgccgcctgtgcattttcaagattataaatgcctagtgttccgttcagctccaactgtcctaactgtcttaatgcaaatggctcactttgtcttttcactttaaatctccttagttcttgtaaacattttaacttacccacattagcaacgtcagagtggagattgtcatcggggacaagaaaatggcgtagccttacaagattatctatatctcttggtaaaccaaagtgaccattgcattttcgtacatcaaggatcctcaagtgataaaaccttgaaatggtgttgggtagccttatttctggaaaatatcccctaataatccttaagtagcgcaagtggacgagatttgaaaagttgtgcaacatattctccactgcatatgatggagtagacaacaagatgacgcggagtgattttgcgttacttaacaaatcaccaagaggactgataaagcttccatggaatcgtccaaatagcataaaagagtgtagcttttcaacatccagtctcttacttagtgtgctgaaatccgtcttgatgctttcaaaagtcactctatcatttacatccatgtcatctatcacaatagacaaatggcgtatagatggtggaatttgcacaaaccttacgttagaactactgacagcaagacattcacaggatgaaaccttcaatgctaactcatgtagtagatcatgcatactgtaataaggagacccatcttcattcacattttttttgaaaaatccataatcaaccaaatcattcaaataactcaacccaatatcttcagttgttttgttttcatcctgggaatgtaaaatgccttgccctatccacaagtgaatcatctcctcactatcaaacttgtaatcttcagggaacaaagcacaatatgtgaaacattgttgtagatggaaagatagatagtcatagctaagcttcaaagctggcataatatcattttcactagtttgtgattcccattccttactttctaggaccctcatccaatcatccaaatcaaggtgatttctcagcaatctacccaccgtttttgctgccaaaggagagcccttaagttttttcactatcttttctcctgtctcaagtaagttagcatgatcatctattgatttgtcatcaccaaaaacacatgcttggaataattcccagaactcttcaggttctagcccttccaattgtattggtcgatcaaatgttttcaccatttctgcaaccactggaaatcgagtggtgactagaattatgtttccctttgtcattgcttttctgaggggagctaagaactttttccactcatcctcattatcacacttccacatatcatccaagacaagaagaagcttcttagatttcaatctttgctcaattgaatcatccatgtcgacatatttctcatcatccttgagtttaggtatccactttgagatctcttctttcaatctatacagattgaaattgagagagacgcatacccaaaccttaacatcaaaatggttatgtacttccttgtatatgtgctgagtgagagttgtcttccctattccccctggaccaacaattggaatgacggtcaaatccttgtcacagtaatcaccccgagtaatgtcctcaataattctacttctatcacccttcctcccataaaattcagggtctataatccctgaagtagttacaggacgattcatagcaacgttgcttggatgaactagcgtttgccctggtttccttgaaaattcaccattgatactgatggcaatgcatgattccaacagctctagattaaggattgtagagactttggcacatacgggcttcaattgttcgacgatgtgcttcattcttgtggacagatccaccctatcgaacttcagctttggtgttttcatggtagatatgtgcaaggcaccggagtcatcacaattgtcaagaccaggtgcaaaagggaagcatggaaggtgtttaccaacgagatggatggtgctctgagcactgcaagcgaggatgcgcatgcagccgctgccagcaacagcctcctcttcgttggcgtggcgactcgcttcctcgtcaccaccgcacgagcaagaggcagagaggtaccttctcttgatgtttctggcagtgtggtgagcgttgagcacaaggccaaggagacagccgctggcatgctcatcggcggcctcgtaggtgccatcgagctcgtcctggatgcggaagtagtcgagctcgtcgagcacgtcgtcggcatcataggcgaggccacggagctccaggagcagctgctgcagcgcggggttgctggtttctctgccacgggtgttgtgcagcatcccctgcgcgtagagcagctccatcttgatggcgccgacgtttggcccgagctccgtgctggccgcccacgcctccacgaaccctcccgacagcgggctcagcgccttgccaaccacccaccgcgccgcgttcacggccgccgactccattgatctgtctggtctctactccgctagctaagctgaggagagtgggagggatggaagagctgtggactgcgagagaacaaagcagtccaggagtagtagagaagggaatggtgaatagcgagcagacagtgaagtgaaggactaccaaaccacggcagaagtattgtttgttttctgaaccctctgttcgaactttaccaaatggtgttctcaaaaatggatttaaaaaaaccaaagtcgtcctgctcttcttgaatctgatgccattccgtgccatttggaagataagaaaaaaactaaacgtctaatcagcccccaaaaccataattagaacgcaatagtaaaggacaggcggtacagccaatggatttacttaaatctgttgcgattgcaaaggtgcataatgccagattcgccactgttcattcagtaaactaccgggatagagcaatttgcctgcatgtgggatgtggc

SEQ ID NO: 10339 - DNA, 2089 bp, Oryza sativa
atttggggatttgttatttttagtaaatttgtactccaaatttatctgaatgtggcatcgcacgagtaacataatattcccagatactctttctttgaattacttttttactttttaaaaaatgtgtaaatgagatgagagagaggggtgtcggtgaggctccatgctagtagctgagtttgactgaattttgtacgcaagggaaaggtgtgagatattaaattcatgtgtagccttttcatgtgaagcaagcacaaatgtagagcacaaatgcggaggtgccggctgcaactgtgcaatgaattgcgtgacatttttaattccgggcgttacgtgacttgtgaagaattagtgggtcactagtcataacagtggcagtagtgtagtagcaaccgttaggcttaattgtgtagtactagaaaattaagagtttgatgtaaactaatcagtactggtacttaaatagagtaggtgttgagctgagcaagcatacagtcagatatatgagtatgcaacaacattaattaagctttaatatatgacaaatatttcactagctttatcatgaaaattgctttcatgtttaacattttcttggtactactcatatataagtggtactgtggtagagaaacaatgatcaaaacatagaattgctcatatgtagttttaatatatgaaaatgaatcggagcatagtttgtggtaatgagtgaggagacgattgtttaccgggattggtgaggccttaacataaaggtcaacacaatcattaaagcgggtgggccccccctctgcgggccccaccaactttctccccccccccaaaaattttcgccaagtctgttctgtctccgggcaacggctggcgcccccccagaccgcggcgccacggtggctggcgccgccctcctcccccaatcgaagcccttctgtgcgcgggacattaactatccctgtcacatatgcaattctgtgcgcgggaaaagttgcatgcatgcagctgcccgggagaagtttgcatcgaacagtgacgacgcgctatcaatggtcgagatttaatccctcgatccgatggctgggacgagcgtccgatttttttctcctgatcggacgtccgatccgtaggtctctcctcttctttctccctgtaaagagaccgcaacagcttctgtaatagtgttggaaagtcttctcttaatatagtcaactgtcgtagttaacagtttaatacgattggtggtggggggggggggggcattagagcaagtgtaatagtagagctaattatatagatccacattagagttaatatgtacagtagatgagctatacatatttaatgcatttatcttgaaatatagtagcaaaatactcaacctttgctttggacaaaataaaatatattataatatgtaatagacaaaagaattattgtgtaagaggtaattttttctgggcctgtattctttttctaggttcaataggattcttagtggttggggctttcagttatcttggtaagaatattatatctgtacttccatctcaacaaattcttttttttctacagggggtcgtgatgtctttctacggaatcgcaggcctattcattagtgcttacttgtggtgcactattttgtggaatgtaggcagtggttatgaccgattcgatagaaaagagggagtatcacctgtttgcatttttgaatatatggtattcacgtgttttaactaaatatttagattgtttcataatattagaaaatatcattggtaaatttgtaaaaactataaaccgtggtggagtgccagatttactatcaccaccactagagacttttaaatgagtatatatacgtagagagttagcttttatatgaaagctaatcattttaatttttcaagttctattctccgaataactttataattgatttaggcttagtactccatattaaacttgaactcatcatcgtcatgtcggctgacgacccagcaaaactccggtccaaagccggagggcatccgcgacgacgaacacgcacttgtacttgctatatagctcattagcttgtactccctgcagg

SEQ ID NO: 10340 - DNA, 9394 bp, Oryza sativa
cgccgagcgctcctcctcctccgctctgtccgcgcgcgtgcgcgtgagtcaccgcgccgagcgcctcctcccctcgctttccttctcctctccctggcgagctccccgctcgcaaagccggcccccgcgcgctgttgttcgcgcgcgcgcccacgtggtcctcgcccgcaccgcgtggtcgccgcccggccccgctgccctgccgcgcctgcagccgctcggccccgcagccagcgcgcgtgctcgagccgcgcctctccatccgccgcgtcctcccattgcaagccgcgcgcgcgtgccgagtggccgaccatctggtcgccgccgccgtcaccctctgccgcgccagcctgcgcctgtcgcccgtgtcgtcgcgccgctccaaaccgccccgccgtcatcgccgtcgtcatcgcctcggccccgccactccgcgcgcaagccgccaagggacggaggccgagccctcctccctctgcctcgacacccccgctccccttccccttttcccaaagaagaaaggggcgagcccccctttctctccctcctttttccccttttcctcccgccgtcgtcatcctccctccctcctgtcgccgttttggccgctagccggagcgacagctcgcgccttgaccgccaaagtcggtttccaaactgacattgccgccccctataaacccaagcgccctcccttcccttttctcccattcttccctgtttctcgcccgcgccattgccgtccctctcgccgaccgcagccgtcgcgtgtgtgccggaggagccggtgcgcactaggacgcggaaggggactccgggcgctcgtcttcctcctcttaaccggcccgatgccggagagatccctcccgcgccgtcggcctctcgtcacagcgcccctcctcacctcgtgatgcctccctccgttcttcctcctcgctccatctcctccccctagctttcggtagtagctcgagtagactccccgtagttagccggcgccgccccgaccgttgccgtcgctcgccgtgtgctcgccgccgtcgccgctcgagctccgtagcacccacacgtcgccagccttgctcggtgtagctccgtccaatccgacgctagcatcgagttcccgaaaccgcgtagatgctctcaccgccgggaatcggtccctcgtgacctcgtcggcgtttccctcttccctccccgccggttgtcgccgccgcgattcgccgccgtcgaactccctctggcgaatccgagccgttggctcgtctcccctcatcacgaacaaccgcccggtgtgctagcttttgcccgtatcgccgtggttcgctccgccgctcgccgccgccgcccgccgtccattcgcggccgggtcgtcgtctacctcccgccggcccgcgtggcagccacgtaggcgccacgtcggcgccagctcagcctagaccgggtcgagccgaccccggtcagtccctccccgtgcgcgcgttccaccgcgagccgtgaggctgcgcgtgggcccgctgcatccgcgtccaccgcgaaccgcgcgcgtgcaccgcgtccctcccccgctcgcgcgcatgagccgcgtactccctccgcacggtgagccgagccgctgacaagcgggtcccacccggggccgcgcatggtgagcccggtccaccggctctctctctcctccctcccgcgcgcgcgcgtcttgggccgctctgggccaccttcttgggccggccggcccgttaagctcggccgagccgccctttctctcgggccgcgccctagccgcccgagggaagtctatattccctccctctccccttttcttttcttttcttttcaaaaaaaaaggatttaattaaatccttttcctttagaccaaaaatccaataatcttagaaattcaatatctttccaaccgtaaatccgtttgactccgttcaaattccaaaatttctcaaatctcgagatctatctaatggcacgcttagaggtcattaatagggctttattttcgccgtttgttgagttgtcccgttttgcgtgtagtttcggagcccgaagacccgcagtgcgaggatttcgaggatcaagccccagatctcgagcaaggcaagccacctttgaacatcttgagcctatatttgaaatctaattatattgcttgcaaaatattatgcattgataggattgcacttaatctgttgttccgtctgcaaggcagattggcagacctacctaacttgttgcatttgatccttccattgttaattgctataccatgtccccttgtaaccatccagttgtgcctcgatattcgtgcaccctgtgccagtatcgacggtcgccttcaaacttaaaatctgagtaacaacttgggtaaaactggagttttacaaaagacttggaaaacccgacacctgggtcggtgcttgcgaactaaatgaatttccaaaaccgcggaccggggaatgtaccgggtgtacggtttcccgctctcgcacttaaggaccgattccttggaatttcatccaaacataagacaagtacgaccacatgggtggaatgggacacccctggctgagtaactagcttatcaggggagccttgatgccgagagacatgtggattcgccggggtggtgtcggggaggacccctgggcttcctggcacagtatggtctgggacctaacctgttgttggtctgggacccctctcgtcggcatatggtaaacctgtgtcggctttggaaatgccttgtcatgaaagcttggaggtctcccgacgtggctgatccccacgggctgggtgatccgggttagtaatgtcgtgtgggtaaagtgtaccccctctgcagaggttaacaaactgttcgaacagccgtgcccacggtcatgggcggatgtgtagcgcccgttccgtcgtggcgcctagcgggaaaattatctcttaaaaaccctaattgcgaaatttgtttccttgcttgttgtctagtgcccgtgccatctcaagatctcaatccccgatctatcgtcgagttcaaatccgaatccaaatccttccaaatcgatttccctccgcaaagtttagtttgcctcccccggggttcgatgggccgaattccgctcggcccatctctctctctctctctcccgggctctctttctctctctctctctccctccccggcgcgctccttcacccccgctcagcctcacccgcgcgctgcccgcgcgtgcgagagccgccccgagcgcctctctccctccgccccgctccgccccgcccgcgcgccgcgcgcgcgtgagcgcgtgtgccgccgcgccgagcgccccctcgctctccgtctccccgtccctcgctgccgctccccgcgtgccgttgctcgcgcgcacccgcgctgccgcccggtcccgccagcccgcgcctgtcgcccgagccgcgccgttcaaaccaccgcgcctcccgctgttttcccgcgcgcgcgtgccgagtggccgaccgctcggtcgccgccgtcgtcagcgcctgccgggcctgttggcaagtttgccggttcggttcaaaccgccgccgttatcccgttgttatggcccggccccgggccattccgaggccaagccgccaagggacgaaggccgagccctcctttccccgtggggggtcacccccgctccctcctccttttcccgatccggcaaaggggcaagccccctttctccccctcctttttcccttttcctcccgccggggtcatcctccctgtcggccaatttggccgatagccggagcgtcagctcgcgccttgaccgcgcaagtcagtcctcgaaccgacattgccgtcccctttaaacccccggcctccccttacccctcctcttccattcgtctccgcgctgttgccgcgccccgtgctctgtctcgcctccgccgtccttcgccgagcgccgggagagccggtgcattcgaggacgcggaaggggacttcggccgcgccctctccttccccttccccggcccgaggccggagagattactcccgcgccgtcggcctctcgtcacagcgcccctcctcttctcggtgatgtctctctccgttctccctcctcgctccgtctcctccccctagctttcggtagtagctcgagtagaccccccgtagctagccggcgccgccccaaccgtcgccttcgctcgccgtgtgctcgccgccgtcgccgcccgagctccgtagcacccgctcgtcgccggcctcgctcggcgtagttccgcccaatccgacgatagcgtcgagttcccgaagccgcgtagatgctctcaccgacgggaatcgacccctcgtagcctcgtcgccgtttccctcttctcccgccgccggttgccgccgccgcaatccgccgccgtcgagcaaacctccggtgaatccgagccattggctcgcctccccctgtcgcgaacaaccgcccggtgtgctcgcttctgcccgtatcaccatggttcgcttcgccgctcgccgccgccgcccgccgtccattcgcggccgggtcgtcgtctaccttccgccggcctgcatggcagccacgtaggcgccacgtcggcgccagctcagcctagaccgggtcgagccgaccccggtcggtccctccccgtgcgcgcgttccaccgcgagccgtgaggctgcgcgtgggcccgtcgcatccgcgtccaccgcaaaccgcgcgcgtgcaccgcgttcctccccgcccgcgcgcgtgcgccgcgtgctccctccgcacggcgagccgagccgttgacaagcgggtcccacccgggaccgcgcgtggtgagcccggtccaccggactctctctcccctcccccgcgcgcgcgcgcgcttgggccgttttgggccggccggcccattaagctcggccgagccgccccagatcccttgggccgcaccctagccgcccgaggaaagtctaaatttcctccctccttccttttctttctcttttccaaaaaaaaagggatttaatttaatccttttttccgttagaccaaaaatccaataatcttagaaattcaatatcttcccaaccgtaaatccgtttgactccgttcaacttccaaaattcatcaaatctcgagatctatctaatggcacgcttagaggtcgttaatagggctttattttcgctgtttgttgagttgccccgtttcgcgtgtagtttcggagcccgaagacccgcagtgcgaggattttgaggatcaagctccagatctcgagcaaggcaagccacctttgaacatcttgagcctatatttgaaattcaattatgttgcttgcaaaatattatgcattgataggatcacacttaatctgttgtcccatctgcgaagcagattggcggacttacttaatttgtcgcatttgatccttccattgttaattgctataccatgtccccttgtaaccacccagttgcgcctcgatactcgcgcactctgtgcgagtatcgacggtcgccttcaaacttaaaatctgagtaacaacttgggtaaaactggagttttacaaaagacttggaaaacccgacacttgggtcggtgcttgcgaactaaatgaatttccaaaaccgcggaccggggaacgtaccgagtgtacggtttcccgctctcgcacttaaggaccgattccttggaatttcatccaaacataagacaagtacgaccacatgggtggaatgggacacccctggctgagtaactagcttatcaggggagccttgatgccgagagacatgtggattcgccggggtggtgtcgggtaggacccctgggcttcctggcacagtatggtctgggacctaacctgttgttggtctgggacccctctcgtcggcatatggtaaacctgtatcggctttcgaaatgccttgtcatgaaagcttggaggtctcccgacgtggctgatccccacgggctgggtgacccgggttagtaatgtcgtgtgggtaaagcgtaccccctctgcagaggtcattaaactgttcgaacagccgtgcccacggtcacgggcggatgtgaggtgattcctagcgtagttttgtttgactactgcttgtgaaattgccgttgtgaaaatgggttcgatgtttgaaaaatctgtagctgatgggatcagctaggcccgggtggccgttcgaaaagttgttggcccgggtggccgtttaaaaagtggttggcccagggtggccgtttaaaaagctattggccgggtgccaaccttgtttcaaaatctaaagactgatacattgcacatactccgaccggacaagacgcactgtctcatccgtgtcgtttgagaagcactcacttagttgcttttagaaaataattcaaataaaatcaattgcaaaaacaacagcctttccttgaagcctgcattaaacacttatttcccctggcttgctgagtactcccgtactcacccttgctctatataaatattcccccccccccctcagttgctgaagaagatgaagcggatcctgctgatgaggagttcttccaggagcaagccggctacgatgagttttagggtttcggcctagttcccaagtcgcgcctgtgttgattggtccaagtcctggcttccgctttccttttgtaatgcagttgtgagctcgggatctgtccgcagcccaacatgactgtacatctactctataataaagagacctctgttgctgtgatactctgtctccctgtgataccagcactgtttcctgggactggtatcgattaacaggttaatttggagcgtcacgggctagttccggtcgggactagttcggggcgtgacactttgcttccgcctccctctctctctctttcaggaccatgtcgttgccagtcgcgttcatgctattcttattttattcgttgccaacctccaccatctatggacaagacacatcatgggacacattcttccatcttcctcagcaccatttggtcgcccgagcaccggcgcccatctttcctcctcttttgtttctcacctttggttatgaaagacaatgaacattgcgtattgtgcactattccttcttggtccagtccaaccatgcttctagaccactcacataatattgagatcataaaaatagaacatgaaaaattctaattatgtcaatgaaacgggcactcatccaaaattaatggattaggttttcatctatgaggtaaaataagttttttttttcaatttctagctaatttcagtttttttctatttgctgtattagttttagcactatttgatccattaaaaatttattataatttataatttttctctgtattgaattatttatagctaaataaaaaaatggggatttagttatataattttcctaatattgaaatatcattccggccaaagttatttgcagtttcatgttgttattttattgattatattttcttcatcatttatgtctaattgtgatatatggtttaggattttaatttgtgtcaatgaatgctaatccattgcaacgcacgtgcattatgctagttataaaaaaattgcttgaaaaaaatcatattaatccatttcttaatttttaaataatgcttaattaattatactctaatgagctgctctgttttccgtcctaagggtctgatgcttggattaatgagcaatcgattgcccaacaagcacctcaccttgtggaggtagtttcagctcgactgcgacgctcccgaatggtggcggaggccatcctccataggcagtggacgagggacataatccaaggtgcactgaccatgtgactgatcgttgattacctctgtctttggccagtgatcgaggctactactctgatccccgacgtcggcgaccagatggtccggcgatggtctagtgatcatcaatacttgtcgagttcggcctaccagctcttcttctccggcatgcagccgttcccctgctggaaagagctttggcgggcttgggcactgcctcgatgtaagttcttcctctggctcgcacttcagaagagatgctggatggtggatcgactcctaaagcatggcatggcctagacacacatcctgcccttgtgcagccaagatgccgaggacgtcaatcacgttcttatctgttttgtcttcttgaggcaagtctggcagaaggtgttggccatcgcgaggctcactcttgctgcgccaatggaccaagacgacctcgtcgactggtggtccagtgctcgatgatcagtggacaaatgcaccttgcctagcctcgactctctcatgctactttgtgtcctggtgcctgtggaaggagaggaatgctcgggtcttcgacaacaacctatcctcaattcaggcggtggttgatgagatcttgcaggaggttgctgctagcatagcgcgatcgtgtaaatgtatttttcacagcttctaacatattgacatgcaaaacttttgcgtgttatgaaaaaaaatattcaggtaatgttcattcagcttctgagcttcagctcgacttctgtcagccatttcattaatcagacttgttaccagactgatgcatcacaaccctttccgacattgcactgtctgaatgacgtgcgtgtagatggttacagattgcacatttcaacttgcttgatgacgccgccctgcagctttgtctgcgaataattttacaggcatgtcgatgcaactatgggagaagttcgatagagaaatggtagtaatctgcaacaataaaacatctgtccccaaaatcagtactctgtctggtttagtggcaaaaggatgccttcttttttccctgaactcctaaagcatatactcctatataagttaaaaaagaagagaaaaaagaaagccagagaacaggccattttacaaagagagatagagaagagtgatatgatatctgcagccatcatctgattttttttctttgaacatttgcggtatccccttctggccagtctgcaaaacagcccgggccaagtcagataaccatgcgcgtcatcctcccggtttacttataataatggaaagatatatcagccgctgcaccaccacaacctatatggctatattactagtgaaataacaaagtacatatgtttaaaattgtaaatttaccagacagggtgtagaaaatgtcccttgtaaccagcagcctccttgactccttcgttagggacttgcaggctacacctactgcagggaaaacagaacttaggtgtgttttacagtctttccttggcaaaagagatgaaacaattatctttagaaagccccttacatgaaaaaaagaaagttaatgcaggagcaaactatccagctaaggatgccatagtacttctgggctgcaggaa

SEQ ID NO: 10341 - DNA, 786 bp, Oryza sativa
cccatgagcactttgcaccgatagaacacaatgatcaaacgcctgaggaaaatcctgaggaggacaacattgtagatactcgcaagcgtaagagacaaagggttgcaaaatcctttggagatgactacattgtatacctcgtggatgacaccccaagaaccatagaagaggcatattcatctcctgacgctgactactggaaggaagcagtacgcagtgaaatggactcgattatgtctaatggtacttgggaagtcgttgagcgtccatatgggtgcaagcccgtaggatgcaaatgggttttcaagaaaaaacttaggcctgatggtacaatcgaaaagtacaaggcaagacttgtggccaagggttatacccaaaaggaaggcgaggacttcttcgacacatactcaccagttgctcgcttgaccacgattcgagtactacttgctctggcagcctctcatggtcttctcgtccatcagatggacgttaagacagctttcctaaacggagagctggaggaggagatctatatggatcaaccagacaggtatgtactagaaggtcaggagggaatggtgtgtaaactattgaaatccttgtatggcctcaagcaagcaccaaagcaatggcatgagaagtttgacaccacgcttacatctgcaggctttgttgtgaacgaagctgacaaatgtctatactatcgctatggtgggggaaaaagggtgatcttgggcttatatgtcgatgacatactgatctttgggaccagccttaatgtgattg

SEQ ID NO: 10342 - DNA, 21221 bp, Oryza sativa
cggcgcacccggcaggggagggggcggggctagggggaccacgatcgaacacctatgccgcaatgaacagtaacttttcctatttatcccgatttttgcccattttctatttaaatatagccctataaattctaatttttgcataaatgaagtttgctccatatttgtgttatcctaattaaaaattcaccctactttaatatcactcatattttgtttatataatttatttgaatttttaattagggttaattctcattccatcgtactaaaatttaattattgctaatatggtcgcgataaaattttatttatttccaatcccacctaatctttattttaatttatattttaattatttatttagccaacttgatttttagggtttattcctagttagttattcattattcgcgattaataaattccgagattaaaatctaatgaaataggcgaataaaatcggcatgatgcaatatttttggtgttttgatttcgttggtcgaattttcagggtgttacactggtgattcattgaatgcatcaacatatcaattgatcctacggtctattttggaagaatcattcaggtgagcatcaactaatctttggtaagctaattaatttcgaattttgttttctaagactaagtttagatacatctacatgttttataaaagtaattgtgaaaagagaattgggcaacgaaatgacgaagacgcgattaaaattaattctaaaagttaaggacagttaaggacgcgattaaaataaagccgtgcctagcaggcaagaatcctcgtgcagtgtaccgagataaatcattatcgaataaaagagtactaaatctcaaaaaaagaataaaagagtactccatttgagaatttatatcttgtcatttctaccatgaatagagaacaatgcatcaatttgctccaatggaatatatattctgaagaacagaatcttgttacttacattatttgactttatgtcactgacatatagatacatactgagatgcagtcacatgacttaacaccagagaatccgcatccatatttcgatgggtactctctacaactccccggtactataaaagaaagaatctctgtttttttatcgcaaaacattaaaaaaaaaggaaccgttgaaacgtgatcttgagtgatctattttcaattgcaccaacgaattaaactgaataaattgaccaagggttagtgaacatctccagtcattttttaagagctcactgtcgaagcacttgcatcaatcttcacaaccaaaaatagctactagcaccaaagaaataagataggtagaatctgataaaacctgctcccgaataaacatttttttcattaacctacgaattaaactcactaaaattgacgaaattaagcaagccaataggtcctcgacttttaaagctcattgttgaaggcagaagcacttgcataaatctgcacaactaaaagtatgttcaaatcccagacttttatgtgtgcttgtatttacggacgattattttttctgacagacgatgtacccgttgataccggggtgtttgtggattgtgataattttatcaatttcaatatattggcctggactttggagatgcttataagtgtacaatatgcatatgtgtacttatgatgagagtgcttgcgtatatatgagagcctatgtttgcagtgtttctataaaaaaaagggttacagagagaactggtactgcatttagcacctactctgtatcaactgctatcttgattataaaagcatggccataatgatccatgctcttaaagttatatcaactggctggcaacttagtactactaattttcagtaaagtgttgttcctttcaagaacggcaagggcgatcagagcgtcgtcttgccgatctgcttgccctcatgggcaggttccagctcgatgtccaaaccctcatcgcagagctcatcttctgtctaaatgcaattgcaacgcatgtgttctactgttcttgtttcttcttggttcagattgtacttaaatttgttggtgtcagataacatgctggccctctagttcatcccacgacgcagagtagggactattcctattgtgttccaaaaaaaaaaaaattacatacgtgctattcgttctctacattttttcagttctgtgacagagtgaaacttcctgtgagcgagtaaagcttattgtacaatggtagagtactaaattacttctctttctacctagagacaaacatcaactttctttttataaacacattagaaatggagacgctcacacacacacacacgtgcacagtcatctctacgaacagaccttatccctatgagcacatcagaaagattaaaccaacatatctttatattaataaagttattacaaacgcataattgttgataggtacgtcgactaccactgagacattaactgatcttggtaagaccttgttatggtccaaatagtataattttgatttttaagaataactttaaatttttacttactgtcttagcaatcataaaaaagaactgaacaacaaatatgacaaaatgagacctttaaaattaattccaaataaaagttaaagttcaaaaccacctctgaagtatataatataaagccgcatgctaagccggcaagatcctcgttctgtgtaccgaggatgcaacaagatggatttaaaggacaggccccatgggactttcccatatgtgtctcttgggaaactatcttctcatttctccttcatggaacatgaacgtggaacaggtgcgtcaaccagccagcttttgaatgtaacatattcagacatgaacattaaaacagagaagaatctgcgaaaaattcatccaattcatccatgaaaattaaaacagagaagaatctgcgaaaaatatggtattggtcctattggataagctgtttgtatttgaaaccatgaaccatactgaataaaactgatcagaacaggtcaacagatcctatacttttttaaaagctccttgttgaagcattttgcataaatatgcacaaccatgagatgttactgaagaaataagacaagtagtactgttcttcacaatactctgaaaacaaccttcttggttactttttttagacaatgaccgtaatgatctttggtctaatatttatatcacaattggccagcaactgttagagaaaatgacctcaatgatctttggtctaaaaattatattgtgtcactggtgtcttgtagcctcatcaccttcccatacctaacactatcccttttaaaatggtctcaactcttctaaaactagcaatgtggtactcctaacactaggcatggagtattaccgaattaatattcacaagcatgtcttttatgagatggggctttgtgattctccatatgggctcccatatataattccaacatcctctccattccttgacttcgtcatgtttgaatctcctccttgaagtttctatttcaggcccaaacaatggaaaagcaacaggaatgcagaccaagcacgcgattctgaacaccacagcagtagtagtgaaaccgagagatccctgtcgctggtatagtttgctgtgctgccttcaactaagcaaggccacagaggcctagtttacttccaaacttttttttcaaaaaacttttctatcacatcaacactttcctatacacataaatttctaactttttcgtcacattattttaatttcaacaaaattttcaattttgacgtgaactaaacatacccagagtgatcagctgctgggcaaaaccgtaaatcgaaacgattctgaatttctggttcacgggtcggctggaatcatcgtggtgtcgtattaatatagtagtatttaactgcactgcactgtatcagtttagtgtgaactttacagagagctatactagactacgatacagagagaatgacagattggcccgatcgatttgttctccggcatgggcgaccctacacaaaatgcttcgttacagatagccaggtcgatgtgccgtctcctttgttgcttttcaccttttctttttactcaggctcacccagacacagacagtctcacatcacaagtcagtatgcatatgcctccaatctctgcagttcccagttggataggaggattcctagataatctcgcagagttcagtcgcacggctacagaatcggacattcagatcacagttgcaagcaacagatcacatgaacaagctccaactaatacagtttcagttcaaccagtccaatgcatacaggaacaaatcaagaaagttccagctcaccagccagtctttagtgtcttgctaccttcttcaagttccaacacgtacaaacagaaagggcaatccagatctccctgaagatgtgtgctttgtgatgaattttttataatcttttttgaagaataagctttgtgatgatttattaatacctgaaactcaattaggttctaaagcaagcattgcaagtagaggctctagagtagcatgacatgaagaggtagttacaccgtgtttagttccaaactttttttttcaaactttcaacttttctatcacttcaaaattttcctacacacataaactttcaacttttctgtcacatcgttctaatttcaatcaaactttcaattttgacgtgaactaaacacaaccttagtaccttgagcattcaaactccaaaaaggaagctgcttgagagagcaaagaagataccaaaccctcttctttccctatccccttccctcctatgatcctatcctatcctagcttccattccccctcaaccttgcacatcaccatcctccccttaatgccactcctcgcctcgctgctgccgccgcctcatcgcattctagagcattgctcatggcggaccaccaccaccagccgccgaccccaccacggcgccatcggcgtccccatgagctgtccatggcggcggaggaacgacaccatgggacgcagacggcgatggcgtcggatgacgatcgccaccatgatcgtggcggctggatcaggccggaggagaagcaccggagctccggcgtggcgtgggcgctggtgatcctgtgcacgctgctggcggtcggcgtgatcgtcgccggcgcgacggtgttcgccgtgtacctcatctacaagccccggatgccgtacctggtggtgtccgacgcgcagctggtgcggctggactacgaccagggcggcaccatcgactacctggaggcgctcgtcaccgtcatggcgaggaacaccaactccagggcggacgcctccttcgcccgcgtcgacctcgcgctccgcttccacggcgccgacgtcgcgcgcctccgcgccgcgccgttcgtggtggcgagcgcctccgcggcgccgctccggtacgacgtcgtgtcgaaggggcgcgcgctggacgccggcgggatgcgcgccatggacgcgtcgctcaagtccggcgtcgtgccgctcgacctcctcggccgcgcgcgcacgcggtggaaggtcgggatcttcgcgtcgctcaagttctggacgcgcatctcctgccgcctccacttcttctaccccggcaatggcaccgtcatggcctccgatcgcaacacctgcacctccaggtcgccatagccgatcgccattgattccaattcctccatttgattcgttcgttgcatctcgacgccatccgagacacgtacattactattacatcgcaccattacagatcatgtttcacttgtcatacttgtacagccaaataatgctggtacagtagaatctctgaatctacaagaagagtttattcaaatttagcgcgaaaacaaacacatttatatttgtaattctttattttttctcgatcagtcccctgtttgtactctgtaccaccaaattacgaagtcgatcctaattcctaaacagtgtgtatgaactacttcaagtgtcttttcgcttcgtgtcattgtcaggaatcagaatcgataacatcatcaactaatctcttcagtgttactactgcaaatccgatgaacattctctgacaaaatcagacgctgtctgtctactgaaaactgataatacttcaccattgggctgggcctgaattaccagattggactttctggcccaatatgtaaatccgatgaacattctctgacaaaaggaaaaagtacatcgaaggtccctccctgccgccgcgccaccgtgcggcccacgatgggccggcccgcacaaggagaaaagtgagaaagagagaggaagaagggacagaagaggggagagagatggtgatggcgtagtcaccctgccgtatgggttccacgctaactcagctaccacgtcggataaaatcagggtcaaaatcgtccaagtatccaaagtgacctggttttgtaagttgagggatggtatacaattttataatccgatgacaagatgagattggaccttatggcccaatatagaaggcccacctattcttgggccgaagtctaagcccaacaaccggtcagcgagtcgcgacggggagggagtggctgggaatcgccggagaagaggaggatgacgccgtgacacgggagcacagcaaggtcatcgtcgtcggcttccgtacgagactaggaggagaagtggggattggattgccgcggaattatctccgtcgctgtcgccaccggccgtggggaagcagcgcgcggcgcggcgcgggggggagagtctcctccgccaccgccagcgtgggcagtgggactacctccttgccccgctacgcgacgcggcgacgtcgccgtcggcgtcgtcacccctccgcacggtgcactgaacgtggcgcctccacttggcgcgcgacgcgacgcgacgcggcccgccttcttcttctctactgctacttaaccaccagccgcgcgcgaagtgcggcgagcgcgcaatcgaggtcgaacacttggccggcatgaagcccaggcctaccggattcggggccgcggcggcggcggcggcggaagttttggtggggggcggatgcggtggatgggcgtggaggccgaggccgaggccggcgacggtggcctccaccgcggcgatgtcggtgagggggcctggtactacccaggcggccgcggcggcaagcgccgtgcactcggagcgccaccgcggcggggtgcacgggctgcagctccctccgctgcggctgcagttcaccgccgacctggaggcgcggatcgagaaggtgatctacgcctgccgcttcatgaccttcctcgccatcgccggctcgctcatcggctccgtcccctgcttcctcaaggtcgatttttatctcctctcttcaggttcgatctactcctagcaatttgttgactgtccaactctgcagggctgcgtctatgtgatggatgccttcatcgagtactacctgcacggtggcggcaaggtcaccctgatgctagttgaagccattggtaactaactaactaatctccctaaacttgatgctgttctacacacttcagccatgagcaattaaccactttgtatcttcagcaacacagattagcagttgataacacgggagcacaagcaccaaaccacaaattgcatcgttgctacatgcatcctagtggagttatatgtagtaatttctgataactgaccagtgtgcatttcttgatttacctcagatatgtttctggttggaacggtcatgtttgtcttcgggacagggctatacgagctgttcatcagtaacatggacattgcaaagtcatcatcctatggctctaacctctttggcttgttcaggctcccggttggttcacgcacttagcatccctctaaatggtgcggtaactggggaatttccagtatcctgatacctctgtttctatctgcaggaacggcctgagtggctcgaaatccagtcagtgaatgatctcaagactaagctggggcatgtcatcgtcatggttctactggttggcatctttgagaagagcaagagggtgaccatcacatcatgtactgacctcttctgctttgcagcatcgattttcctctcttcagcttgcctctacctgctctccaggctcagtagcaagtagaaaaataggaggtagcgacacctgaatggctggagcacaaacaggtcttgtacatatgacataggcctgttgtgtttcctatgccgtgcaacacctcatgttatgtttacataatgtaaaattagaggggagtttgcacatctcacgtactctttgtatggaatggaaactactttgtatagtggagccataagacattattgtcaccatcactgtgtaccacctggtactgcaactcactgcttcgatgataaatataaatagttactgctatggcatgttatgaattgattagcaatgctgccttttctgtctgtgattcttttgaagtttttagagcaggattactttgttgatttcttttatacccccaaaagtataaccaagtgctagttaattagtttagaccaggaggagttgcacctatttcttattcttatgatgtcttttatgaacacttctgaatgatatgtatgttatgctattatatgccaaacatactacttgccttcaaaatcattggtgtgatacaggaatgctctgacctccctctttgatattagtagttcctatttgatcacaaggccctggtgaagcttgccaacatagtgtttccatattatcgcttattttcttacacacagagtatatttgatgaatggagtgttgtttggtgtgactactggcttgtgaatgaattgaaacctgcagaatctaattacgtgttatgtatccatgtccttctttctaaaaaaaaatataagtgaagctcatgatgtactctttgccgtatgttgaagcttatctgcgtagctatcgcccttatgagtaagaatactgaacacgatcattaatttgtgaggttataattctgagcaaaaacttgcttgatgttgcagttttatgtataactactaaagctgatgtttcagttctgtgacctacgtccggccaactgtccttcccacacataagatttggatgccagattatctttgaggtatgtttctgaccttcagtatttgcaactgttagcatcatgccatgatctgttgatttctgaattggatgcgccaatgtatggttgttgccttgagatttgtttctgagttctcacctagtatttgtaattcttaagaccattcaatgatttccgagttgaatgcatgggtgctttcctttgaggtatgtttctgctatcaagtattttttaaactgttgcaacattcagtgattcccaattgggtgcaccaatgcatgtttgatgcctatactaacagcaattgacctattcctaaaagtatttcgtagagaggcaaaactgctctggcaagaacgatgaaaattcctatgctttatgaactttggttaagtatgacaccttttctcttaggtgatcaaattaaaggagaggaataataagaagagcagcttgtattgtgccacaaacgatgacagaacctgaaataaattattcaggagttccaagccaaccaacgggaagcaaaggttcccaatcgaaaaaagacttcaaagtggcctttccaaacataaataaaagttccaggaatttgagaaaataaggatcccacaggggaggaataatttttggtggcgcagcaccttgaacgtatatacaatataattactttgaacatttgctgccgtatgatctcttttctatatgcagccgtgagcaacaaaattagaagctccaacttgctgttgtttcatatacataatagattggcagtctctgataggtcagtcatggttgcttgaacttgatgggaacacacaaagtgttgcacttgatgttttaagtatgcaacttgcatgcttaattaagacttgaaagatatatttagcccattataactttgttgctgccaaagtgtgggttgtcgagtattatctgttagatttattacaagtggatcaacttgtctattaaacttacattatttagcacacattttgctgggataactgatcatggtaatgagcagatgttttcatgactggatcctcagtccttggtaacatttggtaaaaaaagaaatgatagttcgctttcctggcaaaataagttgaggatgatcatggtggtaagaaggatgattttacataaaagcattatcctgatacatgtcaggttggcacagatttctcttagacctacatattcccatggtatcaattttttattactaatctcactctatacagtgtctattaggcagaagaagcttagatgtttctaagaatcaaactgaactgggaaaaggtgttccctttggctaggattaataaagtactaagattttgagacatccaaatcctaaacaattggctggggattgctgttatcaccacccgggtcctcccatcacttaactcctccaaaagtacctttcttgaactaaattaatgaaacaatctgcatatataaagaagggagctgctcaggtggtgaaccatcttacctgtgacttagtgagtaacctctgagttcttctcttccaatctccagctctattttgcttgttagcttcatggccatttcgtcgaaaaatgttgctgtgttcaagttgcttctgagtgtcatctttttcatgcagcactctgtgccagttcatgcaaggaagctggtagtgagggcacctatgatctgcatgcatcctccatgcacacggaggaatgccctggaggtgccagctgaacaagttgattcaaccactccaggccatagccctagcattggccataacactcctcccaactgagatgatctgatgctgctactgtgtcccagcctgaaatttgtaactcgggtctgtgaaaactcgggtctatgaaactcatatggtgtttcctggagcttctatgcatttgttcagaaaaggcgtaaagcatgcgactgaagaagctcgcgaagattttgttttccttttttcttttgttccccaagacttgtgcatgcctgcctgcatgctttcttttgttacctgtgtgaaaaacttttcctcaccttgtcttagaggagatctacagatctgtagcctgtaacagtgtgtctgttgaaaattttaactctccatatgttatgaacttgagaatggatgttgtaaggcgaggttaatcggctattttcttcaaaattttactagtacaatattgtaaactttaaagaggtacaccatgagtggtcctttggttttctacatatcctttgttgagcatgtaatttcgtccatatatacatcaagtttgtgtaaattgatcaggatttttaaagtcaaaattaatttaattaccttcaaatgagactgaacaggaccatgtttttcttcagaatggtgtaggacagcggtaacattttttcttaccctttgttgaaagataaattaacgcttggggtgtacaattgtataatgctgatactattacttgacaagtttatggcacccctggagctctaatctaacatgtcatctcattgttgtgtctgttttcttctggcaaagtgtggtatttttcttacaaagtttgatatgtgtagaacagttttgttatactgggtactaaaaagaaaataattttcctttgttcttcacttgtttgctacataatactactaagcaacactggccccttaatttttttgatcatttagtatgaggcaaaagaatgcagtggcagtagaactagcactgtgatgttagtaaaatattaagccaacaaatggtgcacaaatcactttctggtccagttcataaacaaatcacagtgtcctaggtagtactccatgctaatgcatctccttttgaaaaaaaaaagaagcatcattgttgcaaagaatgaccaacaacaggtagtgactgagaaagatatttccgaattaaggcatgtgtgggaactgagaactgataggttatttttaacacatcttctttattttattttttttttttcttgattgatagagaatctgcatcagccatcttcagcaaacataatgcagtttgttggtatggaaatagtgtgagatatcctatgcaagttataaaccagtttctttctcttgccattggagagaaatttcatcttgagctgtcacttcaatttatggctcccctcagacactgattctcaatctattacattatcaaaacagagggaaaacaagcgtttaccttttgctttcatgccctataaatttccatgtgaataaaagaaaagaaataattccgaattattgattgtagtgcgggtccatattataactgtctagattagaaaaagaatccacatcaaatacagttcaaatgataattgaaatttggaatagaatgaaggaacttcagaatataaaatgaaataaaaaacaaccgatataaaagaaacttcacaataaatactaaatagtacttcttccatttttaaatatataacgttgttgaaatctggacatttgatcattagtctcaaaaaaataagtatatttattttattttactatgacctttatcatttaatgcactttaagcatgtcctatattttttatatttgcatatatttttttaaatagtacgaacaatcaaacgtatgtccaaaactcaacagcgtcacgtattaaaaacggagctagtaataaaataatctatctactttagaaattcccaaaaactgatggttcgtgcaattgccaagtgtcagactccagtgacgccgttcagaagaacaaagagtaatctttcagtaacccatagttaattgaaacactttatccggccgaggtatgagcattttcacagcgttgtcgatgtctctctggctgctggtgaatcaatgatgaatcatggtcaaaccgacgacaatacaagagctgggcatctgcaggtacagattagtgcatctcctttacaacaaagaaaacctcagtgtttttccttaacttgaccagcagcagctagtgcctgacaaagctgtttcctaacttgggtatgtgactaagcagtgataagatatctgaaaaaaataataagtagggtgattatattaattattcttaacaccttcactactaaccttttgttttttggtggtgatcaggtcactgcaattaagcaagtgatcaattgatcaaatcatcactagctaccctgcattctccaagataatcaatacagcttcagtgtggcaacaaattaaagctgctttgttctcttttgcagatcaatatctgtgcgcatgcttagttcatcacgaataaatataaaaaccatcacgcataaatataaaatcattcatctgttggtattgggctacgtggttgaatcgagtgcttattattttctgctaagttgtatttctgtgattgtggatacttagtgcaattgtgcagctatctgatcaaacttttctctctttttttaaacttggagtctttgagaattcagatatttgcctcccatctcaattgataagtacgaggtgtatacagcttgattgcctcaccggctgtcaggtggtttaattatctgtgggctttccactttgtgttggaaaagtggtgatatattatccatcatttgtatatatagatggatgaatacttgcaggttagcatgactagtttaatgacaccatcagtgttggacagtggatctcatgttcttgctatcctctatgtgcatcatgccatcatgcttcagaattttatctcatttgttgtgagaaaagataattaagtttcaggtcaggcatctcgctcaacgaaatttaatgcaaattcagatggaactgtcttaaatcttaactaatgtatcccaaaaccatttatgaaaatgaaataaacctcctatttggctgagccgctaatcagtttggaatttcagaatgcttactaagtagctcatcagttccatgcctgttttgccttctcttcaacgaattgcagagccgggacagtaaatagcttgcaaattgcaccaaacatgcaaattttgaagcatattaaacatattaatttacataaattgtacccttcttcatgaaatacagcgatgattccttgttgattgagctctgaatgatagataattcactcaattccctcatggctacgcaacagaaggcatcaaaagtaacgctgattgcatcatctatcaccaagtagcagtagtactctgctttgctgacaccatgtacagatgtactcgctccctcacctacatcatcttcagagtttaatgtagttgacagaaaaaaaaaggcttaagtcatccaggcatcacagaaacgccattcacattttttttttgaaaggaaattaagcaccagggtgataaatttccaacctgaacgtcattttttgttgttctttcagatatttcaaccgtttacatatcatcttagttatttgctgtatctgttctgtcaaacttatctctagtttggaattcaggatgctaattatcccagttcatgatttcaagtagatggtgataccatgggtgttctaagaaaaaatgagtttgttctgggacatttgacgtttgaaagttgcagtggttactgccaaaatgagttacttccaatcttgaatgctgacgctactccctccagccaaaacagaagtgccgtcatatagcttgaatatatcaacagtatcatatgaataatcatattagccatagaaaaccatacaaatatgattaatttacagttcgagattgtgtcttgaagaccatatgtagatgtgaagaacagcactcccattatctaaaaaaaaaatgtgaagaacagcactcgttttgctagtatttgcaatttcagggttcaacaagtaagcaatatataccaacattttacagagaactttctacctcttcttggatgaaaaacgcaaaatatcaaatgatcattgaagaaaaactagtaacgtggagcatttggtcaagtagcaagatgatcattgacaaatctctgttccgaaacactagcctccgatcaagaacacatgacgagtgtgcatatatctatcttaatttctcaacccgtggctgctacctactccattgatacatttgatcactcgcataagatgaattgaattctttgcatgacatcaaatcatcaattcgatggctccagtgggcagatcagctttttgagctttgaccatggtgctcattgccggcgaggtcgtaagcctccttcgccgagcgaatgcaagaatccaagaacgaatttattgcagctagaggctcgcggcaatctccctttttaaggggctcatcagctgcggattcttgcacaacacatcgaatttgcattcgcattagcattcgcatcatcgcttgttgcctcagagagaagagagaaagaaagctcgagctctcggctcccatggcggcggcggcgtcatacgcgcacctcgtcctcgctgccaccctcgcgttcctggtgctgagctcgccgccgcagtcagcggcgagccgcgtcgacgtcttgaaggaagtagtagcaggcgagccaccagctgcggccatcgaaccagttgtcaacgatccgtcgtcgtcgccgccgccggcggtggcggcggtggtccacacgtcggagccatggccgccggtgcctccgtcggccccgtcaaacaagttcaactagctcaccagccgctaccaccaggatgtccggtcgctgtgattcggcggacgtcgccggagacgatggccggacagtcaccgtcatttcttgattcagataaaatcataaaaagcttgcatttgagcaagccgtataggtgtttgtgcgaggagtgcttctatgctctactggagagaaaaatcttcagattttagggggcgtctaggcttctagctggttgtgattaaactctgagttcgtcgagaaatctgtaaatcagtttcattttcagttgataatggaagcattttcttgctctctgattctgccttttcttcagttcttaccaaaatttgatactttgattcatctctgtgaagtacttgcattgttgataattgatgtggaagatttttgaaacctcatgtgctcttggagaggagatgaacaagtacatccataattttcagatacagccatctagtttaggtgcaaacattaattacagatacattcatggcgcacgtcaaacgtagcaaaggaaataagaacaaaaaaaataaaaatacagatcttgataaaattaaccggacagattgatggacaacggcatggtataattgggtatcaagagaaaatatcacggttgatgaagtatatatggctatggcgtgcaagtggaggaaggggcatccaatcctgcttccagacacccataaaaatacaatcaacaatatgtagggtgccatcctttggcatattggtgaaataagccaaacggcatatttgcaaacgaaaaataattcgtgaataaaacttttatatgtgtgttcttagcaatctaaaagcaaatgctggaaaataaacttcgatgaaaaaaccccaaaattagctttaaatttaacgttgaaaattcaaattttggctgataagcatatgaataatcgtgacatgtacccacaacccctttgtcccctagcagtccacccctcctccctctcgtttttctttttattttcttttgtaatctcctagccttgggttattgtacagttttttcccctactttaatacaaatacatcccacggggttaaaaaaaatgaaaatatcacggtaagtgatgctttggtaagacaacagcattcagatatgcatatactatgaactcttaatgaaaatataggttagtttaacattcaagaatgtttaccctgacccagccaacggttgggaaacaactacaaacaaaagactgcctaaaatgtcaaaacctaaaaggtacaaaactatatagcataaatatattataaaccgttagggttcgaccagctagaacaccatagccataaataagaagctacgccatgtcatgtgtcaatgtttgatgtctcgactacggtatttggacagtatggggatcgtcggtgctaggatatacgcgagactgaggaaaaagagatggagacagggatttttatacaggttcgggcccctgagctatcaggtaatagccctacatcctgttggctggagccgatgttgctttttattcaccataatcacaccagtacaatatgtggggtagcctatctaactgttgtcgacatggcggtctgaaggtctgactcatagtcgacaacagggtagccttcctcctcgagctcacgcccgacggaatcagagacagtgctagatccctacggccagcctctaaaggtaccggatagggtcgatccaggcgtatctctgatgtcgatattcggcggcttgtcttggcgtatgtaggcttgtatgttgtggcttctggtgggtgttgattgtctcttcatggtgagtgtcgatcgtgttgatcgtcttatatcatgggtgtcttccatggtggttctccctggtgggtgtcgatcccccatggtgggtgtgtccccctgtcctcctaggggggcttgtatttatacccataggtgtccccttgtccaagtagaactagggaaaccaatatggatacaatccgagtagtccttgtcgtttccatgtagaactctggttgtctttccttatccggaactccctccatatccgaaggttgtttccgtataggacatggtatgtggtgggtcctgccgagatttagtcaactactattaggtatgtggtatccataaccatgacagtagcccctgacttcgatgcaaatgaacgaattcatattctcaaccacgcgcagacattggagtaactgttatcgagctcatgtgatcgttctcggtaagtttagagataatgttggacttcctttgtcagcctcgtgcgggcaccgaaagggtttgtctaagtcaatctctaatgtcgaccgagaaagtacagagcgtacgactaagtctcccgtcttgctgtaatcgagaatttggattgaagtcaagaaactttatctcggcgggtacaccatctcttcattccgtattccttgtcaagatccagcaaccgttctcgagcgatcgagaaggcgtagagtctgcgaaggagctttgtcaacatttgtcgtactcgccttagtcgatcttggtgtagaaccatagagacatggagtcttcgtcaatgtcgaatagaattttcctgaaatcaatactcagaaaagaatatcaaatagaaatagcccccgagcgaatgcccaaagggtgacatgttataatatgtatggtaaattgaaaatgaattaaatttatcgaccaatgttttgtgtatgagcgtcttctctcttaccgacttcgatcagttagtttgtagagtcatacactctccctagcccccagccttatcgtcggagaatcgttctcagaggataatgctcttggacccttgacctgccttggttgaataagcactgatcctagcccccagccgtgaagttggaaagctcagtttctgattacacggcttggttaatacgcacggcgagaactcttacacgaccagatcttacatggtcttttgtctctacaggatccgacaaggccttatcggctctgggcgtccccagccaaagttcccttaggttcctcggaggtcttgtcaagacggcgtaaagggacagtaggataggtttcaacgctaggtgtcgtcgtggtaagggatctctgggtaaaacacttggcgatattgtgtacctgctatcaactttgttgaaatagaggtagtaggagagtcgctacaccgctggtcgaggaccaggtagtagtcgtaactcgaccacttaaagtggaaatagtgggagaaacactacatcgctggtcgaggaccaggcagtagtcgtaactcgaccacttaaagtggaagtagtgggagagacgctacatcgctggtcgaggaccaggcagtagtcgtaactcgaccacttaaagtggaagtaatgggagagatgctacatcgctggtcgaggaccagacagtagttgtaactcgaccacttgaagtggaaatagtgggagaaatgctacatcgctggtcgaggaccaggcagtagtcgtgactcgaccactcaaagtagaagtagtgagagaaatgctacatcgctggtcgaggaccagacagtagtcgtaactcgaccacttaaagcaaatgtacgagagatcactacgatcaactggttgagaaccggtgagtaggtgtccctcgatcatttggagtcgtggtacgaggaccgctacgctgccggtcgaagaccagttgtagctgttcctcaaccatctgaagtcatggtgcgaggaccgctacgctgccgtagtcgtacctcgaccatctgaagttaaggtgcgagagattgctacgtattggtgcgagaaccagtgagcgagcagaattatctctcgaacactaatggaagttgcggtgcgagagattgctacgtactggtgcaagaaccagtgagcgagcagaattatctctcgaacaccaatggaagttgcggtgctagagttggtttattgcaatttgtatctcatgtggccagtatgactcacgtacccaacttatagcatatccggatgtccgttcgcaatcatgtcgagtgatcaagccaacgacgttcacgagagattatccgttaacaaccttttctcgagtagtccagccatggccggtgctatgagataggtcgtcggtctttattggtaggttgggtgcgataattccgcatttgtcgagaatgttctcgataatggagtgtactcgaccataacctactcgagtgctcaattgttcctgaaaaatattttctagaaggcaagacatatagcagagaatatcgagtatgtactcaaaaactgcgtggatcttctagtattatcaggatataacgagcagatgtaaatagcaagcattatgtaaaccgtaaacaagcatgatttatacagaagaaaatagagcgagcccccagcgttagaccgtagttggcctaacatcggaagcactcgcacaacagatattgtataaaaaatatgctctaggtaaacataataaattatagatctgacaatgatgtatgatctgaataggtatgataaattgcagataaaatattgcgtacctttgtagatacatgccggatgtatctatgaaattagtagaacaatttgaaaaaccaatctaccaattaccttattgcgtactcattcgacatcatatgatctgacatcttttggtacgccgcgtatcttgaggcttggatgatctcgatagaccgagttgtcgatgacgatgatggttccgatctggtcggaagatgtacttcagtcgggttagatcttctcacagccgaagtcgtcgagtagcttgttgttggagaatccatctcttgaacccatctcgtcgaaatactgaagcaccaaaatccccctacctggcgtgccactgtcgacgtttgatgtctcgactacggtatttggacagtatgaggatcgtcggtgctaggatatacgcgagactgaggaaaaagagatggagacagggatttttatacaggttcgggcccctgagctatcaggtaatagccctacatcctgttggccggagccgatgttgctttttattcaccataatcacaccagtacaatatgtggggtagcctatctaactgttgtcgacatggcggtctgaaggtctgactcatagtcgacaacagggtagccttcctcctcgagctcgcgcccgacggaatcagagacagtgctagatccctacggccggcctctaaaggtaccggatagggtcgatccaggcgtatctctgatgtcgatatccggcggcttgtcttggcgtatgtaggcttgtatgttgtggcttctggtgggtgttgattgtctcttcatggtgagtgtcgatcgtgttgatcgtcttatatcatgggtgtctcccatggtggttctccctagtg

SEQ ID NO: 10343 - DNA, 4330 bp, Oryza sativa
  unsure (1)..(4330): unsure at all n locations
gccgtcccgctcggggagggatccgtccctggcttcgtccacgacgccggcaacatcaccgtcatcaaggccaccgtctccgcctccgccctcggcgtcgaccccaccaccgccgccaccgacatcaagaagtccggcgagttcaccatcaccctcgacctcgagaccaaggccggcgtcaaggtcggcggcctcaagaccaagaaaatcggcgtgctcgtccactgcgagggcatcaaggtggccgccccggcgccgccgccgccgccggcgaagaagaagaagggcggcgtcaagctctccgtctccgacgcgccgtctcccgccgcgtccgtcgacgacaccaccccctcgccgccgccggcgaccaccgtcgcgcgcgtgtgccaggtcaggatccgagtcaagatctggaagtggaccttctagtgacgtcgcccaaatcctaggggccgcattgcaaaattttcggggggcaaaaagaaaaggtgctttacttctttntttttttcttcttcttacgttggagtgtagtagaaattcagaccaaaatcaaccgtcggatgctgtaaaaaaatggtttctgtttgaatttgacgaaatttggctggggggagggaagaagcgaccacgccgacaagtgatgcgagggaggagtcttctttggagtgtgaggcttgatttttttactttttgtaatatcttggtgttagtgcaagtacaatttggggatttgttatttttagtaaatttgtactccaaatttatctgaatgtggcatcgcacgagtaacataatattcccagatactctttctttgaattacttttttactttttaaaaaatgtgtaaatgagatgagagagaggggtgtcggtgaggctccatgctagtagctgagtttgactgaattttgtacgcaagggaaaggtgtgagatattaaattcatgtgtagccttttcatgtgaagcaagcacaaatgtagagcacaaatgcggaggtgccggctgcagctgtgcaatgaattgcgtgacatttttaattccgggcgttacgtgacttgtgaagaattagtgggtcactagtcataacagtggcagtagtgtagtagcaaccgttaggcttaattgtgtagtactagaaaattaagagtttgatgtaaactaatcagtactggtacttaaatagagtaggtgttgagctgagcaagcatacagtcagatatatgagtatgcaacaacattaattaagctttaatatatgacaaatatttcactagctttatcatgaaaattgctttcatgtttaacattttcttggtactactcatatataagtggtactgtggtagagaaacaatgatcaaaacatagaattgctcatatgtagttttaatatatgaaaatgaatcggagcatagtttgtggtaatgagtgaggagacgattgtttaccgggattggtgaggccttaacataaaggtcaacacaatcattaaagcgggttgcatcttttcccaacacgtcaaagtgacaaaagaagccatgttgtagcaagcacagtaccgaagtacttcatccggtttattttaaacgcaatctacaactttgatcattcatcttatttaaaattttttataattagtatttttattattactaaataataaaacataaataatattttatacctgatttatgtttgtttttaaaaataaaacagacgattaaagttggacatagaaatttatgactgcgtttaaaatgggacggagggagtactttgctgtttactctaacacaatcgacaagaagccactaattaattgtgtcagtcgtgtgagatgagaaatgaagtagatgagatgccaaaccgtagaccaaccgcaacgagggatcctcggccgtgtgtctgattctctcaaggacgaaacgctagcttcttgacagcctacttgtaatttgacagcagacactccacctgtctttgctaacactgatcgtgcatactagtcgagtgataagcaattcacctctcagagatactgtagtaattatggttgtaaacgtgagatacctgtacttgtctgctgtatcggtgcaagccatttccgaccttatcgaagtttcatgctaagttgtaactaccgtgtcatgcaatgaagaaactcattatctgaaaacaaaaaatcatgaagtgaagaaaatcgtaactgcgtgtttcgtcctgaccatatgggcttattcatggtttgtagacaggcccaaatggtattgggggtaagaggccttgtgtaggcgaaggtttgtgattggtgttgatcaggccagcggcccagctactctcggtaccgtagagacaaggaatgaaagaaggaaacaacctgttttttggttttttgtatgccgtatacgtgacgtggagcgcatatatcggtgtaccagaagaaactacgagcattgttcagattgttgccacatttaacactatcaagctgtgtttagttccacatcaaaattagaagtttaactaaaattagaagttcaaagaaaaaagttgaaagtttatgtatgcaggtaagttttgatatgatggaaaagttaaaagtttaaaaaaaaatagaaaactaaactcggcgcaaactttcgtcaatgttataattggatagggtatcaaatcaaacatactttagccaatattttcttaccaacatttagtaatttcagaaacttctactattaaaaaactatcgaaacttaggcctcgtttagcttgcgaaaagaaaatttttgggtgtcacatcggacgtttgaccggtatcgaaagaggttttaggacacaaataaagaaactaattttataactcgcctagaaaccgcgagacgaatttattaagcccgattaatctgttattagcaaatcaaatgtaggttactgtagcactttgtagctaattatggactaattaggctcaaaaagttcatctcgcgatttccatacaaactgtgtaattagttttttttttaaaatctatatttaatgctctatgcttgtgtcaaagattcgacgtgacgtttttagaaaaaaaaatatgaacgaaacaaggtattagcaaggcatcaaaccaaatgcttccaaccttatcaaaatgtgacactaaaattagacgacaatcagaacaagccctacagctccggtcacggtgtgcctcgggacaggaacgacgtagtagtacgatctactgtatactccaatatatcggcagaaacaaacaacgccgaaacccctgctttttttactgcccccaacgtcacgcacttttctctcgcaacagcggcgcgcgccttgtgctacacgacgcgcctcgcttccgccacaagcaaaccacacccccacccacccaacccaagcgcccaagccacacacactgacacgaaccggaccacgaccacgacccgagcccgagcgtgagacctggtcagtcaacgagtcaaccgccttttctctttcccctttcccttctcatctcctcctagcggccaaaaaacccgcgccttcccgaagcgcgctaccaccactacgcggcgagggggggcccccggtcccacgcggcgccacgtggcgtcacgcctgacgcctcggcacggacggatgcgcggcacgacgcgccgcgccgcgccgtcgccatactctccgcatccgacggtggtgggtggttacatatacgtgccctccccccgcctacgtgtccggctcaaaccaaccaccagtccactactccactctcttctccacttggcggcgccgcggcggtggcggctcgatcgatggaggcggaggaggccgccggcggcggcgagcggaagcggaagagggacggggatgcggtgcgggatgaccaggaggaggaggaggagggggtgtatgagggcattgcggaggagtcggtggcggagctgatgcggtggctggagatggagatctcggatgcggcgccggagacggagaccaagacggagacggagtccggcgacgatcctgccggcgccgccgctccggggttcgtcaccatcaacggcaacgaggagagctgcgggccgtccttctccgccgcggcgtcgacggtcatggcctccgtcgacacccgcgccggcgcgccgcccgcaccgcccgtcccctggcccctccctccggcggcggacgtggtaccggccgaggtcgtcgtcgacggcgtgggggaggagtggctggtcgagctactgacaagtgggcccgcggtggcctagggagtcgtggcgtacgtacgcgtgtttttccttttgccgttttg

SEQ ID NO: 10344 - DNA, 4042 bp, Oryza sativa
  unsure (1)..(4042): unsure at all n locations
aagtgggtgcgggagatgaggcgcacgcgcgggcgtggctgacgtggcccggaggaggcggaggcgtggacgcggcggcggttgcgggcgcggcggcgccgactggaggaaggagacgggcccaacaggtggggcccacctgtcggcgtcccggggagagagggagggcggcttgggccggcccacaaggagaagggcgcgcgcggcggggtggtgtcacgccccgaactagtcccgaccggaactagcccgtgacgctccaaattaacctgttaatcgataccagtcccaggaaacagtgctggtatcacagggagacagaatatcacagcaacagaggtctctttattatagagtagatgtacagtcatgttgggctgcggacagatcccgagctcacaactgcattacaaaaggaaagcggaagccaggacttggaccaatcaacacaggcgcgacttgggaactaggccgaaaccctaaaactcattgtagccggcttgctcctggaagaactcctcatcagcaggacccgcttcatcttcttcagcaactagggggggattatttatatagtgcaagggtgagtacgggagtactcagcaagccatgggaagtaagtgtttaatgcaggcttcaaggaaaggctgatgtttctgcaattaattttatttgaactcttttctgaaacaactaagtgagtgcttctcaaacgacacggatgagacagtgcgtctcgtccggtcggagtatgtgcaatgtatcagtctttagaatttaaacaaggttggcacccggccaacagctttttcaacggccacccggctaacaacttttcaaacggccacccaggccaacaacttttcaaacggccacccgggcctagctgatcccatcagctgcagatttttcaaacaccgaaccccttttcacacagcaatttcacaagcagtagtcaaacaaaactacgctaggaatcacctcacatccgcccgtgaccgtgggcacggctgttcgaacagtttaatgacctctgaagagggggtacgctttacccacacgacattactaacccgggtcacccagcccgtggggatcagccacgtcgggagacctccaagctttcatgacaaggcatttcgaaagccgatacaggtttaccatatgccgacgagaggggtcccagaccaacaacaggttaggtcccagaccatactgtgccaggaagcccaggggtcctccccgacaccaccccggcgaatccacatgtctctcggcatcaaggctcccctgataagctagttactcagccaggggtgtcccattccacccatgtggtcgtacttgtcttatgtttggatgaaattccaaggaatcggtccttaagtgcgagagcgggaaaccgtacacccggtatgttccccggtccgcggttttggaaattcatttagttcgcaagcaccgacccaggtgtcgggttttccaagtcttttgtaaaactccagttttacccaagttgttactcagattttaagtttgaaggcgaccgtcgatactggcacagggtgcacgaatatcgaggcacaactggatggttacaaggggacatggtatagcaattaacaatggaaggatcaaatgcaacaagttaggtaggtctgccaatctgccttgcagacggaacaacagattaagtgcaatcctatcaatgcataatattttgcaagcaatataattagatttcaaatataggctcaagatgttcaaaggtggcttgccttgctcgagatctggggcttgatcctcgaaatcctcgcactgcgggtcttcgggctccgaaactacacgcaaaacgggacaactcaacaaacggcgaaaataaagccctattaatgacctctaagcgtgccattagatagatctcgagatttgagaaattttggaatttgaacggagtcaaacggatttacggttggaaagatattgaatttctaagattattggatttttggtctaaaggaaaaggatttaattaaatcctttttttttgaaaagaaaagaaaagaaaaggggagagggagggaatatagacttccctcgggcggctagggcgcggcccgagagaaagggcggctcggccgagcttaacgggccggccggcccaagaaggtggcccagagcggcccaagacgcgcgcgcgcgggagggaggagagagagagccggtggaccgggctcaccatgcgcggccccgggtgggacccgcttgtcagcggctcggctcaccgtgcggagggagtacgcggctcatgcgcgcgagcgggggagggacgcggtgcacgcgcgcttttcgcggtggacgcggatgcagcgggcccacgcgcagcctcacggctcgcggtggaacgcgcgcacggggagggactgaccggggtcggctcgacccggtctaggctgagctggcgccgacgtggcgcctacgtggctgccacgcgggccggcgggaggtagacgacgacccggccgcgaatggacggcgggcggcggccgcgaatggacggcggccgggcggcggagcgaaccacggcgatacgggcaaaagctagcacaccgggcagttgttcgtgatgaggggagacgagccaacggttcggattcgccagagggagttcgacggcggcgaatcgcggcggcgacaaccggcggggagggaagagggaaacgccgacgaggtcacgagggaccgattcccggcggtgagagcatctacgcggtttcgggaactcgatgctagcgtcggattggacggagctacaccgagcaaggctggcgacgtgtgggtgctacggagctcgagcggcgacggcggcgagcacacggcgagcgacggcaacggtcggggcggcgccggctaactacggggagtctactcgagctactaccgaaagctagggggaggagatggagcgaggaggaagaacggagggaggcatcacgaggtgaggaggggcgctgtgacgagaggccgacggcgcgggagggatctctccggcatcgggccggttaagaggaggaagacgagcgcccggagtccccttccgcgtcctagtgcgcaccggctcctccggcacacacgcgacggctgcggtcggcgagagggacggcaatggcgcgggcgagaaacagggaagaatgggagaaaagggaagggagggcgcttgggtttatagggggcggcaatgtcggtttggaaaccgactttggcggtcaaggcacgagctgtcgctccggctagcggccaaaacggcgacaggagggagggaggatgacgccggcgggaggaaaaggggaaaaaggagggagagaaaggggggctcgcccctttcttctttgggaaaaggggaaggggagcgggggcgtcgaggcagagggaggagggctcggcctccgtcccttggcggcttgcgcgcggagtggcggggccgaggcgatgacgacggcgatgacggcggggcggtttggagcggcgcgacgacacgggcgataggcgcgggctggcgcggtagagggtgacgggggccgcgaccagattggggcgtactcggcacgcgcgcgcggcttgaatgggagggcgcancggatggagaggcgcggctcgagcacgcgcgctggctgcggggccgagcggctgcangcgcggcagggcancggggccgggcggcgaccacgcggtgcgggcgaggaccacgtgggcgcgcgcgcgaacaacagcgcgcgggggccggctttgcgagccgggagctcgccagggagaggagaaggaaagcgaggggaggaggcgctcggcgcggtgactcacgcgcacgcgcgcggacagagcggaggaggaggagcgctcggcgcggctcccacgcacgcgcgcgcggcgcgcgggcggagcggagcggagctgagggagaggggagagggagcgcgccgggaaggggagggggcgagagagagcgagagagagggagagagagcgggagcgcgccgggggagag

SEQ ID NO: 10345 - DNA, 1832 bp, Oryza sativa
tattattgaaacagatgcatcgcagcagggttggttcctgtattaaaacaaagacctgctaaatactcatctaaatcagaggaaaagatatataggtatgcctctggaagaccatacagatcgagaaacctagaaatatcaacgcgataatgcttttaggttatatctagggtttaaagagtttacggttagaacggactgtgaggtgatacgtagatattataatcagcttaatagcaagaagaattctactaggaggtggatcttatttgaacaaatcattactggaaatgactataaagttgtatttgagcatattaaggggaaagataacaatttgcctgatctactttctcgtttacctattttgcaggtatgaagaaatctatgaattataatggagttgaattcttcacttttggggaagataataaactcagaatattcccaccaaactcttataaatttaaaccaaaggaccatataatcatatatgaagtgcaagaatgtattctggacaatttttggtatcaatataataatatgaagggctatatcctatcaatattaaatagtcttgctgaatattttcatttgataaatgaattaatgccagttgcaaaaaatattgaagccatacagcaaaagcccatttatgtggtttttgaaggaagagtaccaggcgtctatatatcctttgaagagataatatctcaaaaaatagacgcaaagctaacagtaggaatatcatggaagaaatataaagacattgaagaaccattaggacaagctaggaaaatattgggaataaattattatctagagccagcggcaaaggaatatattcaaaagtgcaagaggctagaaacaagaaaaatccagagcccccacattatacaaatataaaggaagaagggtcatccagaaaattgacatataaagaatgcttaacaaagggattagaccccttagatagtgaatatattgatttaaagataaatgaaaaaattgcagaagtctcgactcagtgaaagaaagatttaaaggaagaaattttcaaagaattaaagcaagaattaaatgaaaattttgaagctctgaagaaagcatatgatgagaaatttgaaatagccttttctgatgatgacactatggatatcggtggtcatgggcaaccagacgaatagttattatatataaagacctcattgataaggtattatcaattatacgggcatggtagaccatatatctatatctgttgaaaataaaaataagattacaaaggtctgtcgttatatcattttcttcaagagaagacgttcaaaattttgtggagaatattccaaagttcaataattaccaaagagcatcaaatatggtaaatattctctcatataatctaaactagcatgaatgcagaagacaacaagtcacaatatgctaaaggtaaaaatccaacttctcgggaataaacagagcactcgtgatcagaagaagacatataactctctgaagaacccatgatgccacagtatgataaaaaaatatatgagtgaagattgagctccctctccggcttctataaaaggggaagttggtgaaacagaaggataccaagaggcagcaaccctcagccagagtctcagaagccactctctaagctttagtagtagaaatttattaagagttcgccttgctagtatattgaagcaaggagtgcaatataaattgtgtaaggtaagcaaaccttgtttgtatcatcatccctcggggttcccgaaaaggaaaaccatatgtattctattttgtggtaatatagtagttttatt

SEQ ID NO: 10346 - DNA, 2962 bp, Oryza sativa
tcggcggtgacgtacgagtacctgcagtcggtggcggacctgatggtggtcgccgggcggccgctgttcgcgctgtcgcggacgtacatcgtctccgacgtgagccacgccgggttcaagagcgtcgacttcgggtggggggaggccgtctacggcggtccggcgaagggcggcgaagggccgctcctcggcgtcaccaactacttctcgaggtccaagaatggcaagggcgagcagagcgtcgtcgtgcccatctgcttgcccaaggacgccatggacaagttccagctcgaggtccaagctctcaccgccgagctcagctagaccattgaaacgcagcatgtgtgttctactgttacttttttttttttttgcccaagtgtgttctactgctcttgttttttcttggttcagaatgtacttatacctgtcggtgtctgataaaaattgcactgactatgtactactaatgacgatgtcctatcgtgttcaaaaaatatactctgtctgtcccaaaatataaatatttttagtataatgataaattaaatatttttaactttaactattaatataaaaaattaattatataaaattgatgttactaaatttatcattaaataaactattataatatataactctttttatttaaaatatttttcttttatagatattgttggttaaaataatatctcggagattgtgttagagtcaaaatgtttatatttttagaacggatcgtatctctctacatttctccagtccggtcatcgtacagcggagagttcctgtggaacgtgatccgagtctgctacagtaactaagcacaatttatggctacagcctacagtatcagtgtgatctggatcgttagactgtgatcgtgtggtttggtatcattgttcatccactgcgttagtacctctaatgcagaggatctaagttgatattttttttcagttctgtgaaagtgtgtggtactaaattatctgaatcagaactggtgatctctcgattgaatgcattagtctagttgtctctcattgctttgcttattggcttatcaacaataatcagcatttataaattttgaaaattttaattttagaagagacttacctttgtggtttgtttcgttctagtctatttctagcttggctgcaccgtagataatacggatataaaaagttgacctataaattatttttattcgttttttttccgtggcttatccgcacgactgctcctctttttaagcagaggcgaacatcaactttgttacaatcctaagataatttatattttttaatagaacttcaaacagatttttacttgctcttaggacccttttaaatagtaggaattaaaaaaaatagagaaaatagagaagtgtaaaagacaacaaaacatagaaatgaccgtttgtttagaccgtaaaacaaaataatacaagaatcggataagagagatagactccggattgtctattcctattccgcatgaatttcaaaggatagaatataatagaatcatttgtttctaatatgatagaatatatttttttctacaattcaagagggccttcgcagttagcaatcataaaaatagaattgaacaacaaatgtgacaaagcaacagttgggtcctttgaatcgtagaaatgaaaaaacagatgaatagagaaaacacaggattctgacaggaatacaattgtaaaacagaggaatgtaaaatacaggaaaaacacaggaatggccatttgattagaccacaggaaaaacgcagaaatcagatgagagagatagattcagaggaaatgttccaagaggttagacctcttgctaactttcctccaaaatgtgtataggattacccattccatataaattttaaaggattggataggatccaatcctttatttcaaaaacctttataggattttttttccataggattgaaatcctctaaaattcctacatttttcctacacatcaatggagccctaaaattaattcaaaaaaattaaaaaaattgtaatcacctccaaattaccactactactataatataaaccgtgtcaagcaggcaagatcctcgttccgtgtaccgaggatgcaagtgcaacaagatggatttaaagtacagatcccgtggaactttccgaggtgctctctggtgaatctatatcttctcatttctccttcatggtttcccgtttagttgcccaaattttttttcccaaaaacatcatatcgaatctttagatacatacatgaagtattaaatatagataaataaaaaaaactaattgcacagttagagaggaaattgcgagacgaatcttttgagttttttgagtttaattagtccatgattaaccataagtgctacagtaacccatatatgctaatgacgggttaattaggctcaaaagattcgtctcgcggtttccagacaagttatgaaattagtttttttattcgtgtccgaaaaatccttccgatattcgatcaaacattcgatgtaacacacaatttttttttcgcgaactaaacaggccacgtgaatgtggaacaggtgcgtcaaccagccagctattaaatggggattctctctgtacagtacaacaaagaatctgttgaaacatgattatgaataagctgtttgtattttaacccagaaataatactgaataaaatttgaccaaagtaggtcaacagatccacagttttttaaaagctcctcgtttaagcatttgcatgaatctgcacaacagcacaaccatgagaagttactgaagaaataatacaaggagtactctacttcacaatactctgacaacaaccttcttgattgctttctttagagatagtttagaacacttatataaaagttctttttcatcgtagtttatttttcagcctttgcttttagatactacctccgtcccaaaataag

SEQ ID NO: 10347 - DNA, 2032 bp, Oryza sativa
aactgagatactctcaaatcattggttcattgatgtacttggctagcgcaacgaggcctgacatctcatttgctgtaagcaagctgagccggtttgtctcaaatccgggagatgatcattggcaggctctggaaagagtaatgcgctatttaaagggcactacgagctatggaattcactataccgggtatccaaaagtactagaagggtatagtgactcaaactggatatctgatgctgatgagataaaagccacaagtggatatgtgttcacacttggaggtggcgctgtttcctggaagtcttgcaagtagaccatcttaacgaggtcaacaatggaagcagaacttacagcactagatactgcgacagttgaggccgagtggcttcgtgaactcctgatggatttgccggtggttgaaaaaccagtgccagctatcctaatgaactgcgataatcaaacagtgattattaaagtgaacagttcaaaggacaacatgaagtcatctagacacatcaagagaagactgaaatctgtcagaaagcagaaaaactccggagtgatagcattggactatgtccaaacggctagaaatctggcagatcagtttaccaaggggctaccacgtaatgtgatagacagtgcatcgagggaaatgggcttgatacccacctaaggttgtataatagtggaaacctgtccattgtgatcggagatcccgtgaatttggatggtgaaacaaactattgtgtgactgagagaagagacccttgaaaggggctcattttcatgatgtgcttatcttctttcctgcatggtaggatggcttatgtattaatgtgatccgagtggcttttccaagcagagatgttgacctgcagaacatctcagaaggaacacacctatatgagttcgactgctagtcacagtctatgaggtttgggcgatctctagatactcatgaaaggcctggagtttgacttatatgctccaaacagaggggatacgaacggcagtccagtaccagtcaaggttctgagtgaaatctgatcacacaaaactcacaattcaaggcatagtccattgttcagttgtggtctgatgtagctcatttcctaggtggaagttcaacttaacagtctccaccaaaaccctggtatatcaaacaggcacaacattgagaacatttcttatgagccttgaaatttggtggggattgttagaataattgggctaggcccaacttataatattaaatctcaaaggcccataataagtgttgaggataataataccacctcaggatttaagcgagaaatatctcaacctaaatagggagttattggaggctccctgttgaccagttgaggcaggggtcggaatgccacacgcgcgcgcgcgctccgggccgtgggcgtgggcgagggcgagggcgagggcgtgggcgtgggcgtgggcgtggctggtgtcacaccctgaagttctcctcctaagcctaaaattgaattaataagagactctaagaaaacaccggtgcaaagcaagagtaaaccctgctaaatcaatgcaaataataatcggaattggcatgtggaatttttcttgagttatacatgtcgaaattcactaacaagatttttagtggaattttcagagctctcaaaataattttaaccatttaaaatcgagcttgcaatattttaaatcccagggaaattcttttcctccttttcttttgttttcctttcccctccttttcctcttcttgggccgtcggcccaatccacctgtagcgcccgttccgtcgtggcgcctaacgggaaaattatctcttaaaaaacctaattgcgaaatttgtttctttgcttgttgtctagtgtccgtgccatctcaagatctcaatccccgatctatcgtcgagttcaaatccaaatccaaatccttccaaatcaaattcctccgcaaaagtctattttgcctcccccgggggtcgatgggccgatttcctcccggcccatctacccctggggg

SEQ ID NO: 10348 - DNA, 10723 bp, Oryza sativa
gccgccctccacctccacagcgggcgcgggcggggctgtacatcacgccgctgccgcggcctcctcagctggccgttgccgcccccacagatcgttgccgccgccccctcagatcggcgccgactcggaccccctccaagcgccgccgccgccgccctccaccacaacgagtgggcgccggcggggcagtgcttgacgccgccgccgccgccccctcagctcgccgccaccgccgcccccttagctagccgccgccgctgcacgcacgagtgagagagaggtgagaccgtgagagtcacgcacgattgagagagagagagagtcaaaatagggtttggagggtattttcgtcattaggaactcttgaaacattttctttttaaaaaaaatcgaaccctaacggagttatcaaaagagggtcagacggaagcttcgtacttaaaaaaagagggtcaaataagcaaagttcaaaaagtagggccaaatcggcaattacagttcaaaacagggtcaaataagcaattgtcccatatttttatagaaataagaagtcaaagttatgttttgaagatcatgtcgctgtcctaaacgacttcctttacgagtacggagggagaaataagaagtcaaagttatgttttgaagaccatgtcgctgtcctaaacgacttcctttacgagtacagagggagttcaccttaaagtacatgaagagagttgcaggagcaattatttttcaactagacagagaagtgggtgcccgcatccattttgaactgtatggtttaattttagaataatgtaagggttttgtttgcaaattttaacttttccaatctcctttcatgcttattaagaaaagtggaaaaaaaaatctacatacaactattcttaaaaaaatcaaagttcaaaactattatatttcgtctaatgtacaatgatgcatcatattaattttccccaagtctaatatattcatttaaatcttttacggcgtttcaaggcgtttgaaagttttgcatacatttccatttttttcaaaaaaaaatgtcctgtttagtacccttagcagcgtgccgcatcgaactatttttccattccttcaagaggaacatgcccggagggtgttatcaacacactcacaaccgtcgtatcgctagggatgcaagtggataatctcactacccgtataaaaacctacttgctagttcattttctatatggtagtacaaaatttcaaagaaaaaataaactaaaagtgagataagcggacaaaaaaaatccgcttgcccgccccgcttgtatccctacgtatcgccaaggttgtcaggatcgggatactaggtagtattattttgttcaaagtaatatcatatcgtagggtcgtatcgtagtatcgggatactaagagattttctttttttaactttaattaatatttatattaattatatatagccattttgtataaaaaaatatagtaatgatatatatcatgcaaatagagacatttatcaagagaaaccacgttggttttgatatatttaactgatttttatataaatttgagcatatttagttacattattttcaaaccatgttatttaaaataatattttatagtatcgtagggatcgtagaatcgggataccacctaaaatttcgtaggatcgtgtagtaatgaatagtaggatcgagatactatgaaaattaagatattatgtggaatcggtatcgtttcggcttggtaggattgtagtatcgtaagatactaggatacgaatcgggatactgacaaccttgcgtatcgcccggctgaccaagcaaactctatgaatcatcactgtcttgtatttggtttgatgaacctcctatcctttcttttttctttctgggtataatctatgggatgatgcaattattgtgtgatattaataaagcttgcaaaaggaaaaaaaacttgtactcatatgagcatgttgtaaaatattttgtctgtatcgaacgcaagttggaaaaatcgatctctcctgccaatctgatatctgtatttgtacagttagtagcagcattatattattgactttatatggatgaataatatattcatatatagttcactgccttgcttaacgcaattgtgttatgaaaaatatgaatttttttctcctatcttcggttgaaacaatgaacaaatactctttaccaatagcaacaacaggaatattatttttttatgtaccgaagaaaaaaaccaagcacgtcataggtcgacgtgtatatgttcgtctttcatatctctgctctataaaatcgtgtatataggctcgattatactcctaatacatttgaaatcaagacaggcataactcatccccaattatatataactgtatacggaaatgccctgcgtcgggcgcccgatgggcaccgtgcctccggcgcctccgtgccgtccccaccacacacaccgttataacaaatcacccacataatacaaaaatgttctattaagggaatacctttcattttttttccaccaacaatattttagcaagtatactcgtgtgtgtttcactatgtataaatcaaatgttacattgaattgtaatatcctttcgctattttgctgaaacattgtttttatatatggtgaaacaacttcaaaaaccattgttctatacattatagcaaaatgttttatgaggtgatttggttgtgtttcaactttttaaacgattgaaacattttcgatccacctaatgaaacaattccgatctatttggtggaacatcagatttttgcaaaaaaataaaaataaaaaataatcggacgtgtaggtggccccaactatataagcacatttgcaatacaagaacgtgaaaaaagaacaaaagcaatcaacctcccaaaaggcccaaatagaggcctggcccatcaacccacgaaggcccagctatcttcttttcctttttttttttcctttccagttccacttcagaaaaaggggaaaaaaatcgcatccgatccgaatccggcgagccgaatcaaatcctcccctcgagcaccagcggagcggaggagcgaattcgccggagacgagacccctcgccgtcgtcgattccccaggcgagcccgtgcattcgttcctccgcggcgagcagaagcggtgcgcctgcctgcgatggcggcggagaagccggctccggtgagggtgctgtactgcggcgtctgcggcctccccgcggagtactgcgagttcggcccggacttcgagcgctgcaagccgtggctccgcgccaacgccccgggcgtctaccccgacgagctcctcgcctcctcctcctccgccgccgccgacgtcgacaaggtcggggagcggcttcagggcgtcgggatctccgccgccgatggctccaccagtgcaggtttttttttcttcttcccccccgctacttctttcgtgatgattctctctgttgtatcagtaggatgtcagactccgatctgggatgggatggtgcacgagagagagagagagagagagagagaattgaatctaatctttgtgctacaactgtgcaggggatgcttctgcgtcgaagcaggaagaggtgaagcgcttgcctggtggtaaggtcaagaagaaggttggttcctgcagcacactcacttggttatcctacaactcagttattactgtcgtttgcatatgatgtctaagccataatagttagtttagtgtgtggtatggtgattattcgcgtactgagatactcaaaatgttaaatgtgctactacagtaatggttagttcagtgtgctggaagaaatatattttttgctggaagtttagtgcgtggtatggtcattttaatacacatgagctattgtattggtgccttctggtttgagtccaagcgagtcaaagtccacgtgtatgaaattttggttgataataacatcgtttatgatgagttacccttttgtcttacaggataaacaagaggttgtgattgagaagattgtccgcaacaagcgcaaatgtgttactgtggtgaagggtctggaattatttggtaagtgttgttttcataaacaattaaatgactgtttacaaactgaaagctaaaaccggtaaggtgaccaaaatgaacatgactgtattgttaacactatagaagaagatgtattttcaatattgaatccccgttcatactgaagctatggtatatttttatgaattatactttgtttcctggacaattaggtgtcaagctgagtgatgcttcaaagaagctggggaagaagtttgctacaggagcatctgttgttaaggtataccagtaatcagggctcatatagtacaatggcctttgatatcaatgtaagcatttttttaacacctgttctttattgcctttcttagggccccactgagaaggagcaaattgatgtgcaaggggatatatcgtatgatatcgtggagttcattacagatacttggcctgatgtaattcatccatcttctcttcaatttattgtggtttaaagttttctctctttttatttactcgcatgtttggtatcatttgtgatattctgtccaggtgtgaattcatttagtttcataacaatagatagaaacctattcaattggattataacatttagtttcacatttaaaaataaaaaaatcgagtaataatatacttctctagtccgtctgtatgtgatgttccttgaatgtatataggagtagagaaccatggtaacatttggtgactacatattcagtgaaaagttatatcctgtggaggttttggtttgtacatggagttcctaactcccattcattaactaactgggaaggtctaaagttgagtcccaaggcccaagggcaaggaggaagtcctatggaccaacagagcctgatatacctctctataacacaaatttggaaaattgtgacctgggagtgttgttatcaccaccatttgaatgcctcagctgttaaaatcgtagtatcttcatcaaagatgtatctatgctatttattgaattattgtcattcattcatacctttcaggtacctgagtcagccatttttttcattgaagatggaaggaaggttcctgctgcttgatgttttatggccacaaggcagaataccaatggagttacaaatatagtagaaatataagacaagagtatgcctgcagctaaggcatgggccttgcatgagctcatcaatgctactactccttcaaagacaaaaaactgttttctttcatttctggtcttaagttcatcacaactggtgttttatcgaggactggtcccatgtgtatcaactttatcctgcaagttagtttggtattgctaagccattggaagtggcaaatgttttgtgcgagcatcaggcttcatatttaacgacatgcaaagaagagtgcaaattagtagtgtctctgccctttctgctttcacagagaggttgtttcacactgcaagtttggatttgaatttgatctttcgttgagttctcgttcatcagggctactgactgcggtttgtaattggggttgtaattgtagaattcaggatgatcataatagggtgtttttgtttgcaagaactacatatcatacgggctgtagaataggcagagacgagtctgatgggcttctattaggctgtattgggtcggcttctattttacttttccagctaaccaagcccaaattacgtctatttagaacagaaattcggcaggcaattttaacagcgatttttatttcaaagtgcattcctagaggagcttcgcaattgtgatctacctcaagtcataaagaaataaaataaaaataaaacatgttaaaaatggtgaagataaataaaatgtggttttaaaaaaaattatcttcaccgttataagtattttttctaaaacaacccacagaagatagtggctataaccaggaaaataaaaaaatagcgacagctcgcatctacaaccgagacccactattgagaagcaaagtaggagcacaaacacccctaagggaatggcaacttcaaatgacgtctccagggagaatacaacgtcgagagcgccaccgccgcccatcctaagaggacgtggttttcgcaataaatctatttaggagagggaatattccgcgacaacgcccccatgcagcgcccgcaagcgtcgccgttatcggcccaaacaggctagaatttcgcccgtaatctttgtaccctcccatgccgaagtgcacctcctagcctcagcagctactgccaactaaacaccttcaacacgcagccactgcgccggcgccttgtcgacggttggccaacaagtaggagcatgacatctggcgcactcaacctccatccacgtagttggattggatggagagagagagatgtttaacaaaaaagaaaaatcaaatgctccttttcgtgtacgttgtagagtaaaactgtgtgcaaattatatttcagcatgcacacgaccaattgagatttcaaaacataagtgagatcaagattttatctctctgccatctcctatactccatatcccaaccactgctgctgttggctgcctagctgtaagccgttgcaagtacccaatcaagcttccattttgcttggtcagtatttaatggccacgccatgggatcaatatgttttatgatatgactaggcaaattaagaggcttgttagtcacaaatatccattgctggaacacaaagttttggtttacaagtaaagtgtaggaatcgacaaggccgtgtttggtgcagttcgagtagtccatcgttttcacagcgatttcttgtttatggagaaaaggagggaatataaatggttggggccgtgtttggttggtctcaggtaaatagcagatagccagctacactcacgcactctaacaaataaaaaataaataaataaaaatcgttgtagaatcaaaactggtagaaaatgagtggcaatgtgacgtgtaatttaatttcagccgagagtctgagcacctgtttgtaagcagcacgttaattattgactacatggttgagtagcgtaaaattagcagaaaaaacatgcacaagatatgtccacaaagcttagtttaattaatcttttaatttcacgatcgatcagttgatgaatattacatttcttttagttacttttacgatggtctttactaattcaattgtcagcatcatcacgtagagacgattttaactgctaatttataagttctgtactaccaataaaagtaaccgttctaccagcataacgtattcatcaaattgacagtacaaacagatataattcattagatcaaaaaaaaacataaacgacctatattaatcataccacatttatacatcatcattatgaaacatccctacatctcgcggtcgacgaatcagcggcaagtagaagaattcagaaagcaaacggcccccacgggaacgaacgaaggaacggatggatgaacaactatgcttggctagctttctgtaatacgtacgacgtcagcgtcatcagcagccaagccagctcagccagctacaggggaatgcgttgtggttttcaggcgcaggaaattgctggagcaacagccacaagtacgcagtgtactcatataggctgtgtttagttcactctaaaattaaaagtttggttggaattgaaatgatgtgacggaaaagttggaagtttatgtgtgtagaaaagttttgatgcgatgaaaaagttggaagtttgaaaaaatattttggaactaaacacggtgataacctaactaatctagccccctcgtttattaagccaataattaagaccccacaagactatgataattcatgtggccagcattacatttaggctccattcttttctggctaacatacagatttttagggtttctttggaacacatgattgagaaaacgtagaattttgacaggataaaagtataaaacagaaaattacaaaatataggaattagaacaaagataaaagactcaaaataaaatttccatgaggttttacctaatgttaaattttctccaaaacttatatggtaagaggcattcaataggaatttcaatgaattcatttgtctcattcctttgattcaaagagctttctatgaaaaaaaaattctatagaaatgaattcctcccaaattcatacaacttttctttgaatcgaagggggccttatcttggttttcattggcatgttttcaaactgttgatcagtgtatttcgtatgaaaactttctatataaaagttgctttaaaatatcagataaattcacttttcaagtttaagataagtaaaacttaattaatcatatgctaacggttttcttgtttactgaacatactcaatcgtgaagcaaaccctaaggtgtttgctagcctagctcaatctggccttattatacacgttttgatatagaggttggattcaattttattatcgaaaaagaaaaagttagcctagctctctcgccttcggttttggcaaccttctctcgcactctctccaagccagatttctgatgactaataactctcgctggtcaaatttatttaatattagaaactcagaatcttataacgctactcaggtcactgcaaccactatactagatgtctttttttaagagagtacttgctcacatgatgaattggttttgtccttagcttttgtacagcttgtgcatccactaaaatccatgggggagatgcacacgagatttctctcgtcaccgtttctgcattcaagtgattcagccccaaccaccgtgctctgaataatactactagctagtacatggtgaactactactgttatagaaattaagggagaagattaaaccgagtaaagtatatatgtacctgacgacaaaatcttgtcatacagctcctaataaatctgctgaataatgacaaaagcttcacgtacttcagttacgacattaattatacagtgaacagtacatcgacaaatcatgaacttgaataggagtattagtacctacagctaacagcctttctgatggatcatcagctcctaaaactgaaaaaacctgcatataagagacatgcggcacagtgaataattaaacaaccatcgatcacatgatcccatttttctgcaattattaacgaaaatcacatgtcattaaggctctgtacgattcccttgatcaaaacgtccacgaatgctactgccattagttttggcattagtcagagcaggtacaatagcaggctataagccagatgtaaatatattttaaagagaaaaaaagagagagaagagcagcgggctacagatatgtagccagctgcagcacagactctaagacataatgtgtgtatgacagatgagaccaggtattaatagtatagtaagcaactattgtatgaattgattattacattaactatagataatttgaagatagtagatggctatctactgatctttagagtctggactctgcaagtcaataggaacagggaacttgcagtcctatactcctatactaaaagtggctaatctattgtttactacgagtggtaaggttatgctcaggagtcagggcattactaattgcaactagttaaatatgtttaattcgtagaataatagcatcagtggtaagattatgctcaaagcattactaaataaattaaataagcatctgtggatatgataatctcatttggtgaagtagtttatttttatatatttttgttgtttggtaatttttttgtgtaaatctttgtattcgataatattattcattcctaaatattaactggcattgtttccactttgactgctagtaataattttaatttgaatgattaaacttcgatgaacgagagcttaataattatatttaaggctcaacacactttttaatagtatgataatatggtatccttttaaatattttaaaattcttatagaaaacacaagaagttaaagtttaaatatgaataatatttgttactaatatgaggaagtattttggagcaggggagtattatgtttagaaaatatgaaacaattagagaagatatgagagttgtatatcatattgtatataactgggttatcctttataaaagaaagcatgtgacgtacctataattcaattaataaaaataaagtataataattatatatttctattctctgcaacaactaaaaaaataggaaatgaaaaggcgtagtttggtttagattattgagcttattagtaccgtgaaatatctatttgcattatagtaataaattaaatattatgaaaataatcttatcaaattgcttaaaataggtggtatacggtctatgtagcggtcgaagtttttttttttttttaagtatggaggaaagaaattcatttcagtaatctgatgaaaataaactaaaacgattaaaggcattagtatcacaaccaaaaaccgtctaaacatacttaatttagcgttgtatggaggttgcactagatttgtactaaaaagtactcccttcgttttcatacatactacttagtttgaatgaaagtgttgcagatgttactgtttttttttataaactctatcagacttaaaaatatttaattagaaaagagtcaaaacaataccatttttttaagaaggcgaaatacca

SEQ ID NO: 10349 - DNA, 4869 bp, Oryza sativa
ccgcccccgagggggagatgggccgggaggaaatcggcccatcgaccccccgggggaggcaaaatagacttttgcggaggaatttgatttggaaggatttggattcggatttgaactcgacgatagatcggggtttgagatcttgagatggcacggacactagacaacaagcaaataaacaaatttcgcaattagattttttaagagataattttcccgctaggcgccacgacggaacgggcgctacacaaaggcgcacgggagggagggagggacgaaaagagatggggcgccgggaaggagggcgctgtgtgggagggagggaggaagggattgacgaaaataggtgtgaaagccatatgcattttttagttaggtatagatttaaaaaacacatggtttagctgttcaggaaatgtgcacgcagcgaaaaaacaagggagtagaaattggaaaatgcaagatgtgcaggcaacactgctatcaaattggactgatgatagaaacaagtgactggtaagctgatgtggatcagggagaatcattactcactagtgatcagtactgctatgttgctttcaataaaagcaaagattctccttttaaaagagaaagtggtaattagcgggaactattcaaagctctcgaggggacatccccgttgtttgcatgtcacttaaatgattatgaaaaaccataaaagaagataataatatgtaatagatcactctacaaacgtgtaatattaaatttaacttctacatgttacaacgaaaataataaattttattgtgaatagctatagtttaacttttatgtttgtagagtgatatatcacatattaatacgtcttctttaatttttgttttcataactatttggattacccagacaatgaggagatgttccgcgagagtttaaaatgcactatcgtaggtagccaatcaatttaacatttcactcaaggagaggccaccatttccgaaatgtaccatctttaaatcaagcaatgggcactgtttggttatatttcctgtttgctctgtgttttcttccaccttccatttctgaatcctcttgagaacttgcatagtgcatcatctactttagaacaattttgttggttcggcactgggaaaaagagtctccatgctgctctagcgtttcgtctgcaggcaaaatttttactgtgcaaaccaggtttgtctatcttttcctcagagaagcagctgaagaggaacacaaaacttcttggttgcgcagcaggtagtgcagcacaagcagcagcctggcactgtgattcccaaggaattcatgcctgtgactgtgtgacatgcccatcggcacatggagatttcacgatcagggtagcgaaggaagcatcgaacagatgcttgattgctggcctgctgccgcatcggatgtccagacatgaaccatctcaaacgaagcgaagcagatgctgccgcagtcccaggctgtctttgatcgtaggagtcaaggtgcaaccaaagtttttttttttttttttagaataagagggcaagagtactgccccttttcattgactgcctcttttttttagaataaaggtgcaaccaaagttgccacaaggataaagcaggagggaatcaaaacaaaggcctttattgctttgccactgctactactacctctctgtgaatctgtgcagtttcattgtacgctgatctctctggtcgaccaccggcttagctgagagatcctactcgtgcccggtgtcgaggagagcgcgcgatggagtcggtggccgtgaacgcggcgcgatgggtggtcggcaaggcgctgagcccgctgtcgggagggttcgtcgaggcgtgggctgccaccacggagctcggccctaatgtcgacgccatcaagatggagctgctctatgcgcaggggatgctgcacaacgctcgcagcagagagaccagcaaccccgcgctgcagcagctgctcctgaagctccgcggcctggcctacgacgccgaggacgtgctggacgagctcgactacttccgcatccaggacgagcttgatggcacctacgaggccgccgaagagcacgccaagggctgcctctatggcctcgtgctcaacacacgccgcacagtcagaaacatcaagaagaaggcgtgctcatgcggagataatggggaagcgagtcgccataccaacgatggggaagcacttgcaggcagcagctgcattcacaagctcttttccaatgctcgaggtacttactatccatctcattgataatataaacaccttccacgcctctcttttgtaactgaacatgacggttgtgacacctttatcaccattgcaacattcctacagaaagaagccagttcctctgctgcgcctatccttgcaaagcatcgcacatagagcacaccatgaaaacaccaaagctgaagtttgacagggtggatctgtccacaagaatgaagcacatcgtcgagcagctaaaaccagtctgcgccaaggtctccaccatccttaatctggagttgttggaatcaaaccgcaacattggcctcatgagtctcaatgctgcgctttcccggatgccagggcaagcaccttttcttccaagcagcgttgctatgagccggcctgtaaccacttcagagtttatagaccctaaatttcatgggaggatgagtgagataaataaaattattggcattactcggggtgattattgtggcaaagacctgaccatcattccaattgttggttcaggtgggatatgaaagacaactctcactcagcatatatacaaggaggtacagaaccattttgatgttaaggtttgggtctgtgtctctctcaatttcaatgtgtatagattgaaagaggagattgccaagttaatgcctgaactcaaagatgagaaatctggtggcccagacgatttaattgagcaaaggttgaaatcaaagaggtttttacttgtcttggatgatatgtggaattgtggtaatgaggatgagtggagaaggctcttagcacccctaagaaaagcacaatcaacgggaaatataattctagtcaccactcgttttctagcagtcgcagaaatggttaaaacaattgatcattcaatacagttggaagggctagaatctgaagtgttttgggaactattccaagcatgtgtatttggtgatgagaaatcaataggcaatcacgtggacttacttgtcactgggaagaagatagcggaaaaattgaagggctcccctttggcagcaaaaactgtaggacggttattgagaaatcaccttgacttggagcattggacaagtgtcctcgaaagtagagaatgggaactgcaaaccggtgagaatgatattatgccagcgctaaagcttagctatgactatctcccttttcatctacagcattgttttacatattgtgctctgttccctgaagattacagatttgaaagtgacgagatgattcacttgtggataggactagacatattacaatcgcggaatcaaaacaaaaaagtcgaagagataggactgagctatttgaatgatttggttaattatggattttttagaaaagacatgaacaaaaatgggtctccgtactatacaatgcatgacctactacatgagttagcactaaaggtttcatcatatgaatatcttgctataagtagttctagtgtgagaagtgtgcaaattccaccatctgtacgacatttgtctattgtgatagacgacacggatgtaaatcatagagtgacttttgaaaatgttaagaaggattttagcactctacataagagactagatgttgaaaaactacagtctttgatgctatttggacaatatcatgggagctttgtcattccttttggtaatttgttgagtaaagcaaaagcactccgtgtcatcttgatgtttaatgcatcttatgatatggagaatatgttgcgtaacttctcgaaacttgtccatctacgctatctgttgatgtaatatgcacttgtattggggaccttcttgcatatgtagctaagtgaaatagtgtgtgtgtgtggctgtgaacaacacaccagaaaaaatccccaaaactgaactttatggtatcagagccctaaccctagcttgctgccgccgccgccgccgtccatcgccgccaccgtcgccgctgccgtcgtcgcacgtcgcccctgctctcatccggcctgaccagcctctacacacagccacgttgaggggctggtgagcgcgcgctgcgcgcggccgcgcgggcgcagcgcgtgtgttgtaacctgctgctcacgcaggaaatgtgaggagctcagctaagggaaaaggaggatggtggcttggctgcagacttggtgacataggaggattgtttgctgcaggaactaggaaggaggtggtacgtctcttgtttttgcttgttttttggctactgcctggatggaggagcatttgacttgtggtctgtgaggggaagaagcctggtccttttttcttttatccaagattagaggagagtttttcctaccattgttgataaggggaagcaggggaagtggggtaccagtgatctattgagagtggtttttggagtgcagagaagatggtgaacaccgagggtactcaagaacaaagaaaggctgaggaggatgctgcactgcaggctgggaagaaggaaagtgtggcaggagaatcttcttttttcactaaaggtgagatgaaaagtctgttgcaggacctcatagctacaggtatgatgggtcttaggagtgggataggaccatctgagataaaattggaagtaatgccaatgaagtgaggttgg

SEQ ID NO: 10350 - DNA, 3321 bp, Oryza sativa
ggcgcgtccaccacgcagtggcagaacctctgcccgaagatgaagccgccgcaccgcagcctcgtcacctggatgtagagcagcgggcggccgaccaccggctcgacgccggcgacggtggtgctctcgaggatgaaccgctcgaagcaagggaacggcgggctctgcacgtcgccgaagtcgtcggcggtgaggtcggcatcggcctcggcgaacatgacgccctggccggcgcactcgacgacgagcttccggccggcctcctcgcggaggcggccggcgagggggtagtacgggacgagcgccctggccagcgcctcccggatcaccatggccgggtcctgccccttcttggccgggttgttgcggtacaggtggatgcccgagctgtagaaccgcatgccctcgccgtcgtcgatgtcggacagcgccttcacctcccgcggcgtcggcgccgccggtgtcaccagcaccggctcgcctcgccgcaccgtgaacgccggcagtggagacgacgccattgttgatcgattgagtgatgcgtaggtgcgtatgtgcgttgggatgaaaggtggtcgtagtagtgtgttcgtggagtgggcgaagttttggcgcgtttatatagcgcgggaaacgaagacgggggttggtggccgggtgctattggtggtcacccaagtctagcgggtacacccatccaccccacgtacacgaacacacgtgttcgcattccttttacacacaccaaataagtttcacgcactctgtacaaatatatattactcccaccgtttcatattataaactagcataatggcccgcgcaatctgcgcgactagaatcattatattttctctcatataataacatatatgttttctaattatattattcaaatatattaaaatgacaacgtaattttaaattttacaataactttacaaagctactaatgtgtaatattcatattatattttatatacgtgttatttattaattatttttaatatcaaattttagttatttgtaaattatatatattcctatatgtactctagactcgtcttttaatatttctttttttaattccgaattttccgtaaattgtatttttatatatagactctatgctttttttccaatattatttatttttatttttgaattttcatattatattttatatacgtgttagttattaattatttttaatatcaaattttagtaaattataaattatatatattcctatatggactctagactcgtcttttaatatttatttttttaattccgaattttctgtaaattgtatttctatatagactttatgctcttcttccaatattatttatttttatttcttaatttttattatttataattgtatttctgtgtggactctaaactcatcttttaatattctttaattttaaatttcgaatttcagttctaaattgtattcctatattgatctttaaacacttcttcccatgtttttcttaatttcgaattttagttatttgtaaattatatttttatacggactctaaaatctacttttaattttattatgtttattccaaattttagttagttttaaattcttatatggactctatactctacttctaatattccttattttctaattccgaatttcttttttttttcttaattgtatttctatatggactctatactctacttctaatattccttattttttaattccgaatttatatttttttcttaattgtatttctatatggactctatactctacttctaatattccttatttttaattccgaatttcagttattccataattgtatttctatatggactctatactcctcttctaatattccttgtttttaattctgaatttcagttatttcctaattgtatttctatatggactctagtctcctcttctaatattccttgtttttgattccgaatttcagttattttctaattgtatttctatatggactctatactcctcttctaatattccttgtttttaattccgaatttcagttatttcttaattgtatttctatatggactctagtctcctcttctaatattccttgtttttgattccgaatttcagttatttcctaattgtatttctatatggattctagtctcctcttctaatattccttgtttttaattccgaatttcagttattttctaattatatttctatatgggctctagtctcctcttctaatattccttgtttttaatttcgaatttcagttattttctaattatatttctatatggactctagtctcctcttctaatattccttgtttttaatttcaaatttcagctatttcctaattgtatttctatatggactctgttttttcttttttctgattaatgtgagaatttctataccatgagagcaaacatggaggcttctttttctattcctttaataatatagtagattattttaatcttttctaatcaaaattatgtttgatcaggactaaaaatatagcaatatgtacaacaccagtcagttttattaaatgtagccttgaatatatattttaataatatgtttattttatattaaaaatgatttttctataaacttgatcaaaactaaaaatatttaactatgaaaaaaaaataaaacgggttataatatgaaacggagagagtaggaagtatcggatactaccaatatactccctctgctgactgttccataacattagaagatattttgggattgtctcgagtcaaactttctaagatttgatcaaatttatagaaaaaagcacggtaacatctacaatatcaaattaggtcactaaattcatcattgaatatatttttattatatattttatttttatataaatgttattatattcttttagactcgatcaaaatataatgatgtttgatttagaccaaacctaacggagtagtacgttagatgcgaaaaatgcaacgacaacacttgtgtggaccattttttttttgtttaactaaagctaacccgtatattagtcacattgaaatggtgtagaactctagcgatacgcaaaagtttcatttcatgatcatacctcgtaccccgccaggctcgaaactagaaatctctagccaagggctcaattaatgaattatgggtttcccccaaatttttagtgatgatttaagatgatcaaaacatgattgtggagccttagctgccataggctcccggccatactcttactaccaactaccaagagcctaataaggtggttggggtacaagatagattatcaacagccg

SEQ ID NO: 10351 - DNA, 8033 bp, Oryza sativa
tgtatgtatatatgtatatgtagtatgtatgtatatatatgtatgtatgtatatgtatatgtatgtatgtatgtatatatatatgtgtgtgtgtgtgtgtgtgtgtgtgtgtgtctatatatatatatatatatatatatatatatatatatatatatatatatacccgcgtgttgcagggaattaataatttagatgtactcgagaaaagaaacttatggaagaaaattggtaaatcatgtcacttgtgatatctatctaaagcattgtaataattgatatgaaattgtaattattaatataatcaagcaatttaatataaaatataaaattttaatccgttagtataatttaatatacaaacttcaaacccaatgtacaaaacaatgtctttctttttcagttacagagataataagaggtatacacataattgtgaatgtgtctctttaaatacacgttcaaataaatgaagactattaatatatctcattgttaacgaccaaatttggtaatatcggcatcggaaaggaagattagatcgaagcggaatcagagataaggattatcgcggaaacagagtaaaaatcggctggagtccggatcagctacgattggatcggctaagttcgagtcagacttggtttggtgatgcagccgattccgacaatacgacttggtgtacgatattgggttgggtcgatatgcttcaagatgattgccacgcgtggatagagtcctgagaaggcaactgtatctattaattagtatattttatgtaatttccttagagatatgtttgggcaaaagtctgccgcaaagacttatggtatcttagagtttgttagagataagagtcatgtccgatatggacatagtttgtaattctcgggtataaatagaccccgaaccctatgtaatcaattaacacacacgtttaatacaatcttggtgcatcgccacccttttttgctttcgttttatttcgacaagttattgctttcgggttgagctgcatcggtttcgatcttcaacaagaggtaaaacttgttatggcggcttgcgttctcgggattagtgcttccatctctatgatactctaatcttgtttatgtaatccgtcgagttatcatatatcttatataatatatagcaatatcatcatctaacctacaatcagctaacatctactagtagaggtcagccgattaggttaaatatcgatgttggtttagattgtacatgatatctaccactctatgaaaattccaatggcttgattgtctagatattgtccttcttttcatacttatagctgcatcagttgtttgatcttatgagtcgtgattagaatctcaacctctagcttgcttcttggttgccgattagggtagtatcggggttttagccgatcttagctgatttaactatacttgttatatatgctttactgacatgttaaatctgccctttatattaagattttgtggcatttaagtgtattaagcttttgtttgatatattctgcttgctttaatatcttaatatagagtagtatcggagtattagcccatacatgctagatctatctgatcgactatgctatgaacatatatagtcccattattaatatatatttcgatctaagtgatttatattgtctcggcatggcgactgatctatcccaatcacttgatttaagtatatatcgatataaggagtatatattgttaatatctacagccgatcaaatagatttagttccctcttatttactcatggctgccgatcgatacatatatgacaccggctcaaagataaatgatatgtcatcggcacctagccaatcggctatcatttatagatttaaccgcggtttctttgcctttatttcttgttgattgcaggatcaaatccactggcacgctagcatacccgaaggcgagctttggacatgcactggagttaagcagatttcccaggcctcgtgtttttcatcaacactcatcacttcgagatcctataaaatgtaaccacgtatgactaaacgaagggatattagaggatcttatactattttctaacagggattttatttaggaccaccaactgctattactaccaggtaacaggactacaggaggtaccagtgacatatcccaccactaatttgaaaagagtatgatggtagtaccggatatttgtgttggtaactagatctagtagggggtaaggacaagtgtatctaagggtgtaagcgggcagacctgcggacccagccggtttacccgcttatttgtattataagtgagttcaggggcctgtctgattgcacctttaatctcgtcccattgtacaccttgtccttcgcgccgagttcaagattgcgcaccgccatcgccctaccgtcgccctgccaccgtcgccatcacccgacgtacgtccatgctgccagcaccagagccaatagcattctctaggaaatccagaccctactgtcttaaggaaatccaacccatccacctccacccagcatctcctggcctcgattttgaatctgatgactattgggtgtttctctcttatttgattccttgcacaaggttttgtcttagcaaccgagatggccatgacaaagcttggagattcccacaatgcaatgagtggtgggctgagcacttcctgaagttgtggacggctggcgcagtgctatctaggacatccagtcgtgaaagataacacggagacaacgacactgttgagagaaaggagtgggaggcattgtgctcttgcgtgacgggagagggagcagcgggggagcgtccaattaagtggatcaaccatccttatttataagggtgtataacgagacaactcaggctcgtctcttttgaactcattgtcttaacgagccagctctgcttgactcgttaactttaacaagctaaagtctagcgcaattcatcttgcgagctggctgctaggctagttaggcttgtgaacatatttatccctcctttataatttcaaatttatcattttgtcatatataaatatagtaacacacactaactaataaagaattcacaatgtaattagatgactaaatattagttaatataagcactaacaagctaattgagcagttcgcgagctatcttgttaagctcacaagctgaaagcctaatttgatttaactcattaagactacaagttcgaatcgatctgagccaatcgtgctcgctacgagttgatccgagccacaagatttgagctttgtctatccacccgtactcatttaggacctcccatcttgttgtagctagtatggtaaaattcctcttttctaatactctagtatttagttactactcttgctgtctcgcgaacgtacccacgtactattcctcccatgcgtcggacagctgagctatctgagcacctaccatctcagctttgactgatgatatgcttatggctcatgtgtgatgttaattaggccgcacatgacacaaaccccatgggctactacttttgcttttagccatgcatgtgatttaattaggctcctagctagttgtgtgttgcatggtagttgggtacttcatttggttggaccgatgagaggagaggagatcatatttgtgacaatgatatataggatagggtgtgtgtactagtgtatgtgcagcagtagaaaactcgtcttctcttccaacggacgggttagcctaccacgtctattgggggtgcagtgtgagtatatcaccatgtaattaccatggtctacatgttattgtctcgtggattatcagggggacattctcacaacgtatcaactagaacagtagaactagagattcttttgcaatgattttgagtggaaaaccaacacgataaaatcgcagctctagttacaccgatacatcaattctgtcatggaagaaagattgtaaataagggcatgcacactgacaattagtagtgagctcttatagtttttagcaaagtaagtttgctcatataaaaaaatattggaattatagtatggaataaagtccatatgaggtgtaatttatatgaaaatcacaaaggaatgcctcacaggaagagagacatgtgaacttttagtattaccttaccttactcattctaggagagatctctttaaaatggaaagggctctcctagtgacttgagccatgtataatggagagaattagaggaacacgtgtgtatgcgctcactcgccttacacctacattacgacttatggagatcatgtgcaggcattctaatcacacatcttgatatttccatatgatttgagttgtcgtctctacgcaatacatgcgcaaaacaagataaagtttgcctcctcctctgtattacgctatcgctactctacatttgggcgctgcacatcgatgtcgacacctgatactgcacggcttatctagtttggttttatgacttttggggatcgtgcatgtgttctaatctcgcattctgatatctccatatgaaccgagtcaacacctatatgcaacacacacgaaaacaatctaaagtttgcctcctcctctatattgcgctatcactcctctacatttgggcgctacatgtcgatgtcgacccatggtactgcacggcttatctggtttagttatgacttatggagatcgtgcatgtcttctgatcacgcatcctgatatctccatatgaaccgagtcaacacctctatgcaacacacgcaaaaataatttagggtttgcctcctctctgtattgtgctattgctcctctacgtttggacacatgcatttagttccatgcacgtagtgcgaacttgttcttttttttttgtgtgtgtgggggagggagcgaactcacgcgccgtcacgtgttcgtatcttcgttcagcggtgatgatatatttttatcaattctttccaacttatatattcatgtaaaatcgtttaaaaatatatttttaatgtttttcaacatgctctaatgcttgtttacatacttatatttttcctggcaatgtgatcagttctgtggctgtcgttcgatactttttgcgttgcttcatcaagataatgagccatcctattctatgtgggcacaccgtgtacttcttctttccgataatgcttaccattagccgtccgacacggaagaaaaaatcggacgcctcaatccaaatgcatggtaagtctgaacgtgcatgcaagcatattttaaacttaaaatgattttttctctcaaactatttatctaaatttcaaactaattatatcgttggatttgttatagttaaatctttataacaagatttcacatgactatattctgatgaccttttttttactttttaaatgttgcacacattgttaatgtatgttccaacaagtatttattaatgtttcactaatgcattagcaatgttgcacattattttttatatgtttcagcaaaaaaaaattttatgtttcagcgattacaattcgatgcaagctaaatacaaaaatattttaacaaaatcaaatatttgcaaatgtattgtatcatatgattttttttcaatgtttcactaattgggacataatgtttcatgcagtgataattaccgttgcagtcaatactttttatatgttgcatctctggaatattttatgaactaggttgacgcatctgcacaagtggtgaaactttttttagacggtgcaacataagtttgattttttaataaatatttttatcaaaatatatccatgtgagatcttgttataaagatctaattatgacgaataaaatggtgtaatagattatatattgaacacatattttagaaaaaggaaaagagagagaaagtagaaaaatacatgcatgtgacatacgccatgcatgcgccacaagccaacatgcaaacggcatacgatgctcatcctgacgaatgtgccagacgccaaggatgggcgggcgtccgatatttgataaaatatccaaaaatgcttgaacccgagcgcccgatccgtgcgccaaacaatcgggtgatacctccacgcgccgcgcttcccgcccgtgcccgcgcccatgcatgtgtccccaccactgcgtcgctcctgccacgtgtccccaccacgcacaacgttgcaacaaatcaaccacatattttggaaatactctattaagggaattcgttttatttgttgtttcacataaaatgtttcacctagtgtactcacaatatttcactatgtatagatctaatgttgtggtgaactgaaacattctttcgctatttactgaaacattgtttttatataaggtgaaacaacgcccgatttaaacgactaaaacattttcgatctacttagtgaaacaattccgttatacttggtgtaacatcgtgcacatttaaaaataattcaataataagctaattttttttcgttggaatatatccatgtgtggtcttgttttaaagatttaattacaacgaatttaatggtacaattagatcatgatttggattaataatttaagagaaaaaatagtttaaagtttgcttacaaaacattaactatccctgtcacatatgcaattctgtgcgcgggaaaagttgcatgcatgcagctgcccgggagaagtttgcatcgaacagtgacgacgcgctatcaatggtcgagatttaatccctcgatccgatggctgggacgagcgtccgatttttttctcctgatcggacgtccgatccgtaggtctctcctcttctttctccctgtaaagagaccgcaacagcttctgtaatagtgttggaaagtcttctcttaatatagtcaactgtcgtagttaacagtttaatacgattggtggtggggggggggcattagagcaagtgtaatagtagagctaattatatagatccacattagagttaatatgtacagtagatgagctatacatatttaatgcatttatcttgaaatatagtagcaaaatactcaacctttgctttggacaaaataaaatatattataatatgtaatagacaaaagaattattgtgtaagaggtaattttttctgggcctgtattctttttctaggttcaataggattcttagtggttggggctttcagttatcttggtaagaatattatatctgtacttccatctcaacaaattcttttttttctacagggggtcgtgatgtctttctacggaatcgcaggcctattcattagtgcttacttgtggtgcactattttgtggaatgtaggcagtggttatgaccgattcgatagaaaagagggagtatcacctgtttgcatttttgaatatatggtattcacgtgttttaactaaatatttagattgtttcataatattagaaaatatcattggtaaatttgtaaaaactataaaccgtggtggagtgccagatttactatcaccaccactagagacttttaaatgagtatatatacgtagagagttagcttttatatgaaagctaatcattttaatttttcaagttctattctccgaataactttataattgatttaggcttagtactccatattaaacttgaactcatcatcgtcatgtcggctgacgacccagcaaaactccggtccaaagccggagggcatccgcgacgacgaacacgcacttgtacttgctactatagctcattagcttgtactccctgcagggctacaagtacgaacatttggtaaaatccttatcaaacacgacgaaaaatctcttccctcgaaggctcaaaaatcctcgatcattgcctatgtgattggtccaagcatgagattgctgatcgactgtgtgggttaatatcgtaatctttatttatgcgactattaattctttcgaacttttaatgttctggcagatgaacagattaatgagcatcagtcaaccacgtgtgcatcttttgtgtagcagagcaaaatcactgaaatttttatattttggtcctttttgaaaacttattttacaaata

SEQ ID NO: 10352 - DNA, 14290 bp, Oryza sativa
acagggtaacgatacgataagtggaaattatagaaaaggcattatctgaaaagtcattgcaacttgcaaatactgttcatcaccattttaaataagcattttttttttgtcccaggcatatgcttgaactttttaaaaactagtaagcccataaaccctattagagtgattcacactctctcaacgaggatggacggctaacagcgaaactagctcttgctagatgggagcatctgattccagtggcaatggctaaacctagatcagttaaagatgaaaccaggactttgatagctcatttaaatgcagtacctatagaacagataggaaaaaaaaaacagagattatgaggtcccaatgatgactgaaaaagcacactaatgctgttctgctgtatgaggaaatatgctggatgagtacacataccagatgatctggaaaattttggaagtgcgctatgtggaaatctttgagccaagccatccgaacccctgaatctgattatcagcaaccatgcagctagagtgcaaataatcaatgctataacagtagacaagacggcaatagcaattaggctgccgttgactctttttttgggcctgcctacatcaaccccgagaggcttcattgcccttgcatttctgttgtttccaaatgccccgtcaccaacactttccggtgctgaaggtggagaaggaggaagccctgcacaaaatccatatctttggtgaaaacttgtggtgcagaaattcagcatgttcaacaatgagaaagtgcaagatggaataagtttatgtctgacattgctgttgtttatgagatcaaccagatgactataataaattgatagcagttggtggcattgaccagtgacaaaaccaaatagagaaggcacatcaaaagcacaagcaagaatacacacctggatatacaacatacagaatctcgtagtccccaaaaactgatggttttagggaaatttttttgctccataagttttcaaacgttaaaaaagcagtagcattgtcaaacttcacttgcattggtactaggtcaacaagaactactgtcttgtcaggctgatcaccagctacatttgcacccataacacgaacctgtctctgtgccatatttaccccagatgacacttcttccgcaaaatcagataccaatggaaagaatgaatacagatcaacacttaagcggactccaactttgattggtagaacacaaacacatggggctcccgcaggtggatctgttagaggctctgggcatgctaatgaattgcaatctgcatttataaggctcattagataatgaaacaataagagcacatatattatatccatctgtaaatcttgaaaggacatactaggtatgtgaacatgtaaataaagcatgcacctagattaggcggtggtggaggtaatgcccaaataggatgggctgatggtgctttcggccctggttggggagggattggtggcatggttggagaaatatgaggccctgaaaaaggcagcattttttttcaaaattcatcagacaagagaaacatggatatttaacagggagataaattaaggctttgagagtacttttgtttgaatgagtgggagtccttgatgacactggtgcagaagatggagaatacgcaggcaagttcgtatggcctgggcaggagaataattaagttgttagtgctatcaaataaaatcaggacccatttggaatggaatattttcctttttcccatgggtactcataggataagaactaattcttgtgaaatccatacaaatagggcattaattaacacagaaacagcctatcaaatatgtttagacagcaatggcctacattacctcgaaacataggtggaggtgcatggtgcttttgccttttagccccagactgccttggagcccgtgagttctcaggacctataatgcaaaacttttgagaatctaaatgactcaatatagacaataactaggttgttggtagaagaattttgtcaaaccttgagcatgagatggtggataagatggggcaaatggaaggtgttctcctttcttcggtgccccaccccgaccatggtatctgctagaagttgctggtttaggagcagctactgttgaagggggtcggtcatgagaaactgatgatccattctttgggactgctggcatatttgtgttctggggcaaaggagtttctgcaggtgctgatcctgagatgaggaatttttgtaatcaagcaactttgtcatatccaagctaccacggcccggcaacccaatgaaattttctgagattacctctaattggcggtttgtgagctgtgccagtttgactactggattcctttggtggcagtgcacgtggaatatgactattcttatggggaggtgatgtatttgctgggggcactgagtttcctaaatatttaaaaacaaaaacctccaaaaatttagaacaaagggacttacaaagcatcatcagatcaataggattggatatgtttatacttcattctcaccattgctatggtcactacttggtgccagtgcttgctgacgtggtgcttgtgcaataataggtggtgcaactggaggttttacactttctcgcggaactcctattgaagaaatggaaaaacacaagcatacacaacatgattattttgattgacctcaaagcaaatagtttagtttacctgaagtggaaggaggaatggcaggtaaacttctttgaggtggtggatacggagggacgccattccctagagaaataaatgtatcaggtgaatatttgcataattgtaaggaacctttttggacatggacatgaagaagtccaggaacttaaggttttgagttgccactatcagaatatatacttatacgctgcctctcagaaaaaaaaaacagagaaagaatatatacctgatccaattggtctgcttggtggattgttcacagaaggaggttgcactatcggtagattaggattcctggccacagatggagcaggagcctgaacagaaggcaacaaagcaggtgtcccaggaagcactggtgcaggattttcaactgcagcttgcgggggagctactggcgccacatgagtgggagcaggaggcgtaagctcaactggaggaggcgcattatattctacataagacgtagttagtgatacactcattagaactgatgcgacatcatgatctaaccgcgggacgaactacctttagggggtgttactggagtaggcgcattttgtggtcgagtgggaacagctgggctgacagcgcccttcgccacaggagggcttgctgatggagcagagggtgctgagacaaagcaattgtaaggacaattgtcaatgctggttatgatcttgagagccataatgccacaccacattagaaattcagagcaacctgttggaagagttactggaccgagggcgattgtaggttcaggagggctagaagtttgatcttgagcatctggcgagttagcgaccacaggagaaggacccagatcagtacctgcagtggagtaaagaacacaacagggtcatggaatgtgccacacgtacactgatatccaactactaagctcaaaattgcacaaacaagttggtaaccaccctgtgagtgtggattagtactagaggcaatttgtccatgttgttttgccgtatgaaattagcaactaggaaaacaagaacaatggtaatgcaatgcaagtgcacagcaccaaaattatcagaaaagaaaacaaggtgtagtatgcaacaagtggggaagatacatattcagcgaagttaagcatttcccagtagacaagcaaatgggtggaaaataaagcacatgtgatggaatttaaagtggctagtaattagcacgagatgcctagcacacagccaaccagatatgccaagccaccgacattgcaccatccttcttaatgagaagaagcccattcaatcctaacaaaattcacaacatcctctcccaaatttgctcaaattttgaagtaggaacaggcaactgcatttttttttcccattcacagatcaattaggcagcatgtgcatcacagaatccatccatgagctctcctaacaaatcacacagcattcttctaaaaattctcctaacaattcaaacagcattctaaattaacccagaaaaaaccatggagaaacaaccaaatctccagattactggaccagcatccacaaccccatcatatgatcccaacctgaagaagaagaactaaaaaaaaaaaaacaggaggcgcaaaaacaacctgaaaaccatggcgaatgcccggagctcgtctcacctgtagatccaagaaccgaagcgagaagaagcaccgcgcaacaagcgagcgaccgcatctcgcccttcctcccctattgcgcctcacaccaagaacagccaactcaagaacagccgcgccaaaatgcgagagaatcacagatcacaaccatctcgggtggcgcgcggcgccgctcctcctcccgcaggaaggcgacggggcctgaccgccattttggcaccacgccatgagcagccacactcccatgtggggagggagaagaagagggcaatgaggaggcggcagaagaggggttagccaagcaaagcttgtactagtaccactagtggttactggttagtacagtacagtacaccacaaggcagtggactagtggtagctaaggaataaattagtgagaaattagcaacagaagaagaggagattaagaagaaggagagagctttgggtcaagatgcaagaaccagcacagtaaacattccttgcttgctgcccctgcactcctccctccaccactacccagatcatcataagctgatgaaagatgaaggattaaccaactaatcaggaagaaagaaagaacaaagcaggaatctttgcttggggctaagtaaactattcacccccaagaaacaccctcagagatgcaagctcgtcctctctctcatgcatcagagtgcctgtctgtctgtccctctcgctgtagattcttggtctgtgttgtggggggtcactctcctctcctgcatcgacagcctggtccccgttctttctcactgattactttatttactgttgcgaaatcggtgggttggatgggatcggagtatgcacagcagcagcaagaaccctagaaatccctctccctctctctctctctctctctctctctctctctctctcctcgtgccacggctttgtcggttgatcacgagggcgcgtcgaccatcaccgatcaccaagcacgcacggctgctccctcccagcgtagtaagtaaatgagcagacatcggattctggcgttttgatctgcatttgcaattcgaatttgattgcagaatgtgatggtggtgggtttatctgaatctgaaacccatcctaacagccgatctgcgtcagtttgcgtttggtttcgtcgggactcgaggttgtggcgtcgccatcaccagcgagacccatatatcagctcttctgctgctgtagctgagctctgctcatgcaccacgtaccaaaagaaaatgggattaatcttggcaaaaaaaaatcacaaacaacaggtttattagtagctaatcacgggctgttcatggtgctcttgaggtaatcattggttagaggcaaaaacaagaaaaagaacagcattaacagcgatagtcgattagtttactcggataaattgggagcttttgtcatcatacttgagctgctcgtgatcacggtaacagacaagcaagcaatgcccttccaagagcccagattacgaaaatcgatagtccaaaataggtttgcgcccgtgggagactgtcagatcctctagttaattaatcaaagacaagaaaagaattatacaacttggaatacaatactagtagcaaattactctcggagcttaattgtctttcacttcatgctcgaccagttcttgaagcaagcaaaccatgcaacatttgcaaccacaataaacaccatatcatctcatcttatctcttctcttatccatatgcaactcgatcaattcagcatcaagcaacagcaacattagaatgatgccatgtcatatttcaacctgtaaaaactaaaaagatgataaagcttctagagcagaagcttatatacacgcaacaaccgaaaatgtatcaaccctgaaaactgaaggaaactttttttccctttctttctttgcactgcatgaactgaagacatcaaggctacatcaacccatatatatgtacataacaaattaaatcgatccagaaaaaaaggaagtatgtgtagtgtatatgcttgtctccatatgtcgtggtcgcttgacctactctctcatgctttcgcttttggcatcgatcgagatggcatttgttcctgagattgcgtgacatgcaaagctgaaagttaccggtgtgctcgctctcgatcgccacctttgcttgctaacttgccattcatccacgtgaccacgtggtgatcctacgtggacacatatgtagaccatccccatttttgttttcaaatttctttttgtgtgaaacgatggtattttgtttttttcccccgaagaacacatgcaaaaattgtactacattattgcgcctagtccatgaatataagcatttatatgttgttctaagtcaaactcttttaagattgatcaagtttaacttatgacgaaactaaaaatatttatggccccgttcgaatccacctaaaagtgtggattaaattttggattaaagtgacacgcttttcaaactgctaaatggtgcgttttgtgcgaaaactttgtatgtgaaagttgttctaaaatatcatattaatccatttttcaagtttgtaataattaaaactcaattaatcacatgttattatcacttcgttttgcgtgaaacacttaatcttcatcagattcaaacaccgcctatgtcttggaactgggggagtacatgtcaataagaaatgagaatacatctgaccttgtatttccctcaacagaacctgcaagttataaaggcttgttcagactgcatggaacttctatgattagagtagacatctttaaataaaacctgccactagatcttttaaatgagtatggtccaatgactaaggtaatgctaattagtagattggaaaaccaagacccaacccaactactgctcttgtattatgttcttcagcaggagtcagaatagggcggtccaggtgtatgtgtgcagtaaagtatcagcaaccaacctattcttttacccaggtctatctgttgattcgtcccggccatcaaaatcaccatacaatgcatgccgaatgaagtggtaggttagcttaatttgcacagcgatacaaaagacgacgttgtaccagctcaatatacttttccagatcaatccaagtatcatctaactgtagtcggcaagaaaattaaccaaagtgtctgcagggccgtcctggttggtagtggcagagccaataaatttgaagagcctgggtaaatctaactacgttgaatatttgctaataaaaaaaatatttttttcaatccctgtgataacatcaaaattctatcgtgtatatgtcaacaaacatagacgctagggatgaaaacggtggaggagattcctgaccaactcagtatcttttttattctgaccgtgtatgaaaaaaaattctaatttttgagagcgttgtttgaattcgtcattagatagttgaagtgctaggtacggaaaattctgaccaaccgagaatcatttccatggaaatgatatcgtttctgaccattttcatattcccttaggattgctttgcaagtggtgagatgcgggtggagccatggtacagatcttgaaatggaatttctaatcatcttgaaatttccattattgaatttcttagtatcggtcccctctgacagcgcaatattgtttttttttttttttgaaaattctcaaaccatgtgtccatacacaattcagacaacaacagcaaataaagttccatgctgcttgaacctaaaattcccccaaatttgtttccttgatctaaaatctgtctgaacatctttcttcaaaatgtagttaggagccaagaaattaatggaagtgtcctgcctccagttagttggtccatctcctgtactcggtactctcctcatcctcacgcgcgtataaattactcatacacagctacactagttgagccgttgtttgttgctgttcgtacgtggacctgacaaaattaacaagccatcaagacagttgggctcacatgctcttgtctcttcacaaaccttaatgcaaagatctatctatacccaatgtctgaatatctatctgaatacctgatggaagcaaatgccaagaacacaagtaaatattcagggacaagacagcataattcattgccgcttaattagtacgtggggcacggatgcaactaggaatattaattagttttggttcgtgagatggatcgtcttggggagaagagaaatggataatgccatttaatttgtgtatattttaagccaatcacagttgatctgcatgcgcatagttgagaaacagcgtagtaatgatttgagttcgtgcgtggcattaattggttaggattttgggtgatggattcgatccatacctgatgacgtgatcgatttgttaggagtactgaacaagatggataggataaggtagtactctggtacagtgatgatcttaatttcatcattagtttaatgtttatgtatcagtttcatggattaatcatttgtgctagcactaaccatgtttaactgtacttttctcattttttctgaactcgatcttgccccccccccctttttttttctgaaagtgatcggaatatttgctatcttcagcaagaacaacatcatactaaaatcttcatgacaaattaatatatgttattgaattttgttaagatccgaaaatttatctgaacatgtaaactgactagcagcaagtgatccatagtgtttatcagtactgaaattttgatccgaatagttgcatgaatgcatggtgctgtaaaggggaaaagtgcaggcattctgctgagctgcatgtggcaaccgatcgaggctccaccaaccttaccctagcaagaacacaggccaatgatgcttttcctctcctctttcctgtactaacaaccacgagcagattgattaggttattgcaaaattaccagcacatgatcaggcaatggtgggattaatgattaattacagcagaaatcaccatcactcgctgtgatgatacacaccatcagagaaagaaaggatggctcttttacgttagatatccgcatgatgtctgaattctggatgcaatgcaactaactgaacgtagtacgtttatcttcagaacaatcattcagaaagcaaaagccacaccacatctcctcgtcgttgttgacgcccacattagcagagagacaccgagagatatctgaattctgaattctgaaatgggagtgaccactgaccaccaccaccagcagcagcaaaagtgaccgaatccaacgaagttgcagtgcagtgcagtgcagcgcaggcgacgcaaacgctggcacgagcaggcaggcaggcaggcatgtacacgcgacgtcgctttgcctgaatcaatcagcgcccaaagcagcaacttttcctttttgcactcgcaaagaaagaacacaagcaggcagcccatggcgatcattgcaaaccgctttgccgttgcctctctagctactgcctaggttacagttttcaggctgccttgcgttgcaattctgttcctcatcgcaaaatctctcatgcagcaagcagctctctctactctctagaagtatgaaatcatgaacgggatggtcaatgatgcatcggttgaaaaaacagacagtgatcctgaatccatggggcttgaccagcaagtctctgatagcactcctttttgcaggcccctccaaaacgaagaactgaagaacagtatgatgatggatttttttttcagcaaaaaaaaaggttttcagtgatcttttatctttgctcttttgctgcactgctcatatgcgctcaagaaccgagttgcctgaactagactgaactctgaagccctgaatggatgagaaatggagttgcacttgcacaggcacatacttcgataaggcttccatttttctggcacgaccaccactgtatttatttttccttttcttttctctctcttttgaagcacacgaccgtgataattgcacagggccgtgataatcgtggtagtagtatatgtgaatcgctagtgttttctcatcagcttaagcttttgagttgaactaactagttttatccgtgtatataactgaatatggtatcagagtaatgtccatctttcaatgaacagccagccagccagtcagtttgttctgacttctgaattctgatgcagatcgggttcagctttcagtctccgtggtgaggcgtcgaaacggagagaaatctctatactttgctcggcaaatgaacagtgggccggccttctcgttctcctggtccaaagtaggctgttagattaaaagcccattcaggctcggcccaataaaggtgcagacagacaaatcaggattcagggctttgcctgtgcagctgtggttgcgttcaatctgtgccagattttccatcagcagagtattcattcagttcatctgagttgatcagcctacaccatccgccccaaaataaatttacttgtgggtttttaaatccaacgtttgaccgtccatcttatttaatttttttaatgaaaaaagtaaaaaaagaatacgcgtaaagtattattcatgttttatcatctaataacaacaaaaatactaataacaaaaatattaaaaaaaacggatgatcaaatgttgaataacaccagagtaatgaatgaaactcttctctgcaaatggatctataaattagaatctggtaacaccagcccctgctgtgaattgctaaggaaaaaatacttctcagctgggggaggtttctttcagtcttctactgatgggggatcacaattttggaaaggacttcatgaagtaaaaaggtggatgaagtttggtagtgcatacaaaattggctgtggggattctgtacagttttgggacgacatctggttaggggagtctcctttgaaaatccaatgtccttacattcacagtgtttgcagtgaccctgacaaaaccgtgaaacaaatgttgtctggaggggagtgggaaattaatctcaggagatctttaggtcaagacgaattacctgattggctaaggttgtaggacttacttggtacagtccaactgacgacaaagagagatattatgatttggaaattgaatccatccgggagatttacaacaaaatctctttacaaggaaattttacaacaaaatctctttacaaggaaattgtttttgggggagtcaaagacattctgcttcaggaactctggaaagcccctacccccctaaaaacgagagtgttcatgtggttgatgttacaaggaagaattcaagtagctaagaagctcaaaaaaatgaattggtcaggtagccctctttgcaagctgtgtggcttggaataggatacagatcacctaatgtttatatgccctccggcacgttttctttggtgctgctacagagatgcttttgggtggaattcgatccctacttctagaaacgatcttctaaacctttttcagaatatgaggcgatcagatatgagagtgttgtggtgttgttttgttgcaggagcttgggctatttggcgcgtgaggaatgattgggtttttaacaatattcttttgcgaaatgttgtttctctgcctcacaaagccatgtccttcatgttacagtggaaagctttggcatcatctcaactaaggggcgagctggagaaggcacacggattactgcttgccaatatccgagcggcaggagactcaagcgcctaatgtcaccgtaatggtgaccccccctcagtagtgttcttctcttttagactcccagcgcctttttgttctatccctgacttgttatggctgtgccagcagcatttctgtcctacttaaactcctgtgcatctcgagctggcagtcccagcggttgtaagactctgttatgctttgctataaaagctgggctttggcctttgtccaaaaaaaaataaacttattttgggacggaggatataccattatagaatttggaaaaaaaaaacagtgcagtagcagatgttagcagaggagtcgaatgcatgtgtttgcttggccatactttgcctgcgagcactgcattgtgtattgtgtagcctgccaacgtttgcattacgattataaaaagggcagagatctgttactatcgctatgcagatgtagccatactgatactgctgcctctactctaccgatcggccatcaatggatcgatcgatcaccatcgatgcctgcctgctgcaagtctggatggacgacctttttctctgaattgaagctaaagttcagtaccgagtactgtagtgggactgtgtagtagtaaaagttatggcgctcgcagagctgcagatccgggaaagtacagttcttgttcatacattactgtagtactcgtaggttaacccttcaaaaataaattattactccctccataatatgatgtatgcagccaataggagagcacacgcaatatatacttatatcgtattaaatttctgatagttccctaattttttttcccaataacatcacatcaaatctttgaacacatgcatagagcattaaatatagattttaaaaactactaattacacagttaggagggaaattgcgaaacgaatcttttgagcctaattagtccatgattagccataagtgctacaataacccacatgtgctaatgacggattaattaggctccaaagattcgtctcgcggtttccaggcgagttatgaaattagtttttttcattcgtgtccaaaaacccttttcgacattcgatcaaacatccaatgtgacacctaaaaattttcttttcgcgaactaaataggcccttagatatataggtccactttgaattgcatgattggaaaaacggataaatagaaaaaaaaatcaagattctgacaagttcaaatgtaaagcagattaatacaaaacacatgaatgattgtattattgaactgcgggaaaaccgtatgaatcggataagagagatagcataaaagcaaattttccaaaaggttggagctcttactaagttcctctaaaatctatatgcaatgagtcatttcataggatttgaaaagcataaatctgtttaatcaaatagccgcatacaaaagtttctataggatttgaatcctatgaaatttctacataaatcctttgattcaaaaaggccttaagaggagagaccgagatagagtagctaagaccggtgttacacactgcacatcttttctccatcccaaaatattattatcttgtactatgaatttggacaagggtatcgcggatatgccccatataacactatgtagcatcacttttggatgaacgtgtaacgcaaaggacatgtctttatacgagagaggatataccatggcctaacatcatgagatattcgggtagagagaagagttgtggttattttactaagaagggcctcatcatagctagtttaaacatttgtgagcagttttcaaccgagtgcattctcacatgaaccttggactatacattacagataatcttaaatttggatatagcgcatgtttagatttacagtactacgttatgttcaagctaatattgatactagattaatatattttgggacgaaagaaatataagtaaaaataacgtaggtcactctgagtttttacaaaatgtgccctaccaatccatcgataacttcaatattacttctacattaatagagtttggtttgaagctaaattttcacaggtcaactcaatgtgatgtccatggccaataatttgataaggtaaaggtccaaaatgatcctttattgcttttaatccctttgtaaaaaaatttgtaaggaaaaatttgaacacagtggacatagtgctcgtcgagatttattcttatgattggatttttttagatgaaaagagtatgtgacatcacagatgtatgaatgtgcaggc

SEQ ID NO: 10353 - DNA, 20816 bp, Oryza sativa
cggcggctcgaggcgcgaggccgacggcgacgcgacggtgacggcgcggcaacggcaacggcgcgcgcgacgggcgggcgacgcggcgcacgcggcaggggagggggcggggctagggggaccacgatcgaacacctatgccgcaatgaacagtaacttttcctatttatcccgatttttgcccattttctatttaaatatagccctataaattctaatttttgcataaatgaagtttgctccatatttgtgttatcctaattaaaaattcaccctactttaatatcactcatattttgtttatataatttatttgaatttttaattagggttaattctcattccatcgtactaaaatttaattattgctaatatggtcgcgataaaattttatttatttccaatcccacctaatctttattttaatttatattttaattatttatttagccaacttgatttttagggtttattcctagttagttattcattattcgcgattaataaattccgagattaaaatctaatgaaataggcgaataaaatcggcatgatgcaatatttttggtgttttgatttcgttggtcgaattttcagggtgttacactggtgattcattgaatgcatcaacatatcaattgatcctacggtctattttggaagaatcattcaggtgagcatcaactaatctttggtaagctaattaatttcgaattttgttttctaagactaagtttagatacatctacatgttttataaaagtaattgtgaaaagagaattgggcaacgaaatgacgaagacgcgattaaaattaattctaaaagttaaggacagttaaggacgcgattaaaataaagccgtgcctagcaggcaagaatcctcgtgcagtgtaccgagataaatcattatcgaataaaagagtactaaatctcaaaaaaagaataaaagagtactccatttgagaatttatatcttgtcatttctaccatgaatagagaacaatgcatcaatttgctccaatggaatatatattctgaagaacagaatcttgttacttacattatttgactttatgtcactgacatatagatacatactgagatgcagtcacatgacttaacaccagagaatccgcatccatatttcgatgggtactctctacaactccccggtactataaaagaaagaatctctgtttttttatcgcaaaacattaaaaaaaaaggaaccgttgaaacgtgatcttgagtgatctattttcaattgcaccaacgaattaaactgaataaattgaccaagggttagtgaacatctccagtcattttttaagagctcactgtcgaagcacttgcatcaatcttcacaaccaaaaatagctactagcaccaaagaaataagataggtagaatctgataaaacctgctcccgaataaacatttttttcattaacctacgaattaaactcactaaaattgacgaaattaagcaagccaataggtcctcgacttttaaagctcattgttgaaggcagaagcacttgcataaatctgcacaactaaaagtatgttcaaatcccagacttttatgtgtgcttgtatttacggacgattattttttctgacagacgatgtacccgttgataccggggtgtttgtggattgtgataattttatcaatttcaatatattggcctggactttggagatgcttataagtgtacaatatgcatatgtgtacttatgatgagagtgcttgcgtatatatgagagcctatgtttgcagtgtttctataaaaaaaagggttacagagagaactggtactgcatttagcacctactctgtatcaactgctatcttgattataaaagcatggccataatgatccatgctcttaaagttatatcaactggctggcaacttagtactactaattttcagtaaagtgttgttcctttcaagaacggcaagggcgatcagagcgtcgtcttgccgatctgcttgccctcatgggcaggttccagctcgatgtccaaaccctcatcgcagagctcatcttctgtctaaatgcaattgcaacgcatgtgttctactgttcttgtttcttcttggttcagattgtacttaaatttgttggtgtcagataacatgctggccctctagttcatcccacgacgcagagtagggactattcctattgtgttccaaaaaaaaaaaaattacatacgtgctattcgttctctacattttttcagttctgtgacagagtgaaacttcctgtgagcgagtaaagcttattgtacaatggtagagtactaaattacttctctttctacctagagacaaacatcaactttctttttataaacacattagaaatggagacgctcacacacacacacacgtgcacagtcatctctacgaacagaccttatccctatgagcacatcagaaagattaaaccaacatatctttatattaataaagttattacaaacgcataattgttgataggtacgtcgactaccactgagacattaactgatcttggtaagaccttgttatggtccaaatagtataattttgatttttaagaataactttaaatttttacttactgtcttagcaatcataaaaaagaactgaacaacaaatatgacaaaatgagacctttaaaattaattccaaataaaagttaaagttcaaaaccacctctgaagtatataatataaagccgcatgctaagccggcaagatcctcgttctgtgtaccgaggatgcaacaagatggatttaaaggacaggccccatggaactttccgatatgttctcttgtgaatctatcttctcatttctccttcatgtaacatgaacgtggaacaggtgcgtcaaccagccagcttttgaatgtaacatattcagacatgaacattaaaacagagaagaatctgcgaaaaattcatccaattcatccatgaaaattaaaacagagaagaatctgcgaaaaatatggtattggtcctattggataagctgtttgtatttgaaaccatgaaccatactgaataaaactgatcagaacaggtcaacagatcctatacttttttaaaagctccttgttgaagcattttgcataaatatgcacaaccatgagatgttactgaagaaataagacaagtagtactgttcttcacaatactctgaaaacaaccttcttggttactttttttagacaatgaccgtaatgatctttggtctaatatttatatcacaattggccagcaactgttagagaaaatgacctcaatgatctttggtctaaaaattatattgtgtcactggtgtcttgtagcctcatcaccttcccatacctaacactatcccttttaaaatggtctcaactcttctaaaactagcaatgtggtactcctaacactaggcatggagtattaccgaattaatattcacaagcatgtcttttatgagatggggctttgtgattctccatatgggctcccatatataattccaacatcctctccattccttgacttcgtcatgtttgaatctcctccttgaagtttctatttcaggcccaaacaatggaaaagcaacaggaatgcagaccaagcacgcgattctgaacaccacagcagtagtagtgaaaccgagagatccctgtcgctggtatagtttgctgtgctgccttcaactaagcaaggccacagaggcctagtttacttccaaacttttttttcaaaaaacttttctatcacatcaacactttcctatacacataaatttctaactttttcgtcacattattttaatttcaacaaaattttcaattttgacgtgaactaaacatacccagagtgatcagctgctgggcaaaaccgtaaatcgaaacgattctgaatttctggttcacgggtcggctggaatcatcgtggtgtcgtattaatatagtagtatttaactgcactgcactgtatcagtttagtgtgaactttacagagagctatactagactacgatacagagagaatgacagattggcccgatcgatttgttctccggcatgggcgaccctacacaaaatgcttcgttacagatagccaggtcgatgtgccgtctcctttgttgcttttcaccttttctttttactcaggctcacccagacacagacagtctcacatcacaagtcagtatgcatatgcctccaatctctgcagttcccagttggataggaggattcctagataatctcgcagagttcagtcgcacggctacagaatcggacattcagatcacagttgcaagcaacagatcacatgaacaagctccaactaatacagtttcagttcaaccagtccaatgcatacaggaacaaatcaagaaagttccagctcaccagccagtctttagtgtcttgctaccttcttcaagttccaacacgtacaaacagaaagggcaatccagatctccctgaagatgtgtgctttgtgatgaattttttataatcttttttgaagaataagctttgtgatgatttattaatacctgaaactcaattaggttctaaagcaagcattgcaagtagaggctctagagtagcatgacatgaagaggtagttacaccgtgtttagttccaaactttttttttcaaactttcaacttttctatcacttcaaaattttcctacacacataaactttcaacttttctgtcacatcgttctaatttcaatcaaactttcaattttgacgtgaactaaacacaaccttagtaccttgagcattcaaactccaaaaaggaagctgcttgagagagcaaagaagataccaaaccctcttctttccctatccccttccctcctatgatcctatcctatcctagcttccattccccctcaaccttgcacatcaccatcctccccttaatgccactcctcgcctcgctgctgccgccgcctcatcgcattctagagcattgctcatggcggaccaccaccaccagccgccgaccccaccacggcgccatcggcgtccccatgagctgtccatggcggcggaggaacgacaccatgggacgcagacggcgatggcgtcggatgacgatcgccaccatgatcgtggcggctggatcaggccggaggagaagcaccggagctccggcgtggcgtgggcgctggtgatcctgtgcacgctgctggcggtcggcgtgatcgtcgccggcgcgacggtgttcgccgtgtacctcatctacaagccccggatgccgtacctggtggtgtccgacgcgcagctggtgcggctggactacgaccagggcggcaccatcgactacctggaggcgctcgtcaccgtcatggcgaggaacaccaactccagggcggacgcctccttcgcccgcgtcgacctcgcgctccgcttccacggcgccgacgtcgcgcgcctccgcgccgcgccgttcgtggtggcgagcgcctccgcggcgccgctccggtacgacgtcgtgtcgaaggggcgcgcgctggacgccggcgggatgcgcgccatggacgcgtcgctcaagtccggcgtcgtgccgctcgacctcctcggccgcgcgcgcacgcggtggaaggtcgggatcttcgcgtcgctcaagttctggacgcgcatctcctgccgcctccacttcttctaccccggcaatggcaccgtcatggcctccgatcgcaacacctgcacctccaggtcgccatagccgatcgccattgattccaattcctccatttgattcgttcgttgcatctcgacgccatccgagacacgtacattactattacatcgcaccattacagatcatgtttcacttgtcatacttgtacagccaaataatgctggtacagtagaatctctgaatctacaagaagagtttattcaaatttagcgcgaaaacaaacacatttatatttgtaattctttattttttctcgatcagtcccctgtttgtactctgtaccaccaaattacgaagtcgatcctaattcctaaacagtgtgtatgaactacttcaagtgtcttttcgcttcgtgtcattgtcaggaatcagaatcgataacatcatcaactaatctcttcagtgttactactgcaaatccgatgaacattctctgacaaaatcagacgctgtctgtctactgaaaactgataatacttcaccattgggctgggcctgaattaccagattggactttctggcccaatatgtaaatccgatgaacattctctgacaaaaggaaaaagtacatcgaaggtccctccctgccgccgcgccaccgtgcggcccacgatgggccggcccgcacaaggagaaaagtgagaaagagagaggaagaagggacagaagaggggagagagatggtgatggcgtagtcaccctgccgtatgggttccacgctaactcagctaccacgtcggataaaatcagggtcaaaatcgtccaagtatccaaagtgacctggttttgtaagttgagggatggtatacaattttataatccgatgacaagatgagattggaccttatggcccaatatagaaggcccacctattcttgggccgaagtctaagcccaacaaccggtcagcgagtcgcgacggggagggagtggctgggaatcgccggagaagaggaggatgacgccgtgacacgggagcacagcaaggtcatcgtcgtcggcttccgtacgagactaggaggagaagtggggattggattgccgcggaattatctccgtcgctgtcgccaccggccgtggggaagcagcgcgcggcgcggcgcgggggggagagtctcctccgccaccgccagcgtgggcagtgggactacctccttgccccgctacgcgacgcggcgacgtcgccgtcggcgtcgtcacccctccgcacggtgcactgaacgtggcgcctccacttggcgcgcgacgcgacgcgacgcggcccgccttcttcttctctactgctacttaaccaccagccgcgcgcgaagtgcggcgagcgcgcaatcgaggtcgaacacttggccggcatgaagcccaggcctaccggattcggggccgcggcggcggcggcggcggaagttttggtggggggcggatgcggtggatgggcgtggaggccgaggccgaggccggcgacggtggcctccaccgcggcgatgtcggtgagggggcctggtactacccaggcggccgcggcggcaagcgccgtgcactcggagcgccaccgcggcggggtgcacgggctgcagctccctccgctgcggctgcagttcaccgccgacctggaggcgcggatcgagaaggtgatctacgcctgccgcttcatgaccttcctcgccatcgccggctcgctcatcggctccgtcccctgcttcctcaaggtcgatttttatctcctctcttcaggttcgatctactcctagcaatttgttgactgtccaactctgcagggctgcgtctatgtgatggatgccttcatcgagtactacctgcacggtggcggcaaggtcaccctgatgctagttgaagccattggtaactaactaactaatctccctaaacttgatgctgttctacacacttcagccatgagcaattaaccactttgtatcttcagcaacacagattagcagttgataacacgggagcacaagcaccaaaccacaaattgcatcgttgctacatgcatcctagtggagttatatgtagtaatttctgataactgaccagtgtgcatttcttgatttacctcagatatgtttctggttggaacggtcatgtttgtcttcgggacagggctatacgagctgttcatcagtaacatggacattgcaaagtcatcatcctatggctctaacctctttggcttgttcaggctcccggttggttcacgcacttagcatccctctaaatggtgcggtaactggggaatttccagtatcctgatacctctgtttctatctgcaggaacggcctgagtggctcgaaatccagtcagtgaatgatctcaagactaagctggggcatgtcatcgtcatggttctactggttggcatctttgagaagagcaagagggtgaccatcacatcatgtactgacctcttctgctttgcagcatcgattttcctctcttcagcttgcctctacctgctctccaggctcagtagcaagtagaaaaataggaggtagcgacacctgaatggctggagcacaaacaggtcttgtacatatgacataggcctgttgtgtttcctatgccgtgcaacacctcatgttatgtttacataatgtaaaattagaggggagtttgcacatctcacgtactctttgtatggaatggaaactactttgtatagtggagccataagacattattgtcaccatcactgtgtaccacctggtactgcaactcactgcttcgatgataaatataaatagttactgctatggcatgttatgaattgattagcaatgctgccttttctgtctgtgattcttttgaagtttttagagcaggattactttgttgatttcttttatacccccaaaagtataaccaagtgctagttaattagtttagaccaggaggagttgcacctatttcttattcttatgatgtcttttatgaacacttctgaatgatatgtatgttatgctattatatgccaaacatactacttgccttcaaaatcattggtgtgatacaggaatgctctgacctccctctttgatattagtagttcctatttgatcacaaggccctggtgaagcttgccaacatagtgtttccatattatcgcttattttcttacacacagagtatatttgatgaatggagtgttgtttggtgtgactactggcttgtgaatgaattgaaacctgcagaatctaattacgtgttatgtatccatgtccttctttctaaaaaaaaatataagtgaagctcatgatgtactctttgccgtatgttgaagcttatctgcgtagctatcgcccttatgagtaagaatactgaacacgatcattaatttgtgaggttataattctgagcaaaaacttgcttgatgttgcagttttatgtataactactaaagctgatgtttcagttctgtgacctacgtccggccaactgtccttcccacacataagatttggatgccagattatctttgaggtatgtttctgaccttcagtatttgcaactgttagcatcatgccatgatctgttgatttctgaattggatgcgccaatgtatggttgttgccttgagatttgtttctgagttctcacctagtatttgtaattcttaagaccattcaatgatttccgagttgaatgcatgggtgctttcctttgaggtatgtttctgctatcaagtattttttaaactgttgcaacattcagtgattcccaattgggtgcaccaatgcatgtttgatgcctatactaacagcaattgacctattcctaaaagtatttcgtagagaggcaaaactgctctggcaagaacgatgaaaattcctatgctttatgaactttggttaagtatgacaccttttctcttaggtgatcaaattaaaggagaggaataataagaagagcagcttgtattgtgccacaaacgatgacagaacctgaaataaattattcaggagttccaagccaaccaacgggaagcaaaggttcccaatcgaaaaaagacttcaaagtggcctttccaaacataaataaaagttccaggaatttgagaaaataaggatcccacaggggaggaataatttttggtggcgcagcaccttgaacgtatatacaatataattactttgaacatttgctgccgtatgatctcttttctatatgcagccgtgagcaacaaaattagaagctccaacttgctgttgtttcatatacataatagattggcagtctctgataggtcagtcatggttgcttgaacttgatgggaacacacaaagtgttgcacttgatgttttaagtatgcaacttgcatgcttaattaagacttgaaagatatatttagcccattataactttgttgctgccaaagtgtgggttgtcgagtattatctgttagatttattacaagtggatcaacttgtctattaaacttacattatttagcacacattttgctgggataactgatcatggtaatgagcagatgttttcatgactggatcctcagtccttggtaacatttggtaaaaaaagaaatgatagttcgctttcctggcaaaataagttgaggatgatcatggtggtaagaaggatgattttacataaaagcattatcctgatacatgtcaggttggcacagatttctcttagacctacatattcccatggtatcaattttttattactaatctcactctatacagtgtctattaggcagaagaagcttagatgtttctaagaatcaaactgaactgggaaaaggtgttccctttggctaggattaataaagtactaagattttgagacatccaaatcctaaacaattggctggggattgctgttatcaccacccgggtcctcccatcacttaactcctccaaaagtacctttcttgaactaaattaatgaaacaatctgcatatataaagaagggagctgctcaggtggtgaaccatcttacctgtgacttagtgagtaacctctgagttcttctcttccaatctccagctctattttgcttgttagcttcatggccatttcgtcgaaaaatgttgctgtgttcaagttgcttctgagtgtcatctttttcatgcagcactctgtgccagttcatgcaaggaagctggtagtgagggcacctatgatctgcatgcatcctccatgcacacggaggaatgccctggaggtgccagctgaacaagttgattcaaccactccaggccatagccctagcattggccataacactcctcccaactgagatgatctgatgctgctactgtgtcccagcctgaaatttgtaactcgggtctgtgaaaactcgggtctatgaaactcatatggtgtttcctggagcttctatgcatttgttcagaaaaggcgtaaagcatgcgactgaagaagctcgcgaagattttgttttccttttttcttttgttccccaagacttgtgcatgcctgcctgcatgctttcttttgttacctgtgtgaaaaacttttcctcaccttgtcttagaggagatctacagatctgtagcctgtaacagtgtgtctgttgaaaattttaactctccatatgttatgaacttgagaatggatgttgtaaggcgaggttaatcggctattttcttcaaaattttactagtacaatattgtaaactttaaagaggtacaccatgagtggtcctttggttttctacatatcctttgttgagcatgtaatttcgtccatatatacatcaagtttgtgtaaattgatcaggatttttaaagtcaaaattaatttaattaccttcaaatgagactgaacaggaccatgtttttcttcagaatggtgtaggacagcggtaacattttttcttaccctttgttgaaagataaattaacgcttggggtgtacaattgtataatgctgatactattacttgacaagtttatggcacccctggagctctaatctaacatgtcatctcattgttgtgtctgttttcttctggcaaagtgtggtatttttcttacaaagtttgatatgtgtagaacagttttgttatactgggtactaaaaagaaaataattttcctttgttcttcacttgtttgctacataatactactaagcaacactggccccttaatttttttgatcatttagtatgaggcaaaagaatgcagtggcagtagaactagcactgtgatgttagtaaaatattaagccaacaaatggtgcacaaatcactttctggtccagttcataaacaaatcacagtgtcctaggtagtactccatgctaatgcatctccttttgaaaaaaaaaagaagcatcattgttgcaaagaatgaccaacaacaggtagtgactgagaaagatatttccgaattaaggcatgtgtgggaactgagaactgataggttatttttaacacatcttctttattttattttttttttttcttgattgatagagaatctgcatcagccatcttcagcaaacataatgcagtttgttggtatggaaatagtgtgagatatcctatgcaagttataaaccagtttctttctcttgccattggagagaaatttcatcttgagctgtcacttcaatttatggctcccctcagacactgattctcaatctattacattatcaaaacagagggaaaacaagcgtttaccttttgctttcatgccctataaatttccatgtgaataaaagaaaagaaataattccgaattattgattgtagtgcgggtccatattataactgtctagattagaaaaagaatccacatcaaatacagttcaaatgataattgaaatttggaatagaatgaaggaacttcagaatataaaatgaaataaaaaacaaccgatataaaagaaacttcacaataaatactaaatagtacttcttccatttttaaatatataacgttgttgaaatctggacatttgatcattagtctcaaaaaaataagtatatttattttattttactatgacctttatcatttaatgcactttaagcatgtcctatattttttatatttgcatatatttttttaaatagtacgaacaatcaaacgtatgtccaaaactcaacagcgtcacgtattaaaaacggagctagtaataaaataatctatctactttagaaattcccaaaaactgatggttcgtgcaattgccaagtgtcagactccagtgacgccgttcagaagaacaaagagtaatctttcagtaacccatagttaattgaaacactttatccggccgaggtatgagcattttcacagcgttgtcgatgtctctctggctgctggtgaatcaatgatgaatcatggtcaaaccgacgacaatacaagagctgggcatctgcaggtacagattagtgcatctcctttacaacaaagaaaacctcagtgtttttccttaacttgaccagcagcagctagtgcctgacaaagctgtttcctaacttgggtatgtgactaagcagtgataagatatctgaaaaaaataataagtagggtgattatattaattattcttaacaccttcactactaaccttttgttttttggtggtgatcaggtcactgcaattaagcaagtgatcaattgatcaaatcatcactagctaccctgcattctccaagataatcaatacagcttcagtgtggcaacaaattaaagctgctttgttctcttttgcagatcaatatctgtgcgcatgcttagttcatcacgaataaatataaaaaccatcacgcataaatataaaatcattcatctgttggtattgggctacgtggttgaatcgagtgcttattattttctgctaagttgtatttctgtgattgtggatacttagtgcaattgtgcagctatctgatcaaacttttctctctttttttaaacttggagtctttgagaattcagatatttgcctcccatctcaattgataagtacgaggtgtatacagcttgattgcctcaccggctgtcaggtggtttaattatctgtgggctttccactttgtgttggaaaagtggtgatatattatccatcatttgtatatatagatggatgaatacttgcaggttagcatgactagtttaatgacaccatcagtgttggacagtggatctcatgttcttgctatcctctatgtgcatcatgccatcatgcttcagaattttatctcatttgttgtgagaaaagataattaagtttcaggtcaggcatctcgctcaacgaaatttaatgcaaattcagatggaactgtcttaaatcttaactaatgtatcccaaaaccatttatgaaaatgaaataaacctcctatttggctgagccgctaatcagtttggaatttcagaatgcttactaagtagctcatcagttccatgcctgttttgccttctcttcaacgaattgcagagccgggacagtaaatagcttgcaaattgcaccaaacatgcaaattttgaagcatattaaacatattaatttacataaattgtacccttcttcatgaaatacagcgatgattccttgttgattgagctctgaatgatagataattcactcaattccctcatggctacgcaacagaaggcatcaaaagtaacgctgattgcatcatctatcaccaagtagcagtagtactctgctttgctgacaccatgtacagatgtactcgctccctcacctacatcatcttcagagtttaatgtagttgacagaaaaaaaaaggcttaagtcatccaggcatcacagaaacgccattcacattttttttttgaaaggaaattaagcaccagggtgataaatttccaacctgaacgtcattttttgttgttctttcagatatttcaaccgtttacatatcatcttagttatttgctgtatctgttctgtcaaacttatctctagtttggaattcaggatgctaattatcccagttcatgatttcaagtagatggtgataccatgggtgttctaagaaaaaatgagtttgttctgggacatttgacgtttgaaagttgcagtggttactgccaaaatgagttacttccaatcttgaatgctgacgctactccctccagccaaaacagaagtgccgtcatatagcttgaatatatcaacagtatcatatgaataatcatattagccatagaaaaccatacaaatatgattaatttacagttcgagattgtgtcttgaagaccatatgtagatgtgaagaacagcactcccattatctaaaaaaaaaatgtgaagaacagcactcgttttgctagtatttgcaatttcagggttcaacaagtaagcaatatataccaacattttacagagaactttctacctcttcttggatgaaaaacgcaaaatatcaaatgatcattgaagaaaaactagtaacgtggagcatttggtcaagtagcaagatgatcattgacaaatctctgttccgaaacactagcctccgatcaagaacacatgacgagtgtgcatatatctatcttaatttctcaacccgtggctgctacctactccattgatacatttgatcactcgcataagatgaattgaattctttgcatgacatcaaatcatcaattcgatggctccagtgggcagatcagctttttgagctttgaccatggtgctcattgccggcgaggtcgtaagcctccttcgccgagcgaatgcaagaatccaagaacgaatttattgcagctagaggctcgcggcaatctccctttttaaggggctcatcagctgcggattcttgcacaacacatcgaatttgcattcgcattagcattcgcatcatcgcttgttgcctcagagagaagagagaaagaaagctcgagctctcggctcccatggcggcggcggcgtcatacgcgcacctcgtcctcgctgccaccctcgcgttcctggtgctgagctcgccgccgcagtcagcggcgagccgcgtcgacgtcttgaaggaagtagtagcaggcgagccaccagctgcggccatcgaaccagttgtcaacgatccgtcgtcgtcgccgccgccggcggtggcggcggtggtccacacgtcggagccatggccgccggtgcctccgtcggccccgtcaaacaagttcaactagctcaccagccgctaccaccaggatgtccggtcgctgtgattcggcggacgtcgccggagacgatggccggacagtcaccgtcatttcttgattcagataaaatcataaaaagcttgcatttgagcaagccgtataggtgtttgtgcgaggagtgcttctatgctctactggagagaaaaatcttcagattttagggggcgtctaggcttctagctggttgtgattaaactctgagttcgtcgagaaatctgtaaatcagtttcattttcagttgataatggaagcattttcttgctctctgattctgccttttcttcagttcttaccaaaatttgatactttgattcatctctgtgaagtacttgcattgttgataattgatgtggaagatttttgaaacctcatgtgctcttggagaggagatgaacaagtacatccataattttcagatacagccatctagtttaggtgcaaacattaattacagatacattcatggcgcacgtcaaacgtagcaaaggaaataagaacaaaaaaaataaaaatacagatcttgataaaattaaccggacagattgatggacaacggcatggtataattgggtatcaagagaaaatatcacggttgatgaagtatatatggctatggcgtgcaagtggaggaaggggcatccaatcctgcttccagacacccataaaaatacaatcaacaatatgtagggtgccatcctttggcatattggtgaaataagccaaacggcatatttgcaaacgaaaaataattcgtgaataaaacttttatatgtgtgttcttagcaatctaaaagcaaatgctggaaaataaacttcgatgaaaaaaccccaaaattagctttaaatttaacgttgaaaattcaaattttggctgataagcatatgaataatcgtgacatgtacccacaacccctttgtcccctagcagtccacccctcctccctctcgtttttctttttattttcttttgtaatctcctagccttgggttattgtacagttttttcccctactttaatacaaatacatcccacggggttaaaaaaaatgaaaatatcacggtaagtgatgctttggtaagacaacagcattcagatatgcatatactatgaactcttaatgaaaatataggttagtttaacattcaagaatgtttaccctgacccagccaacggttgggaaacaactacaaacaaaagactgcctaaaatgtcaaaacctaaaaggtacaaaactatatagcataaatatattataaaccgttagggttcgaccagctagaacaccatagccataaataagaagctacgccatgtcatgtgtcaatgtttgatgtctcgactacggtatttggacagtatggggatcgtcggtgctaggatatacgcgagactgaggaaaaagagatggagacagggatttttatacaggttcgggcccctgagctatcaggtaatagccctacatcctgttggctggagccgatgttgctttttattcaccataatcacaccagtacaatatgtggggtagcctatctaactgttgtcgacatggcggtctgaaggtctgactcatagtcgacaacagggtagccttcctcctcgagctcacgcccgacggaatcagagacagtgctagatccctacggccagcctctaaaggtaccggatagggtcgatccaggcgtatctctgatgtcgatattcggcggcttgtcttggcgtatgtaggcttgtatgttgtggcttctggtgggtgttgattgtctcttcatggtgagtgtcgatcgtgttgatcgtcttatatcatgggtgtcttccatggtggttctccctggtgggtgtcgatcccccatggtgggtgtgtccccctgtcctcctaggggggcttgtatttatacccataggtgtccccttgtccaagtagaactagggaaaccaatatggatacaatccgagtagtccttgtcgtttccatgtagaactctggttgtctttccttatccggaactccctccatatccgaaggttgtttccgtataggacatggtatgtggtgggtcctgccgagatttagtcaactactattaggtatgtggtatccataaccatgacagtagcccctgacttcgatgcaaatgaacgaattcatattctcaaccacgcgcagacattggagtaactgttatcgagctcatgtgatcgttctcggtaagtttagagataatgttggacttcctttgtcagcctcgtgcgggcaccgaaagggtttgtctaagtcaatctctaatgtcgaccgagaaagtacagagcgtacgactaagtctcccgtcttgctgtaatcgagaatttggattgaagtcaagaaactttatctcggcgggtacaccatctcttcattccgtattccttgtcaagatccagcaaccgttctcgagcgatcgagaaggcgtagagtctgcgaaggagctttgtcaacatttgtcgtactcgccttagtcgatcttggtgtagaaccatagagacatggagtcttcgtcaatgtcgaatagaattttcctgaaatcaatactcagaaaagaatatcaaatagaaatagcccccgagcgaatgcccaaagggtgacatgttataatatgtatggtaaattgaaaatgaattaaatttatcgaccaatgttttgtgtatgagcgtcttctctcttaccgacttcgatcagttagtttgtagagtcatacactctccctagcccccagccttatcgtcggagaatcgttctcagaggataatgctcttggacccttgacctgccttggttgaataagcactgatcctagcccccagccgtgaagttggaaagctcagtttctgattacacggcttggttaatacgcacggcgagaactcttacacgaccagatcttacatggtcttttgtctctacaggatccgacaaggccttatcggctctgggcgtccccagccaaagttcccttaggttcctcggaggtcttgtcaagacggcgtaaagggacagtaggataggtttcaacgctaggtgtcgtcgtggtaagggatctctgggtaaaacacttggcgatattgtgtacctgctatcaactttgttgaaatagaggtagtaggagagtcgctacaccgctggtcgaggaccaggtagtagtcgtaactcgaccacttaaagtggaaatagtgggagaaacactacatcgctggtcgaggaccaggcagtagtcgtaactcgaccacttaaagtggaagtaatgggagagatgctacatcgctggtcgaggaccagacagtagttgtaactcgaccacttgaagtggaaatagtgggagaaatgctacatcgctggtcgaggaccaggcagtagtcgtgactcgaccactcaaagtagaagtagtgagagaaatgctacatcgctggtcgaggaccagacagtagtcgtaactcgaccacttaaagcaaatgtacgagagatcactacgatcaactggttgagaaccggtgagtaggtgtccctcgatcatttggagtcgtggtacgaggaccgctacgctgccggtcgaagaccagttgtagctgttcctcaaccatctgaagtcatggtgcgaggaccgctacgctgccgtagtcgtacctcgaccatctgaagttaaggtgcgagagattgctacgtattggtgcgagaaccagtgagcgagcagaattatctctcgaacactaatggaagttgcggtgcgagagattgctacgtactggtgcaagaaccagtgagcgagcagaattatctctcgaacaccaatggaagttgcggtgctagagttggtttattgcaatttgtatctcatgtggccagtatgactcacgtacccaacttatagcatatccggatgtccgttcgcaatcatgtcgagtgatcaagccaacgacgttcacgagagattatccgttaacaaccttttctcgagtagtccagccatggccggtgctatgagataggtcgtcggtctttattggtaggttgggtgcgataattccgcatttgtcgagaatgttctcgataatggagtgtactcgaccataacctactcgagtgctcaattgttcctgaaaaatattttctagaaggcaagacatatagcagagaatatcgagtatgtactcaaaaactgcgtggatcttctagtattatcaggatataacgagcagatgtaaatagcaagcattatgtaaaccgtaaacaagcatgatttatacagaagaaaatagagcgagcccccagcgttagaccgtagttggcctaacatcggaagcactcgcacaacagatattgtataaaaaatatgctctaggtaaacataataaattatagatctgacaatgatgtatgatctgaataggtatgataaattgcagataaaatattgcgtacctttgtagatacatgccggatgtatctatgaaattagtagaacaatttgaaaaaccaatctaccaattaccttattgcgtactcattcgacatcatatgatctgacatcttttggtacgccgcgtatcttgaggcttggatgatctcgatagaccgagttgtcgatgacgatgatggttccgatctggtcggaagatgtacttcagtcgggttagatcttctcacagccgaagtcgtcgagtagcttgttgttggagaatccatctcttgaacccatctcgtcgaaatactgaagcaccaaaatccccctacctggcgtgccactgtcgacgtttgatgtctcgactacggtatttggacagtatgaggatcgtcggtgctaggatatacgcgagactgaggaaaaagagatggagacagggatttttat

SEQ ID NO: 10354 - DNA, 5143 bp, Oryza sativa
ttttgagtttaattagtccatgattaaccataagtgctacagtaacccatatatgctaatgacgggttaattaggctcaaaagattcgtctcgcggtttccagacaagttatgaaattagtttttttattcgtggtcgaaaaatccttccggatttcgatcaaaccttcgatgtaacacacaatttttttttcgcgaactaaacaggccacgtgaatgtggaacaggtgcgtcaaccagcccgcttttaaatggggattctttctgtacagtacaacaaagaatctgttgaaacatgattatgaataaagctgttgtattttaacccagaaataatactgaattaaatttgaccaaagtaggtcaacagatccacagttttttaaaagctcctcgtttaagcatttgcatgaatctgcacaacagcacaaccatgagaagttactgaagaaataatacaaggagtactctacttcacaatactctgacaacaaccttcttgattgctttctttagagatagtttagaacacttatataaaagttctttttcatcgtagtttatttttcagcctttgcttttagatactacctccgtcccaaaataagtgcagccataaatatccgtgtttagcgtttcgactatccgtcttatttgaaaaatttatggaaaatatttaaaaaaatagtcacacgtaaagtactattcatattttatcatccagtaataataaaaatactaatcataatcttttttcaaataagacgaacagtcaaacgttggacatgaacagtgctaaaactacacttattttagaacggagggagtagtttagaacacgcaaataaaaattttacttacaaattattttttatacacaaatataccgtttggattatttcaccaaacatccaaacgatggggctgaatgaccgtaatgatctttggtctaaaatttatatcacaattggccgtttagagaagagaaaatgacctcaatgatctttggtttaaaaattatattgtgtcactggttccttctagcctcgtcaccttcccacacctaacactatcaatgtgttactcctaacactaggaatgaaatattaccgtattaaatattcaaaagcatgtattttatgagatggggttttgtgattcttcatatggaatcccatattcttgatgtcctcgtgtttgaatcgcttccttgaagtttctattctatcctagaacaatggaaagcagcaggaatatagacaaagcacgcaattctgactgaacaccacaatattagtagtagaggaaactgttccaaattctcgagagaggatattctctcgttgtttgcatgttatctaaataattatatattttttttaaaaaaaatcaacaagatagattaatatgtgatgaattactttacaaacaatgtatactcaaaattaacaactgcaaaagttacaacaaaaaataaatttgattgcgaatatatattaactagatatattttaatttgtttttaacttgcgtgattgtgaactgatctatcacatattaattaatctagttgattgtttataactatttggatgatatgtaatccataaggggatgtctcattcagagtttagaatcaactcccataatagtagtgaaaaccgagagattgtttgttcgcgctgccctaatggtggtcgtcgggcggtcgctgtccacgctgtcgtggatgtacatcgtctccgacatgagccacgccgggtttaagagcatcaacttcgggtggggggaggccatctatggcggtctggcgaagggccgctccttggcgtgacaaactacttctccaggtccaagaatggcaagggcgagcagagcatcgtcgtgcccaaacttctataccttcgtgcgaaacataccatttaacaatttaaaaaacgagctaacgaaaactgagatagaatcatatattacacacctggtgcacatacaccggtacattgcactagaatttttattattttttagactttttaattttaaaatagattgtccccaaaacttattttcaaatacgaaccttttaattacacttgcgtggtgaacactgccacatcacccaaaaacttataatgagagtgttagtattattttgccacaccaatctaattgacgtgttgaaagtcgaaaccaaagtggccacgctaaaaaaattcagattgtaaattagttttgcgagcccttatttttaaaatttttaattttaaataagttcagaaaacagaaaaaaaagggtacactggacatatttgaacgaggactggttgtagacccccgtttttataacaggaatcattcgtgtaaacagtaccattttcctggatcaaatagtctggtacatacgagttcatagctgaaataccaaatgcttatacacgagagtctagtgctaattattacatcataagcccgcaggtattgtcttaaatcatcggaccaagcggtccggaatacattccaaaagcagagttaggtaaggcagcggaattaaggcagcggcacgccattgccacaggcaacgaccgtaactaagacctactgggcgccatcgtcttcgtcatcctcctggtagtaagcgtaaggatcctccgaagcttcatctccgacctctgattaagtttgtatattgcaagggtgagtaccaaccgtactcagcaagccaccacagcaataatgcacatgacaggggaatccaaaggatggctatggttcttttgcgcaaagcaagttttataattcttttcacaagcctaagacctagcgtagactgatcaagttttaataccagtgttcacattaaacaacgatggttctgtccaccatccattgtaatcccaaggatagcttcccgccattgagtcgtcatgattttctgaggacgtccatattcccgcctctcaggaagtggctccatcagcataaaaatcatcatgcaatatcccatcccacacaagttaagaatttaaagtctagccaagtgtaatacatgttccggtactcattaaccgcgagcacggctattcgaatagatttggtttactcacactgcagtggatgtacactttacccgcactccgcgactgtccaacacgcctcgtcccaacacatgagacgcgtcacggcaaagcttttcgataacctcgcattggcagtacccgctccatgaacttaaatccttatgcactctaggcgtccatgtttctagcagtgagaggagttctgacgctcccgggaaagagaagtctcacacatattaaattatggttcaagttaagttctctctcacacactcatggcagtcctaccaatggcgacaccgatatagggcacgcctctcggccctacctcaacggttgtcccatcgtagcgcacctgcctcactcaggggtgaaccatctatgcagggatactgcctccgctcggctatctaatccgctaggtctatacccattcgagaagtacggttgtacgggggtcgtttcatgcttaacttcatggctcggtccttaattgaccggggacggtactagcctttcccagataccacccaaatcctccgtccgccccagtcgaaaacaattgtttaattttatttctcctctcacaaatcatatcatcaacgtcatggcaatgtggcactcatgtctccacatgccgcatctcaattaccttcccaaaggtaattgcccaagcatatagcatttgataaatatgagtatgcatgattctagaatggcatttctaagcaattgtcataattgactagggactcatacgtaatcatggttacaaggattttaagggtaaacaataatcaaggcatggcataatcacaagtaagatgttcatcattgcatgcaattttatttataaacaaaataatttcgcaattgggatcaatatattcaaagaatagtgatgacttgccttgctcaaagtcttgcggttcttggtcctcgcttggatccgcaactccctcggactctaaaattacgtgcgaagaaacgatttgaattcggttaaaattcaaataaagatccaaataaatccaaatggaagtcgaatgcgaaagttgattcttttatattaactttactattcgcgaactagggcaaatctaatttcgatttatacatcctaaactatttttcgggtataaatattttgttatcataagtttttaatttaatctacccgagcattatatccatataataggttagaaattttctatcgcgagctaaatatcggacggaatcaaaaaattatcttataatattatacgatttaatttaccctatgactaaccgattaaatataatatacgtctaaaattcctagtgattaaatccgaacttctaccgtgaatcgattacttatagagattatccaaaactaatctataatagtctataacaattcatctaattgtttagtcgttaattacatctaaactactaccacgaattgattttttttagaaattaccaagaataatctataatttatattaaattttgcaattctatgaccataattaatctataattaaattctaattattttagattttcttaaactattaacctccttaatttcttcctaattttctatttatttttccttttctttttctccattctctcttctctttttctttctttttctttcttttcgctctttctctttttctttcttttctctctttctctctttttctctctgccggcctctcttttcctctctctctctctcggctctctcccacccaagcagcggcggcggtggacgcgagggggaaggagggcggctcaccggcggcggcagcggcgacgacggcggcggcgatggtggtgcacggcggcgcgggagtggcagcacggcggcacgggaacggcggcgcggcggcacgggagcggcggcgcagtggagagggaagaggggaggaagggtgagatggggtgggggaaaatggagagagggggggggtatttgtagagaagggagaaggagagggggaggggcagcggcgtaatggcgacgcgacggcggcgctcggggcgggacgacggcgacgcgcgggt

SEQ ID NO: 10355 - DNA, 14794 bp, Oryza sativa
cctagaatggtcatttcattcataccgctatatgcgaggatgacttggcatgctcatgtggcactttttttgggtctaaggactatattaacccaaatgattaatttggaggacttgtttggatgatttgaaatctcaaggactaaactaagtctgaagcgaaacttgagtgaccatattagctattcaccctaaaaaaaagtaattaaggaaatgtacattccagaccgccccagggttattgaagctagcacacagcattggcgatctctgcacgcacgaaacgatgtcagaatcagatctcatcacgcacaagaactcaactgctaaaataatcactcgcagattgcattgatgatgccaccactatgaatttatctatgcatatattcaaaaatgaattttatatatacatgtatgcgtacgtactagttaatgacagtcagagagaatctcaccggtcacgtagtatacatatatatgtccatgcatatagtacaatcgtataaaattgactttgcacgcaaacaatataatgtcctacctccatatttttattttaatgtataacgtcgttaactttttatccaacgtttgaccattcgtcttatttaaaaattttatgtaattatcatttattttattatgacttgattcgtcatcaaatgttttttaagcatgacataaatattttcatatttgcacaaaaattttaaataaaacaaatgatcaaacgttggtcgaaaagtcaacggcgtcaaacattaatatacggagggagtattcaagttaattaagctagccgacaaacaagtttgcatatataagctgacaaggatgacacatgaccaattaatttaattgaaaagaaattagaccgatgcaaaagtaaacaaccgttgcattttcaatcgacagaacctgagcaccgggggtgagcgctctgaatttgatctgaaggtgtgaaaagggtaagaaaattattgtccgtatcgatattgtttccataaaagtaatagaaaaaataggaaaaaaaaagtacgaattaccctgccgaactattgcggtcgaccggattatacccctaaactcaaaaaccggatattttacacccttaattattgaaaccggacaaataacccccctaaacactattttgagcggttttgactagaaatcacacacgtgacgccaacgtggcaatccagtcagcaaaacaaaacaaaataactccctgggcccacttgtcagatttatccctcaacccccctgctctctcttgcgcatgatcttggactagtagccagcgacaggcggcggaggcggacctcgcccggtcggcagcaggtggcggaggcggacttcgtccggtcggcagccggcggtggaggcggacctcatccgggcggcggtggcggacttcgtccaggcggccggcggcggagacgagccttgctcagtcgttgggtggcggagacggaccttgtccaggcggcgggtagcggacctcgtccgtcttggttgaagtcgatcctctctttgtcgtggtcggagaagatgcggtcgccggggcggcctcgagcccatgacgagctccacggagatggaggcgtgccagtgctctcctctcctctgcactcctctctctcctctcctctgctctctgctctctcccctccacgcgcgccacggagccggcgcggccccttctacgactcccgcaaccacctccccaccgttgggagccgcggcgggcgagccgatgcaggaatggtccgtaaggaggcagtcgtgcgaacaggaccgtgtcggcgcctcgtcgacctctgcccaggggcgaagctacatgcagatatgggggttcttaggaatccgggtaagaggagagttttagctatggttaccccggagccgcctgcctgcgcgtgcacacgggagagagagagagtgtgaccggggggagagagagaggggtattacaggtgggcccaagggaggcattcttttttttatttgctgactggattgccacgtaggcgccacgtgtgcaaactcaagtcaatattttagaggtgcttatataaggtgtgcatattttgtattcatatgagtgagtgtacacatattataagtgtctataaactttatagacgtttcttttaaaaaaaagtatgcaagaatactcgaagaaaattggacatgttgtaaccataggaacataattcctaaagtattgcataagtatcaattaatcttatagggtaaacaatactagtaataatattaattttgtctaaagtgtgacgatgattacttcagtctgatatcaacttcaaaaaataaccaaatctagtttaactgcccaagtatcgaggctaaagcatctcttgcatatacattgacacggatcctctgtcatactatatctaaagtagcagtggctaacaagtaaacccacatatcagtgacaactattacatatgtcaaactacatacaatccttactggtacataccacgtttgaaattcttgtcaagctgaatcattttttggttagctagctaggtatggtagcttcaaaaaattacttcctccgtttcacgatataagtcattctagcatttcccacattcatattgatgttaattaatctatatatgtatatatatatatatatatatatatatatatatatatatatatatatatgtctagatttattaacatcaatataaatgtgaaaaatgctagaatgacttacatcgtgaaacggagagagtaattcctcaattcagccacgtcgcatgaaaacttcaaattttataggtatatatgtaatgaacgaataataatcagctttacctgactgattattgaatatattgattgattcgaagcttaaatagcgtacacgggtgaacagtgtgggatcgtgtgctgcagctgcatgtcccgatggatgcatgcacgcatcgatcggcacatgaaatttcgtgcctattattagatcacccacaatgataaagtaagttgctctctataaaacatgtacatctcagcaatagactagattaatagtaaaccacctcaatggtatgtctatatgggtatctatagttctctaatacattgtcccgtttttctctatagactgtcttcaagttagtagatagttttgctctctctttatttaatctcttccaagtagtaaaatatgctgacatggatctcttgtagagagcctatagataaccattgtgggtgcctttatacttttatttttttccttatttttttcatagccgggaattaagcagcagggcacgtgccacgccacgccatgatgcatgcatgcatcgagcaaattaaacaaaaattaatatatgcatcaactcgatctcactctgccttgcaatgccctgccttgcagtgttagcaaccctaaactgatctttactctacgtttcttcttccattaatttcttctcccaaaagcaacgtgaatacatacatcttaattaattaattaattacaattaacaacaagaggagcggaaaagcagcttactgacaactaatcacatcaaattaacaagatcatcgcttaattacttttgccaattggtttgtattgaacgttgttttgatcatgagaaaattcattggcagggaaagcaagcggccattaattagggttctaagtttggggggtgacgtatactaattccattaattacccacccccaccacaagcactttaaatatgttatcttgctgccataaaataatcgccttccaaagtagggattatacgccagtcatgtgtagtaatttaatttacaccaaaccaaaaacacatcacatcaggacaaaacagaagaggagaatacttaatcgattttgctatatctcactcgaaagatttttttcttatctctcactcgattttctcactcaaatttacagtgcattttcttgtaagttacagtgtaatttataaaacttacactgtaacttttgtaagttacactgtaatttttgaatcttcacatgtaaattttaaattttgtatttgatttggtctttttcttgaggatatggtaatttaatgttcattatggtgtttcttaattgctttttgctttttattatatctatcgaattttaatacaaagattaaaaatctgtgtgatacgattataaaaatctttcgaaagatgtataggtactcccatacttaatttaaccgagagatatgcatgccatgcatgcatgggtgtaacactaccagccagaagctgctgttaaaaaaaaggttgaaataataaaaacagtaaaaagataaacattgaactagtagtactgtttaataatcacatttagatccaggaattttctcacaaacccctttgatttccagaagaacacatgagcccaaacaaaatttagtattatttcggcgtggaatttttcaccccaccccctctagatttctgaaatggcggagataacccagcttatgtacatggaaggcatggagctaagccatggtagagaggataggacggaggaagacgacgatgggacacgtggcggccccgcgggctaggtgcagagggcgccgacctctctgaggcgcgggacgaggcggccgctgaggtggaggcccatgaggccctcgaggccgccgacggggtcgccgccgacgaagagcgcggggagcgcggcgccgccgcccagcgccgcctcctcctcctccgccgcgccgccctccagctcgatgacggtggcgtgcgcgccgacggcggcgaggaggcgcctcatgacgtgcgccatgtagcacccccgccgcgcgaacaccaccacggggctctcccgcaccagccgccccaccctctcggccggcgcctcctcctcccccgccgggtctatcgtcaggctcccccgccgcatcatccccgccgccgccgccaccgcctgcatctccggccggccaccgcgcgcaccgtgaaatcaaaaaacacgaaaatagcggcggcggcggcggtggcgcgcgctgtctctcacctcgccgtcgatccggagaagggggtgtatatataagctggagaggggggagacgacgagagcacatgggggagggtgacgtcacgggaggaggaggaggtggggccctgggtggcgtctcgtggccggactatggaagcggccattaataacttgtcgaggtgacgacgacgacgcattgagctaatcgtggaggagaaattaaaatagtttaaatttgatttagagattgacctgacccggcctgattaaaattttcttatctctgtcctgtttgtttcgttagtgacagaaattttatcgtttttattattgggatccacagtttcgtctgtttatttttaatttagcgaggaagagagatggaacaaatctggtggctgatgtgtatgctgggcgccatcggaattcgacgacggcaggtagagtagattgttcctcagcacatggcatgcaactgggggtcatcatctcgtcaaacaaagaactgtactgtgccacgtaacgtccgtgtcactgcatgctcagtagtacatgctagcagagctggagctgaggtgaggttagcaattactctctccgttcaaaaaaaaacatgattaatattttatgtgtccgtcttatataaattttttttataattagtattttcattgttgttagatgataaaacatgattaataatttatgtgtgaattatctttttaatttttttcatattttttttaaataagacggacggtcaaatgttagacacggaaagcagagtttgtcttttttttttttgatggatagagtaattaatggtcggctggctcagtggcagctagctagctgacgacgtcacacaactggagctgggctagctagcttagctgccgttgacgtcgctgtttccgccgctccggcgagggatcgagatcgatcgccgacgtcagggcatatatgcatactgcatacatggaggtaggtcggcagtggcgacgacgacagtggatggatggtccacgcgctcacggcaacaatggatggaacagaagctaatggaagtagttttcttgtgatcttatcccggccggccgcgccactgcagtgatcaatcgacgatcatatcatatcatatcgatttggaggcaagaataatgcgagtgcgcgcgagatccacgtttcgttaattggagggcttaattaattgcattactgggatggagcttaatttgcaagcatttcactgatagatcgatcggtactagcttaattagtttgccgtcaactttactctttcgttggtctagcagcgaccggtcacgcttagtggcggtcggttcggtgctagccttcttctgggtctatgtattagtgttgtcggtacgtgggtcattttttttcttttttcttggttatgatcttccatggttataattttgtaattttttttctgttctatcaatataaatttcacactgtctaatacaagtcattagaaaaagagatagatagatagatagatattgtgcaatttgattggttgttttcaggaaatgaagtggttatgtctcagggtctcattaattgttcactatatgggttataaaccactatactaaaattcaaattttcaattttaaaattgattttgatgtttcttacatattttcagtacttatttttaagtcgctaagattatatatataaaagttttatctataaaatacttttcaatcactaattggttatggtttatactaaatcataggcaatcaatagactaggtcctcagccatcaatagtgctacggccaagctacacaacccaacgaatcacagagagatataattcttcttcttcctcctgtcctgcgagaatctccttaattgcccacaaataaatatgactagtacgttagtggagcagtaacaaagatttattcagtgaggttctagcttgtgattcgtagattaatttgttctgaacatgttttggaggtcaacgccaactttatgtgtgtgaggtcgtcgtacgttttaatttcgagattctctgcttcctttttatgctaccagtacaagatcaatgcgtctcatcgatatatcaatgtatctcgactagaaattaatcgcaccaatcatggactttcgtcatgcacggtccatcgtcgaattattgcgtttctagaggtcgatcggctttcgtcaccatgcacgtactagcaggccaccaccacgtacaccaccatcttcttattgtgtggggctactgactactcactccgtattttaattaatgtacgacgtcgttgtctttttaagtaatgtttgactattcgttttattcaattttttaaaaaaaatatgaaaatgtttatgttatgcttaaagaacatttgatgatgaatcaaatcacaataaaataaatgataattacataaattttttgaataagacgaacggtcaaacgttgaacaaaaagtcaactgtgtcagacattaaaatatagaggtagtaattattaagtgcatctatatattttctcctgcatgtatactataattgtaatagaaaacggcggatcagcaagcttttttggaacacaaattaatgactagtattttcaaatttcaatgtgtgttacagtttccatggtcttcttcagcgctgagcgagcttccagataggtcggcagccactcaaactcatcatcgttgatgtatccattagatagacatcaattaacattcagaaaacttatcgatcaccgaataaaactattagttgttcaggtttgatggcactgctgtggcttcgccattggatgaagacatgcctgtgaacgacaaaagaacttaattagacgtggaaaatattgtaagtaaaggatatataaagtactgcagttaatttcaacaattttcagtcggccatacagacaaattaagttaatgtgatggcattttctattacgaaaacaaattagcatcaaaattcagttaggaatttcggccactgtttttcatcccctcatccatacatagaaaaatcgtcggttaagaaaacttatcaaatgttatcaatttcttgtcatagtcttctagtacatgcccttgtgatcagcgattatattacttagaagttggttcttttttccttttttacggagaggggacaaagagaatagtttcattttgaagataacactagtaactacaactaatcttcccaaaccaagtatgcgcattgacattatcaaatatttgggaaatttaaaagtaaataacattgaaaaacatcattggtgtggtggtggtggagtgattggttcgatcgggttcaaatctcagtgtttataaatatgtcagtgtgcatccttaataccacctccattccaaattaaacataacaacctactagtactactacgaatctggatatgcttcatatatatagatagtactacaacgtgttttatccaatattagattaatatatagatagtactacaacgtgttttatccaatattagattaataggttgctatattttaggacggtgatagtattgatgcagaggctagaggccagaagttatatttccattaaaaaataactcaaggatcatgatcttaattaggaatacgagtcgatgggaattttatatgtggtgggttgtactctcactattccataatataaggcacgatcaaacttggtatggtttacaaaattaatccttagcttataatttttcatatattataagatttgtaataaccaaattataaccatatagaagtacattcaaataccaatccaacgataattttcagcaaataaaattcagttcatataatactaaccgttgatcaattcttataaaagttaaattttaaaatatgtacgcatcttatgttatgagatggagtagcacacaactgtaacatgtacaaagctggcaaatgcacggcagtcaatctgcatcgacacaaatgttggagagacttaattagctggatccctatcagcaggacctcctttggggggggggttatgaaaatctaaatcagaaaaataatatgttcaatcttgatcttgaaaaaaagaggaaaaaaaatcactcagttcacaaatcgtcccaagtggaactctggaagtaggccttataagctgttggctatcaaatgagttggaccgtatgttgatccagcagatatatatgggctgaaaaatactggtattgggctagagaccatacaactgttaaccaggctccaagcgaccaagctgccagcttttgggtttaaggactggtattgggccgaaaattatctccactactaaagtttggtaattcgatctagaatatttcactcacaaaatcttggcaaaagttgttagaggtataatatgttagttagagataagagtcaaaaataaattatagagataagatatatcctagagaagtagagatagaatcctatagataaggtacagttctagagatagaatcctagagataaatctactcttacttgtattgtactataagtctctatcacatatgtactcctatatatatcccatgagataatagatgtaatagacgagaaaacatcagaatacaacatatttgaaaaaaattcctagattaagtaatgattagcattagattagatcttcattagctccatgatcctcatgagcagaagcagcaagccaacaaccacaaccattgtcatgcgcatgcatgcatggatcgtgtggcacatcctcgggaaggcacgagaaggtcaaacttcggtgcacaggcgcacggacctccccgcgcacgacttcatctacaccgacagtactgatcatcatcagccgtacgactgcgcaattgtcttcgccgatgcaacatcgccgatggtcttcatcaacaagggaaacacgccgccgccacttgtccacaaggatggacatcccgcgtcctctaacagattaatctgcaagacgcttcatcaataacatcgaccgcgttctttacgatggcaacgaccgcgtcaccgacgacggcatcgatcacgtcatctacgactacaacgactgcatcaacccggcatcactattgtgatgaccgctacacggcgcaggagaaccaaccaaagtggtggcctcatcgccaacgatgtcctctgacatatgcaagacgtttccaatggcatcctctgacatctacaaggtgcaagatgctaacaattacagtttcgtcttcacaccatggcgtaaatatttttttcgccttcggctatatgcggctacaacaactaccacgactacggctactacatgatcggctacattgacgaacgtctacaccaaaaatcattgacggaaactccagtcaaagtgtctgtgtcatcgctatcgtccatgacactcctgctatgactgcgggagggaatagaggagagtcaagcgacgacacagatggggacgcaggaatcaggtggaggaccgtccatcagagatgcaatcgatgatggtgagtcgatggagatgaagaaatagaagatttcaaatacagtcgcaatcgttcgcttcgctcccgttacgactgagggagaatgttagaagtataatatactagttagagataagagtcaaaaacaaattatagagataagatatatcctagagaagtagagatagaatcctatagataagatacagtcctagagatagaatcctagagataaatctactcttacttgtattgtactctaagtctctatcccatatgtactcctatatatatcccatgagaggatcgatgtaatagacgagaaaacatcagaatacaatatattagatttttccacaaaattaacaaactaaacataatttacacatctcaaccttatcaatattggtgatgccaaaatttaacagtactaaattttggtaagttgatttaagtatcaaagtgaatagccccttaatttgcactcatttgcgtggatttcaccaaacggagagcgagagggattgagatagcatttcgtcttcatttttcagtacagtgataacttccatccaacacgtgcaaaaatgccaatctgagagaacacgtacatataaaaacgatttttttttgaaaattttaattttgttgataggaaactaggagctctctagactataatcgctaaacctatcctcacagctgtcattaactcattattacagtactagtactagcttttaggccgcaaaagctacagaagaaagaattagaaaaagttcagcattttaaacatggataaaacataatatactacgtattttttttcgttcatctcactgttacatgttgggaactttttgtttggttcgtttgtttgtttatttttgtttacagagcagctaaaaacgttccatcttgtttggtgatgcctttgacaattgttactagaccacgtgccattaatcgtgctagcttctagtacaaaaatatctctctagcaagcgagtatctcgccctgctgtgttaaccaataatttatgcaaatctcaacttagaataattatataattaagattctaaagacttctaaatttttggaaatttgttagggggattgctggagcataattttctgataaaatatcataattttataattggggatctatttaatagatatgttggtgatgctcctaagtattaaaacacgtgctgctcctttcgatttggaaaggctaataaaccgggcattgactagagccaaattagagtctgggattaggagagaaaagtatgacccatcgcatacgcatgggcccatcaattgggccatggctcgagtcatcatccagtgatcgagacaataaacactactttgacctagtagctttgtgttgactttgactttgaccttgccgaccatttatgtttctttttaactttgtcactcctctttaatactaactagatgacaccccgcgttttgctgtaggatatatgttagataatagagaaatgatgaatgatttggattgaaatattatgaaaatgatttgagaacgatgatttaacatgtgtatgtttatttttagaataaaataaattgtagatataattactatgtgtttgcatgttgagtttcgtgagcttaattggttgatgtgatatgcttgcatataggtcttagtagtgctaataaatgctatgcttgcatgttgagctttaggtgtgtagtgggcattagttttatagaaagaagagatatgattatccttttatccacgaactgaaggaacctgatcctatttgagttgtgcctcagggtttcagccacaaatcaaaccagtgttacaaaatgaattagcattatatttttatcattaattaatcatctcgtcgcgtaagggcatgggtcaacacataccctagttatattctctatagagttttggataccacacgaggacatcctcagtcctcgttcgactcaaacaagtcacgaaagacgaacaaatctttgattcggtagaagcagcgttaatgccaaattgtgggacctacataaataaatctttctccaatcacttgcgtagttgcctccgtttgtctctccgctgcaactaatattttttttatttttcttaaaggcaccttatgaactatcacgatagtacaaattatactctcggaccataaacgggatattttacaccctgaactgtctataccaggtgaataaccccttgactcaatccgaaactgtctgtcctacatgacgtatacgtgacaattcaatcatcatttttttttaaatggtgggccagcctgccagacactctcacctctctctttccctcttaccgaccatcagcggcattgacgatggcgaggcaggcctcaattgctatcgccaccccctcttcctttcttccttgttctcgacctcagcaggcgacgataccaacagaggcgaggtcctcgcctgttttcgccgcccgccacctgtttcaccactacgccttgtctccgttggatagagagggaaggaaggaggtagggaggagcccaacaaccttcgtaggaggtgcgaacgaccagcggcagcgcgacgcagcgtgatggtgtagacggtaggggcgaggctactgttgcagctctgatgtactcctcttcagcttgccagacctggaggagaatcccaccggcgacgggttgtgggattttttttctgacacttaacaatcggcgtcacattgtgctctattcgttcatctttgcccattatttgatttatgctcaattggagttgtcctaaaagcaagttagtatcttgtggagtgtcagtgtttcatacagagaagatggttacttcaaatgagatctgagtgggccaagtttgaggaaatgatgagtttttttttttaaaaaaaagaaaacttacatatttcttcaatatatggagttcacatacagattgcataattgattttaacatatctcaaacaaagagagattaggttgctcgcaatggaacaagctgatagacgtacaacagaacttgcaaaaggcctccaagaaatacaagttacagaagacccctgaaatatgcaaaggactccaaaagaaatagaaaaagcaactcagtccttgatttgcttcttctcccgattgacccaaatgttgaagctgacggagaaatgacgttgaccataaaagatggcatccaaccacaaactcaacagggacctcgcgaaagtgaaggttgaagcagactcaatgaacttagtaagtttcagtttaatcttgaagatgcctcgtcgaagacaaggaagggcaccaaatcggcagcagcaacctcgccaaagaggatttgaacggccaacgccaccttgtcattgtggaggaagaagacttcccaccacatggaaaatctgttgtgcttgacccaaacacaggtgaataactccatagcaaccttgcagacaacatgaggtgcaacaagctctagttgagctcaagccatccatggaaggaagcatcctagacgaagaagacgagcatcgacatctccttcgagctatgtacaaaaggggaataggaaaacctacaatgagataaacccgacatctccttggaccctcccccttcgtcagtgacaagcagccgtcagaggcgaaggggagagggccttcgacaaaggggaaggaagttgccctttcacttttcaccggccatcgatagggagagaaaggataatggttcccgaggaaaataacagttaagaatattttgatgaatataggaagaggaagttgacgaaatgatatctacatttcttaaattattatatttacctataaattttaattaaaaatatcacaggcatacgagtgcacataaataagtttatgtttagattcaattatagaatttgactttttattggatgagtcacggatgatgtactccctccgtcccaaaaaaaaaaaccaatcctaggtttgaacctgaacccatgtgtggttcaaacctaggattaggttttttttgggatggagggagtatattgtaaggggaaaagggtaaatgtgagaagtacaatacagtgaacactatccacaattgcatagcaaccgatactatcaatgttctcaaaaagaaaaaattgatactatcaagggggggccaccggacactgacagaagtagggagtaaccatcgg

SEQ ID NO: 10356 - DNA, 20041 bp, Oryza sativa
ctgaaaaatataaacggttagcatttattctaccaccaagtgtgatacctcccaagctcctcgaggcagcatgtacgtaagaaaagacaccacacctttttttactgtgtactaatcaagttgcagggacaatagtcaagagagcaatgtataaactaattaaactaccaaaacagtagtaatcaagccgctatatataaattgtagcacattttttttattattcaggctgttctcacatcacgtaccttattcatctacactgaacttattaatcattttggtcccattgtgaaagatctcaagaacaattaaattcgcgtcactgcgtacccactacacacagtcgatcgagcaaagattgtgtccttttctagtggggtttggtggccattttttaccggccacggattcttggatcaggttcagaaaccagtggcgtgcaaatctgaatctttttgacctgaagaacaaaggaattcagtcagagtagggttgctttgatatgacctaaatgaatggagacttctaccagctggcaagtatacattattagccggtgctgtgcctaatcaaatcgcacgtagaaattctacaagtcatcactactttcacctgcatgggataactgataagattactccaaatgtctcatgcttacctttatcagtctgtcaatggtgtttttacaggataatgtcatcagtgggattagcacttatcagcactgtcagagcaaacaatgaatccagatttgttcatgaatattttaattggttacctgttcatgaatggattccctcttgcaagctcatgctgataattaagttgattcatggattaataacctacagttcctttgacgttatgtttcatctctccaagcatgtacagatgtgctgacattatatttcttcagctaatccacgtatgaacaattagggactaggctggtgcaccaacccctatgatgtggggctattttagacacatggggccgtaccaacacagatagtcaatttttttgcatttaaattactccttttttgtggcgcaagtaagcatatatagtagcttcagagatacaaagcatctgaattattagtacaacatagcccaattaaataatcaacccatcgcgatgaccgatttattacgcgtgcacggcatcataatccatcgagctagaaaaaaaagattaccgatgggttgttttcatgtagttatcatctagctaaaaaagttgtatcgtctaactaacaaatccagggaatgattgattggccggtttggcagaaatgtgatgacaatttgacccttgggtccaacctgaccgaagtcatctgaattttaaatattatatggttgctatgatatggcgtcggcctcgcatcatcgcagacgcgatgagcaatgcaactcagtgtcttgcagttagcagccgtgttatctcaaagcttgcacgtaatatattttcatctcaccaaaaaggtgttcagtgaagttgctgaaaagagatggggttccctaatcaaggttcagagtttcagacgttgaagagtttgtgcagacagatcaaggttactatacctcgtcttcttgattatcccgtgttaaacttctactaaaataaaagtattttatagtatttaaattttgagggcagctacacaacgggatattttaagtgactctcccttttcctttcctctatccacgtgtgctccctggtacctgatacctggtatgtccacgcgtgctccctggtacctgatacatggtaccttaggtaccggttggtacctggtacctggtacctttggtactgactaggtatcgaccgatgcctgatacctggtaccttacctggtacctgatacctttggtaccgactaggtatcgactgatacctaatacccggtgccaaggtaccgggtggtatctcggtatcagcctaatacttgtggggcatcagagggtaccatcaaaaagaggaggagacgtgggggagggagggccgcaacggcggaggatggcgtcgaggacgcacggcgagttgagggtcgaggcccaagccagagagcgtgagaagtctcgaggagaagccgaagaggaggttgacggccatacctgttgcaagtcgacacaggctgccggcgtccatcccggaggcgcaaagcaataggctgcagcggggacgacggtgacgccgaggccgagggcgaggacaaggggagctcccgcttctgccctccccggggcgacgactccctggcgcacacccgactgacgagggcggcgagctagagcggcgcagcaaggggaggcgagctcgagggcgaccctgttgagggttggtcgacctcgccaacgcagtgccgtcgtcgtcctcctctgccgctgaagacgacgacgacgaccccttcctcccggccggcttcgtctccgctcggccttcttcacacagagagagagagagagagaggagtggagtgaggcgagagtgagatggggattgcgtcgggtggatgaggatgcgggtcggatggataaggttgaagagctatctcgacaccacgggataccggggagtagattttctcttaaattttatgccacaattttaatattcacgcattgattctcatgatttaaatgattccaaagctaatcacatgcttgaaaaggaatctaaaaaaatcaaaattcaaaaattaataactgaagtaacttaaaaaaaatattttaactagtatttgctaaacaatctaaaaacattatattttagaacgggtggagtaattttaagttaaaaatatgagatgctttgatcattttagctacaacttgaaacctaaatgaaataaaaaaatattacggttaaatatatgtgttattagctacataaaaaaataatgctagaaaatagcctaagacaaaaatcaacttcaagttttgaaatttaaatttaggctgtgatttagtataagctaacaagcacatgataatagacgaattttattttctgtttccttttctatcgaatgttgatgaaaatcatggtctagactctagactagaatgaacatggctcttagcttctctccggatcttagactctagacaggatgtcaggatctctccgggtttccgccttcagcacttctcgggggaccgctaacccgattagttagcggattacctgaaatacgtattctttaatggaacgcgtattttcttagttagttatcggttccactcttcttccccaactcgctcctgtctccgcgcgcgccgccatggatgcatactacctcgtccgcctccatctccctccaccactccagcttccacccaccctgcctctacctcgaggccgccatgaccgccgcgtcggtggcgccgtcgcgtgccgcgccaccgccggcccagtgggcagccaagagcggccgtgggagtcctacgaccgcggcattcagcaccacgcaggctccgacctcgcctcctccctccgcctgctcgccgacatgcaggccgccgggctgcgccccagcggcgcggcgtacgcgcgcctcatccgggcgctcgcccgcgccggccggacgctcgaggccgaggcgctcctcctcgagatgcgccgcctcgggctccgcccggacgccgcgcactacaacgccctcctcgaggggctcctctccacggcgcacctccgcctcgccgaccgcctcctcctccagatggccgacgacggcgtcgcgcggaaccggcgcacgtacatgctgctgctgaacgcgtacgcccgggccggccgcctcgaggactcgtggtgggttctcggcgagatgaagcgccggggtattcggcttgacaccgccgggtacagcacgctggtgcggctgtacagggacaatggcatgtggaagaaggccaccgacctcatcatggagatgcaggagctcggggtggagctcgatgtcaagatttacaacgggttgatcgatacattcggcaagtatgggcagttagcggatgcacgcaaggtgttcgacaaaatgtgcgcagaaggggtcaagcctgatattactacatggaattctttgattcggtggcattgtcgtgtggggaatacgaaacgtgctctgcgattcttcgctgcaatgcaggaggaaggaatgtatccggatcctaaaatctttgttacaatcatcagcaggttgggggaacaggggaagtgggacgaaattaagaagctgtttcatggcatgaggaatcgagggctcaaggagagtggtgcagtgtatgcagttttggttgacatttatggacaatacggccattttcgtgatgcccatgactgtgtagctgctctcaaagctgagaatctgcagctttcacctagcatcttttgtgtcttggccaatgcatatgctcaacaggttagtctagttactggatatagatggaatcaacttcgtctaatggcatgatagttgttattaacatctgatgcagactaacatagagtgtcaaagtgataatataactttggaaaacaacaatttgcagtcattttagtattaaatcacagttctatctctggattaaaatatccatgaataattcagtgaatcctgaccattttgtttatctgttcaatgccgtgctcattgttcatttgccacccattctgtttagttctagttaaagggggtggcaatgattatatcccacccatgtgtcacacatgggccctaaggcacatgtgttcttgcacactctagcaaggcatggcaagggtatcaagagagtcaaaaatgtggtggcattactcggtagtctctactgtagtttcaaaacgctctggaatcttcaattatcattctgccttcacagttttgttttcttttggacgaaggcttaattggtctaaaaacatcaatatctacatgtcactgtgcatacctttcagtttgtgtggcttgtgcaccatttcaactctctcttttcagggtttgtgtgaacaaactgtaaatgttcttcaattgatggaggcagaaggaattgagccaaatcttgttatgctgaatttgctaataaatgcttttggtactgctggaaggcatttggaggcacttgctgtactccagcatatcaaggatagcgtacgttctttctccagaaatgagagaagaaaagtgttttttttaatgtttcttttttgggttccatgatttaacttagtttgagcaatttctacctattgttgatttcattttttcagggtatgagcccagatgttgtgacttacacaacacttatgaaggctttcatgagagcaaagaaatttgaaaaggcatgtccactatttttctactccttagcatttagtaacttaaatatcatggattgtagcaaatcctcatcctaaatttctgttgaaattctgaatacttatttgttttgctcttcaccataactgttaaaataagtttttcctcatgtatgcaactatctcacattatattatgctattagatcatcttgatgatacaaaatattgtaacaaagctttatgaaacatggcttattaatctaaggttttaggagattgaagtaattctgattattttcctgcataggtgtcagaagtatataaggagatggagggtgctggttgtactcctgatagaaaagctagagaaatgctgaatgacgcctctattgtactggaacaaaggggaatgttacatttgtagccacccttttgaattccagggatggatgctttggcgggttatcgaaattggaatacctacaattctgaagtggctcaagcttcaatttctataacttgaagaataccatatcccttttttgcttgccatgctgaatgtctgaaacagatacgatatatagtaaacacaggtgagttttggcttgctcaggaatatatagacacttctgcagttctttttctccctcagtattgtaagatgtcactcaataaaatttctccaagcctccaattatctttttaatttgtttactgcagagtgtgccaaaaaagacagaaagcaacattatttagaaagagaaggttaggctcctttcaagaaaaagagagagagaaagttaggtcacaactttatggaacatatcaacgtttgaaatcttgtatagtttatcctacaactgtaagatgacctcttgctttaaacattgcaatagctcggctcctctattcgcttcagatttacctattactaaatttcatgggagaaaacaatgaggcatcaagccctcaatttatcttaagcatagaaataaggttctcatatttccatgtctatctctatttctagttagaaatccatcttacttggttcctcctcaacatatgattgttgatactcttgcactctttcacagaggaagaatatcgaactacattcagggttcacaaaggaatccacagggtgcaatttgtgggatattcaacgaatcaagactccagagaggccctctgtgttattctaccattggatcacctgctgttgacaaatgctgtgtctgcaattgaagcttgttggactgacacaatggcagcaattctcttgaattgctgaactttggaattttgaggttggacagaacattggaaatggtcatccgttgatgctttcataagcctggttccacaatgctggtacgcactaaaacagtcaggccctactacattcatttcagtatgtaggatcagtcaaacacaaatgaatgaattaggacttcattcattttacatcataggatcaattggtacacttgtgtgtttgtacttgagcatgcaatttttgtagttaaggcaacaagtaggtaacacttacaggcatcatgataaggaggaatcagaaatgttcactttctgtttatgatacataattttctaccccacatatttccgtatgtttcagatgaaaaagattatatttggagatagtgatatacacgaaacatttagaatttcctcatgttgctttcttgctgaatcatacatgagtagctttgcacgataaagtcataaggagatgttgatagtatcagatggtctgatattgacttgtgtgttacaagattcagtgaagtataaaatgacatgtaaatatgtaatcaatcatcttgtgatatactgtatgacagggcaattcttttgtgataaagtgttcgttttttctttgcgttgatcctttttattttgtaccaatagaccataactcaaaataaaatagaatgaaccaattaaatcaaataagtgtgtccgtttctgtatacgttcatgtactgcaaatgctctctgagaaaattgcccaagtatgaactcgtaatggcgtgagcagtggcttgtgaatttagatactagaaaaaattgccctagtgttgttactgaaatcatgattttcacatactggaccttaacgctgttcttgagttcttctatttagaaaattgtcaggatactattactgaattcataatggcatcaggaaaggctgtgtaaatcagtaaatggtttaggagacatatgggaggggcaaaagacgaaattttggcaagaagtctgtacttcatttctacatctcctgaccacattacatatcccattcatatatctttcttcgtctatctcatgcaaaatactagaaaacagcaggatttatatccttttccctgaagtttgattcatatgactcttctatgttgtaacctaaaacattttggaacatagataaagcagaagcagcagtgatgaaatcttttgttcacttgagctcgtcttcatcgtcgcagtcgctgagcaagtcgtcaatggcagcggtgtgcgtcatccgcgcggacgcctgcttcacccactgcgccatcttggccgtctccctgctgaccttgacctgctcctcgagcgccttcttgagcttgcgctgctgctgcttgagctcggtgacgatcctcctgttctcgtcgccccactcgccggcgtcgccgatgccaaggacgtcgtcgtcggcggcggcggcgacgccggcgcggcggctcttcctgccgctcccggtcggagtcctctgcagcgtcttcttgggggagaagccgaagcagcacgcctggcgcggcggcgacggtgagccgtcgtccctccccctgttcctctccctcagcgtcggccggccgcgccctggcctgaacagcttctccaggtcctcctcgttgtcgtccgccgccgccgccgtcggaacggtcacggccggtggaggatgagcctgcgacggcggcggcgaggagttctccttctcctgggcttccttggcggcgtcttctggtcggcgttcttgtgccgccggtgcagggggcgcaggcggagcagggtccggcgtctccgatggcggcgggtcggtgtggtggggcggcgcggtggcgctgcggcccagggacttggcgggcggcggcggaggcaacggcgcggcggggagggacttgagcttgcggaagcgggactcgaggctggaagggagcgcggagtcgccgtcggcggcgaggtgggctgtgttgagcttggcgatctgctccagcgcgacgaggtcggccgcctcggcgaggatcgcatcgacggcggacagcttcccgccaccgccggagtacgccatgaccggtcgccggagcccgcggccgcacgacggcgagatcagccacgggaaggggggacgcaagtgagggagtgagctagcgcggtgcagtgtggacgggatggtcagtggttcgagccggatttgtcgttgcgtgggaggggaaagagagagagagagatggggggcagtttcgtcacgtcgggcgcgtggtggtgggccagcctcggatgctctgcgcttttgaccgttgtggccgcatgaaaaggctgccgctgttaacaccggcggtggccggccgctgctccggcggccgcgaaagggggtcgactggtcggggcttttatggtcaccgccagcggcaggctgatggagatttgggaagatcagaggatgattaatggttataaatgctgtcaatatgacaaaatatggcagtataaatgctagtattccctccgtccctaagaactgaatggacattctactgcaacgaatatgtatgaattcgttcaaattcgtttatccaatcctagattacatattttgggacagagagtagtggtagtatggtaaatgatcctgtaggcgatccaccatccatggaattagatcgttggaaggagtttttagtacgtgacgggtcggttttatggcaagatggggtgtgttgtactgattccatggggttcgaattcgcatgatcgatgattctgcctgcggaataacttcacccctaccgtcccttcaactttacaccgagtttgattgacatttcttatctttaataccaggaattttcacccaaccatacaatttaagtcacatagcagtacaaatgcttggtttcactgatgtggcaaataaaactaaaaacaatgtgggtcccacatgtaagtgaagtgagaagaaagatatggggcccacatctctttcttttttcttattttctcctcttcaaggaggttgtcagtggcaaattggggcgaggcagccggtcgagctctgtcgccgcaccaacgcgcacatgccactgcggccatctctctgccccctttcccactgcccgctaccacgctcgcccgccgccgccccgcgcggacatccaccatggttttgtactcctgggttgtggtagcggcggcgtgcggagtagctagcgaggggagaggcggccgaccgcgccgacgggagaggagaaagaggagggctgaggggcggagcagccatcggtggagagccaaggccggcgcatcgggaggagtccaagacggaagcgacggaggaagtggtgaaggtccttgggcggaccgggcgaggcagatccagggtggcgcgtgggggcggcatcgacgatgaagacggagcagatcggaggatggttgtgggtaaccgtcggcctcgacagggtgcttgcggcggcggagctccgccgctgtcgcctgcagatgaagatccctccgcacccgctgccttgccccctccagccaccgccgctgttgccacctccttatggctcattccctgcgctttctcaccgccaacgatgtcacgccggtcgcctctctccccctctcccaccgacgcggccggcatcctctccccactatcctgctggcaccccccctccccttgtcggcatcctctcccccctctccggctggcctccccctctatataagatgatggggctgataagtgggtctcacattttttctcctcatttcacttacatgtaggactcattttttttaattttattttgctgactatgatgccacgtcaacgaaaccagatatctatggaacctaaattgcacggttttatatattttaggggtgaagatttttaatactgaggataagtgatgtcaaacaaattcggtgtaaagttgagggacggcaggtgaacttaatccttctgcctacacatgctataaaaactccgtcacttcgtcaaaagaatagtccaatatggcctgttcagcttctggcccgattatttgttcgggtccagatggaaatgcaactatggccttctgggccggaacttcctatacgggcttacgatcagttgggaaggcaataatgatgagacaaacactagccaagtatacacaaccccactactcaataatgatgagttgtgaaagaatcactcaatttttgtactagtaccaacttttgatcatctggtcctgcataaacaaccacatactccagtatgctataaattctgagccgtgcaactgtgagtacagtagagtaggagttttatgcatgcaaagtggctcctctgtactgtctgggtcttttattactcggaactttagtggttgaactcttatcagcacacggtacactgccggccttgcacgagagaagagaagagacaacaattaaaacaaaagcacaccaaagcaccactctatccgtagccatccatccgtttcgtcacgctggaaacacaagagatcgccgtcggctgtgctggctgcaaagtgcaaacggaaaacgtgacagttgtgttgcttcattcacattttttttacaggtaccatatagtactatagtacaacaacaacgcgttaggtagagaaaaaaaaagttcctgtcattgataatacttattgtttgtactatcatttttattataatacatatagaaatatcatcaaatatattattttattaaagtacttttttaatactaaaatatgtatggttaatattttagaatttaattatagttaaaaaaataaaatttgatgttagcttttgttcaaaacgtgagcttttgttcaatacggcttgttagggaataaaaacaatttatagacaattttttttatacatttgttcgtagtgatttaaagccaatgttgaaaataaattatgttgaagtatcttaaaatcaactttaaaatcaagtttaaaaatttaaattttagggctacgaattattaacctgagggactacttttctgtatctcgatggtttttggaggagaaaacgatcagttgacactggggagagcttggaaattcagtggaaacgaagcagccacggatggatcgagtagaagagcggtccaaaacagtggtgctcctccgctatttggttccttcctcaactcctccttccttttctcctggaagcttccagtcttgcagacattgaaagtagaaaaaaacaaaagttccttactagccgcacgcacgcgcacacgtactcgttgctctagtcgtctttaaacaaaaaaacagttgttccgggtttcgtagagtacatggctgtactttgttggtttagatcagtgattgaccaaaatactgttcacatatcagaccaataactttattttggccttcacgtgtgcaaatataaaacaacattaaatttttttaaaaaattagtaattcacttttcattaactattaaactagaatatatactccctccgttccataatataagggattttgagtttttgcttgtaaagtttgatcactcgtcttatttaaatttttttgaaattattatttattttatttgtgacttactttattattcatagtactttaagcacaacttttcgttttttatatttacaaaaaaaatttgaataaaacgagtgatcaaactttacaaataaaaactcaaaatcccttatattgtgggacgggggagtattatgtttgtttgatgttgtgtatgttgtatcgttaaattcgcatttaaaaaatatcatcatactacgtttcttgtataatttgctgataaaatcaaggaaaatcaatggtattacgagttacgactgcacagccgcaacactgctaaatcgttggtaagtagtactggtacgtaatatagccgcaaccagctctactgcgcagagctgtcatgctgttaatgatcctcataaatatacaattaagaacaggtggaaggtgtgcgtctttacggttctcttaaacctgatttcgtattgatacgtcttgacgagtataaacatgaatgcaccaaatctcttcccctgcaattataaaaattaaatatgtttttactaatattttagtaatttcagtcggtttataatttcattcgcttttaaaaatataaggcatagtataaaaaatcatttaaaaaaactcatgctcatttcagatgagagtcggacttctaattgcttcaaagtttctgccgagccataagaaaactatatatatggctcggcagaaactttgaagtccatcatcccaactgaaatctgaattaggtaccaataatatttttcctatatacttttaggaaaaaaaaatgattacgcatgaaatttatatagtaaaaaaaaaacagaatgaagacgactacacgaggcgagcagattggaccggcctgaccgtttggcgccgcggctgtaccagtaccaccatccacagcagttgttgcgacttgacctcttcccttcctcctccatttccaacgccctcctccctcccttgttaattcctcctcctcgtcgtcgtcaacctcccgatcgagttcccaccccagccaacgacccaaccccagcttctcctcctcctcctttcaaatcacacccttcgtcctcggaattctctgcgctgcagcaccagcatctcgcaagtcaaaccatccttatttattctggttttcttgccttgctgctgctgctgctgcggttgattttgatcttggaagaggaggaggaggaggggttgggttggtgggggtagcagcagcagcagagccgccggtgatggaggaacggcaggcggtcaacccggcctgccccaacgccgccaaccccttccaccgctgcgccgactactgccccgtccctgctcccgccgccgccaccgccaagccgcccccaccgccgccgtcttcccgaccggcgcagaacgggaccgcggcgccgcagaacgggacggccgcggcgcagaacggaatcgcggagcagaacgggagcacgcacagcgacggcgagctgcaggcgaagccgcgccgccgcgacagggccggcggatccgggggcctccccttctacgtcttccgtgagcacctcccttcctttgccccccatctcttcgcagcaactttcagaagaaagtatgagaattcgattcgatttgggttttggtgctgtagtgcgcgagggagccgacggcgacggcaagaaggtggacccgcgatgccccaacgcgcccaacccgttccacgtctgcaccgagcactgcgccgccaagatggccgaggtcagccgctcgtcggagggcgggaagtcccccatgtccctcttctcccgccactcgcgccgctcctcctcctctgaaggtttctgtctttctttgctcgattcgttacttgctactgattggtaacatcatatttgggatttgttgttctttgtattatctgtcataacaattgttggatggttgcgcagatggcagcgtgagatcggggagcagcaagaaggtggatcctaagtgcccaaatgctggcaatccattccatgaatgcactgagcattgtgctgccaagatgaaggaggtgggtcagcagaataagactgttaagaagtcgtcctcacgcaagaaaggtagcatatactagtggccttccactgctgattgtttatggtttcttagcttccccaattttgatgttagtgtagattaggggataaatggttagttgttttaaccctaaacctaactaaacatatcccttaaatgcctctaatggtacaaacaaattgatatgcactgtaaatgtagtgattggtatcatggaagcaaattggaaaaaagaaatgtgactgagttttgctggtttacgggaaaggaaaattgaagggaccaaccatgatcatgggaagatctgttcaccataatgtttcgcagttcatgtagtgcttgttggtgggaaagaagcagcaacacccttttgctttattacattattgtaataattattatgttcctccctatattaaatgcaaaattataagaaaatcttaaatgatttgttccactactttgaaagaattggatcacctacaaacaattgttggtaccataaaagggcccatgtcttaatcttgtgaatttcgaatggaatggtggcattatgataatgatgctaccaacttgcttatcctgaatatgctcaattcagattatattttgtaccttcaactgccattcttaattggttttgtttacgcctacagggggaaaggagatctctgttgtgcagaactggaaggtggatccgaggtgcccaaatgcgtccaacccattccatatatgcgcccaatactgctttgatcatttgaatgaaacgggtcagaaagatacaagcaaaccaggtacatctagttaacccaatgagttatcatggcatgtgtatatatacgagagctttggcagacattttaatgcctactatctctctgtttacagactcaaggaagggcaaagctgttgtgaaagcagagcaaacaggagaaatcaatcctgattgtgtgaatgcgtccaatccctaccacaagtgtggggaacattgtaagagaaagggtgacaggtagataaggtaatgaaaattctcttttatgttcggttatccttgcgcattgaagttatctgtacttcattggtttgatgtgtatattaactgaacatatttcacttaacatgggtggcatgttatcaagccatgatttggtacttgtaaagttcatctagctaaactttttggaccaagtaacccttcatgaaagatactagttcaataacattgtcatttagtagttatatattgtcaactagtcagattcgtttttcttgagtcacatgcatcatctagtaaaaatctgtcatctttcaacaagtttctagatttcattgtgcacaactagtaactcagctgtcatgacctagctatgggcacatcaacttacatgatcccaagaaaaccattgaagctctgtaactacttatatgtattttttaggtgctgattacaaacatgtaaggcaagacatatgacggaaaaaaagtttttcgtattagttttctttggtcaagctttgaaaaatcttatgagctgtaagcatctggtcaacatatgtttttctttcccctagccagctaatccagtgtgttgtagatctgcaatgattttgaggggaaaaaaagatattagttggatacaaaaaaattaacttgatgaacataagcagcagattttctttaatcatacaagtgatttctttttttattattttagttgacagtatctccttttgtggtcctaggctggcgatacaaggtttcctctccagatgatgatggtgaaaaaaaaagtatatcccgacaatagtcctgtaggtttcaatagaagctgtgtttccatcggctccgctttttattgtggctgcagcatcacaatctttgctgtattatcatgtactttctacacactttcttaccgccattcactcctataaaagagtcccatattctagatctagtagtataatttattccgtgaagattgtaaaaatagaagcgtgttgtttctttttttcccccttctttttgtaagataattgcctgcttatataagttataattttgtcaccaaccaagtggtccacaaaccagttttttcattcattttctttccatcactgtccatatttgttatataaaaagatataggcggatcgatgtttgttatagcagggaggttcttctgaaccaagatatgtggccattaatttcccttttgttttatcatcaatgaacaagggaaacccatcattgatatcaactctttgacaagtatggctgctctttctggttggcagggtctggttgtgaatcttctagaatggagatggagccatttggtcagaataatacagcatcatcagtattcagtactactgtacacgtcatgttacttatagatgaggaatgcctggggggcttggaattttcagactcgtcagttgtttggtttgagacgtccaattcgtgcctgaaaatgtcttttgacctgaaaaaaaaggagaattttccagtgtttgcagcatagctgatgtgcgtgatgatgtgatcgacattcaacaaaacgggtggttgcacgttctgattatatttatggttcacacgtaggcgacaaaaggacgaaaatgaggtcgctactcaaaaccttcgtgaagaaagtaggcgtcagaagtgaaaaactgcaccgaaccatacgaccaatcaaagaacctgggaaacaaaaacagaacaattgcaagttcatgtgtctgttccaagagaattgggatccgggagacaggtgatgaaattctactcatacagaatttgacgtaaatatgcaagattgtggagcggaacttgccaacttggtagaattcttcaggaggttggttgatgagttgtcttgtttgaaactttttgagttgaattgttgaacgctttaaaatagaagtaagccgtcctccttttttcatgagtttaagcatcttgagttcaaatcctgactaacacgcaattatcaaataaaagtttgcagcctaatcctattccacgcttaagatttagagcgtttcgcgtgagagaatgagtgttgcaacattagtgaattacccgtctctactcatcaacttaagctttcgggttaatttggttattacataggagtatatttcaatagaccaattgaagcacaagcatctccgaactgctgagtgctgagtgctgactggaagcagacaagaacttctctagaaccaccatttccattttccaatcagataggtgaccgtcgatgtcgtcgacgaccgcgcgtcgtcgacgcagaaaggacccgtaatcccgtattgtgcagggcgcacttcagaatcgcacctccggccaatcaccgccgctgtcgttgcgttcgccggcggcggcgaagggagaatctcttgtgcttgtcgatctcatcggcggtggagaactggagatcaatccgggccacgctgacgagacgaggaggagctcttcgactctccgtcgaggagcattgtacgactacctgtggctccgcatctcgccgtcttcaactccggcatcgtacgtacgccgccgccgccgccgtctcctcctcgcgcagtctcgccggccgcgaagacgacgcacatatcgcggtcgcggcgatgagtgggccttggcccaacggctcgagaaaaataaatgggcctcgcccgcaagcccatcacctgctcggcccagttagaatcttactcgcaaacgaggaggagaataatactaataatgaagtcaaatagagaaacccaccacctcgctcaatccaaaccccaattcacacgcgttgcggtctccgacgagggcgaggcggagctaatcgtcatctagggcaaggcggagctaatcgtgggtccgatggagaagccgtcgccgccgccgccggggaagtcgcggccggattgcgtcaactcgtcgaacccgtaccacgagtgctccgactactgcctccggcagatcgtgaagtccagggaagataatcatcggtggtcgcgcgtccatccccactgcatcaacgcctccaacccctaccacgcctgctccaacttctgcttcaggaggatcatccacgccaaaccctcaccttcaggtagtaatcctgaccctgtatcgatctatcatctatcgtctgcttctgatcaattacttctgcttctgatcctgtttctgatctgagcaattttgcgccacggatcgtcgtcctgagctagcctgtatcgatcgatccatcgtgtgcttgtgtagtttctcactgggtgttattcgttttagggttggagcgtccggtgcaagagccgcctgcgtccgaagctgttcctgcccaagctgacgacgatgatgatgcccaaactgacgacgacgacgaggaggacgctgccgcagacgacgacgatggttacctgaagatgacagtgacagagaatcagaagctagtatttgagcttcgggtgcggccatcgacgattctgcggtttgtggtagctgctgtgtgtgcactcctggttattcatctcctcggcgtatctctagttgtcgttgctcacgccctcatttgattagacaaagagaagcatatataattgagggaaaataggaatcaaggtctattgtacaattttgatactataatttgatacgtatggtataggatgaaatttacttttcttatcagcatttcttaaagatatgtttgttgtagcagggggtgaccaccgtccctccatattcggcccaaaacactgtagagagagattgggtgagattgagtcattattgtaagtatccgagtggaaatgaccattcgaacaaggaaacgataaaacactattcgagtcggaaaataccgttcgagtaaattcttgtcactaagtcttattatccgttttgaatgtttcctaagtcagtaacaggtcagctaccggataagtcgaaaagggtagtcgaactggaaaagactatttgccatggaaaagacccatggtggtggaaaagaccatcggtcgaggagaagacccatggtggtggaaaagactcttgatcatgaagaaggcgacttagacaacaaagatgccaagagaatattcccgaggaccactcaaccacttcatctagctggcaccaaaagactataatgacctccataatataccaaaatgcccttagggttagctgatatagcaagggcataattgtaatttcatgtgggcccaacaaagggtgcaagtgtaatctcacatgtaaagctgtgaactatataaagcagacaaaaagcctgtagcaggcaggatatcttggaatactaaaagtcttgtcacttagtatgtgtttatttggtatttgggctcatttcttaggataggcgggaaaagggggttttcccgtctatccctaatcttgtccgtgaccttgggtcaaggtcacgacagtggcgccgtccgtggggacgtgtagtatccttggagtgggcttgaatagtaaatgaaacgttcccaaaggcaaaagtcagtgccaatccgctacaccgacacttttgcaagcgcagcagcagcacttgaaagagagtgggaagagatgactggacaatcagcacaaaccggagtggagaaagcaatgccaggcagaaagactgccggtccaacaagagaagaaacaagagaaaacccgcctagtgaagtagagctcgccgagatggtgcaagcacaaggggctattatggtgaacaaagaacaatat

SEQ ID NO: 10357 - DNA, 17414 bp, Oryza sativa
tatgaacttattccgaatggcagtgtagaatcccatttgcatgtaagtacttgaagaattaaggccaccagcctgtaaagtttaagcaattgactgaaagatctgcctttgacttttgtaggagtggatcttgagacagcaccactcgattggaatgcccgcatgaagatagccttgggggctgcacgagctcttgcatatttacacgaagattcaagcccttgtgtgattcatcgtgattttaagtcaagcaacatcctattggagcatgatttcacaccgaaagtgtctgatttcggactggccaggactgcaaggggggaggggaaccagcacatctccactcgtgtcatgggaacatttgggtatgaatcatatccctcatccctctgtgttctgatggaatcacaatttctaatgcataatatgactatgtctttcttctcagatatgttgcaccggagtatgccatgacaggacatctccttgtcaagagcgatgtgtacagctatggagtagtgttgcttgagctcctcaccggtagaaagccagtggacatgtctaggcccggggggcaagaaaacctagtttcatgggctcgcccgcttctgaccaatgtggtaagcctacgtcaagctgttgatccacttcttggccctaacgtacccctggacaatgtcgcaaaagcagctgccatcgcatcaatgtgtgtacaacctgaggttgcgcatcgcccgagcatgggtgaagtagtgcaggccttaaaacttgtttgcagtgacggtgatgagggcctcggatcaggaagtttcagccaggaattggcggcacaagctgcagcaatctatgatgtaactggcatggaagctgagagggtgctgttatctgagatgtttggctcaacccctgtcttcactcccgctgcggattcaggttctttccgaaagcagtccagctcaggtccactgatgacaggcaagaacagaaagttctggcagagattgcgaagcctatcaagagggagtatgagtgagcatggtgcctcaccagattttgagacgcgctcgcagtgtagtaataggtgaggtttttttctgttcccttttcaatcttgcgaagataaatattcagttgaatggaaatagagagttttcaggcctagtttctgtacattactcatgtggagataaaaggctgtatagttcagaaatcaggatagtagcagggcagagcttgagctgtggagtattcaaggatttaatgagatgagctcagatttggttccatactaggtttgtctgcatttggatttgtgatgtcgtctctttttcagcttgtcagtttgagttcatttgtgattttctttgttttctttttggtttgagttatgattagttgtttggtaggaactgttgatgtatagattcagactacatttagaaatgcatttgttgcaatgaagatgataagcttctttttttctggctagttgcagcttctggctgattccacttgtttcagaagaaactgccatgtaaatctgacagaattgcttctgttcttccatacctctaacccagtggatgatgctgctgcatcagcaacttgcgagagttgatatgctttcttgagaatatggcataagtgctctgtttactacaaagtattttttttcagagaaaaagccgctttagggcctgtttagatccatttggaatagcaaatggcaaatggcaaaagttttggcattgcaaaagtactagttggtgtttagatgcatgttaaagttttaccattctagcaataaagtgagaaagagaaagagagatggagtggtcccaaagcactttttggcacaatttgctactatggactagcaaatgccaaataccaaattgccaacttttactactagtgtttagatccaaaatggcaaaaagtacaacaaaatagcaaaacttttgtcattttggaagatctaaacagggccttagtttatcatgccctttttcttcagtttggggatgaaaagtttcggcattgatggtgcaatcttcctacccttttgttatcctttaccagttacacatcttccattgaaaggtgccaaattgctatcatgtagtgctaattaagaaagctaaatcatgtatatcctttattccatagtcctcacacggattggaagaacgggaaaatcctaagcttttttgaggatcaaaacctgaaaaattcccttatgaagatcaaacaaacacaagggctcaatgaaaaatacagttcagagaaaagagtaaccttcgtgtaggtgctaccggggtagccactgaatccggcggcggtaaggtcaccacggtggcgcggttgtcggcggtgccatcgccggcggctcgccggaggtcggcggcgccaccgggttgatccgctcccgtacgtggatgagcaggcaaaggcatcttcggccttccaactaggctgttatattgggcctaaatgggcctattgggctgttagataattcagcccggtctagtgagaggtgttttgggccggccctattacggtgtctcctaagtactttttttttttttttgcccttcgtttacctctagggctcctgtcctctcaccgctcggccgccgccggcgacggcgaagacaacatttccatcgccatctcgccataataatccatggcttttcctctggcccgttagccctagccacattacgttgtttggggattgggaattgggaatcgggagagattcagagatgggagatcacctggggcatgccagatcgatgtgacgccgccgagcgccggcggcgagcggagcggcagggggcgaggattggcgctgcgttctcccctccctgaattcttccgccccgtttctggatttctcggtcgcaatccaggtaaattttacttgatcaacagcatgctgcatttcgcttctgttcatcgtgcatcgagctaggtggtagagaaggggaagagacggggatcgccgggaacgcgaaacggccggaggtcgctggccggaccgagctcctccggccgccggcggcggcttgagccgttacgcagagaaatgttgggccgccgtgagctccctggtacctcgtcacaggagtcaaattcaggcccatcgatttttgagagggattcggcccaatcaagtagtggatgattgagccgtatttctggattacttaggtgatggtgatgaactgatgatcaggtaatttttgcattttgctcgctgatttcgatctttaccactaggaattttacattttgtcctctacatgcaccggaattttcatctctctcttgtttccggccacctatcggccgtcgctgcaagaacataagcattggcagacgaagaaagaaatcagagatgtgcctcatgaaaagtgagactagatgggaaaaatatgtactacaaacctttatatgtagtagtacaaacatgtaaactaccgtaaaaatcaagaaataggatttatccatatcacgatgagtaaaacttttacttatgattaaaaaaatattagaagtaaaatatttactcatggttacatggataaattttgagtaaattccctatatacccatgaaaactcacataatctctttcatatccctgaaatttatttgatcccttctatacccttaaaattttgatcctttccatgccctgccgttacatttttcttcttttcactgttacgtttggttgcaaatgtctgttatgcccttgatgattaatttaggattgaatataagcatgaaaaagattgaaatttttgtttgagtgcaaagtgtgtgcattttatgaaactaatgagactataaataattatatatcagaaaatattgacataaattttgaaaataaaaaaatgtaataaacaaaaaaatttatttgcaattttaataggataatggatttttttttatcgggagcattcataaaaatagtatcgtgagcattggtagtcatatctttgtatgaatgctcctcattattttatgattttttttaaaaaaataaaataaatacatattttttatttcattatctaaaaataaattttatcataaataatgtatcgtacagcaaactcataactataatagtttcatgcgacaaacttttacattttcaataatgtaattcataatttttttatgttcatccaaagggtaaaatggatatttttatagaaatcagacggtcaactgacgggattggcatggaagggatcaaaatcaaattttgggtatataaggaagtaagcaaaattcaagagtatagaaggaattagctaaaatttcaggagtatacaaaggattttgtcattgttaaacgtctgtttttcgatcctaccgtcagtgttcgcctagaccatagtctagatgctagacgatcggttatcatcgagtttagagcctaaaccgagaattagaccgtttgaccatctagttagtcaaagacggttctagttctagactgtctcgaccacacaattagacagcatcgagatgagtgtagaacgtaaaactgtcgcttagactatagcctaggcaatggaccaatgcattttttttgtgtggcaggacatgaaactttgtgccctccccaaaaccaatatgttttagggttttcatcctattccatactcttcttctctgctctaagccactcgcagccacgaaatcgcaatgcttctcctttgctagttgctaccgtggaccttactcccacctccctccgacccacgactctacgagaggggctacatcttgggacatgtgtaagtgtgtttagtgtattcatttgtgtgcaaaaataatatgtcgatagtagatgtattgtctagaccatgtagacttgcatttagactagctagagtctacaggtggcggcgttgggaaggtggtgctcgaagaggaaaaattggggcgcgctaggaactttgtgctaggtaagatgactgaaagggtatttcggtcattaaaaaaaataacagtaaaaatggcgtgtagctgatagactgtggacggcgatagtaaatcgttgaggtcaaggaaaaagcgatgacatattatagatgtcgataaagtcagtagcatattgttgaactgtgacgaactcagtggtactgagcagagaatctcttaaaaaaataaaaagaaagaaaggaaagtgcattgcctagatctcctaaagtacctatatgtaatttatcttttatgggtgtgtctattttttttggcaaattatctatatatctattgtctacaaattagctatcttttgtcgaatctttattttgtcgaggtattttgctatatccttccttactttattttccgtatgtcgttaattgatcttagctattgtcatattagatgttgacttgctgggtcagtgctccaaaactcatatcattaaaataacattttgttatgcacttgcttcgtcctaaaataagcgcagcatgagtttccgtgtcgaactttaattgttcgtcttatttatttttttttaaaaaaaataaaagacataagtcacgtataaagtattgttcacgttttataatctagtaacaataaaaataataatcataaaaaaaattaaataaaatggacaattaaagttgaatacagaaactcatagcagcgtttattttagtacatttccatttttccttcctccgccgttggtgcggagggaagcgacaagatgatcaaccatagtacatcctatcctaggcctccatcggttggctttttttctaataagccaaaacggcttattatggaataaaaataaatttgtaggtaaaacttttatatatgtgttctttgtaacttaaaagccaatgctgaaaaaaaactacattgaaaatatttcaaaatcaatctcaaaattaagtttgaaaattcaaaatttggcttattctttagctttagcttattgtaccatccgatgggagccctactccagtgcagtgttaaaacacagatcctgtaggaaccaagcatcattggaggggtttaattagagatagtaaacgcatgcacatcttttcattagcagagaaaaagcgaggctagtacgtacgttgagctaagggcctcgggcttggggtgctatttcatgtcaacgggccgggcaacaaaagtttcggctttctccctccttcacctgtctcccccatcatcaccatgcatccatccatccatccatccaaatttctctctctctctagacatggagatgcagaggcatgcacggccatctaggctaggaggaacgagctgggtgtagtagtgatggcctacacaaagtttagattggtccaaagtttaaaatttggttaagattaaagacgatgtgactgagttgtgtgtataaaaggtttaatgtgatggaaagttaaaagtttaaaaaaaaaaactttagaactaaacacacccactacaacctcgatcgcgatggccgccaacatttaccgcaactttctcttctctcttcttcttcacacaggatcaatcgacgcgacccccgggagaaagttactactcgtactccgtcatctcatctctctctctacctcgtcgtctccatctgctattctgcatgcatgagccaatcgatatactcctacgccatgaccatgatcaagcaaagcaatgtacacctgctgctgtgagagttgcaattctccacggtgcatcatcgatcatcaattactgctgctgctgctgccaggtaacccagcagaacactactactacgagctggtacaatagcagactattagccagctataaacatattttaatgagataaacgataagagagaagaacagcgggctacagatctgtagcaagctgcagcatgaactccaagacattgtgtatagatgaattgaagctaatagtgggctatgctattaaacttgctctactccagcagagtagactagtgtatggtgtttctctctcatctgtgatggatggaagcatgcgcacacagaagaagaggagagaggggtactcactcctactgagaaagggacacgtgacgagggggggattgtccggtagcgcttggcggcgagccctgactttgatgcgtgggaatatttggtggcaaagtaggctgcacttgtctaccaaatgtccatgctcaattccaaacttgcagcccctctactaccaagctcactatgcacacacagcacagcttgcattgcatatatatttttccagctgctccttgcttaattttctctcctctctctctctctcttttgatcaggctgaggctcagcagcagaagcagcagcagtagtaccccatcatcatgcatccatggtgagagatggatggtcactcacatgtgagcagtagtgccgatcttgccggactctgcagggccacccactgcccaaccatttcttggctaacttgctacgactacacatatatacctagcaatgacatgcatgaaagccaaacacaaactgctccaatatctctatcttcttctttagtttctgaaaatgcacattgacatcatttcctcttcaatggagtagataaactagataagctatgtttgagggataaatttaagtatgacacataaatgggggctattgctaataatataattatactctttccatccaaaatatgaaaacatttctaggccactgattctaatgcacaaacaatgtacatttttaaccaatgagatgcttgggaaaaggaatactataagcaattcaaatatcaaaatttgactactgaattgaagtgactagaagagaattctttttccctccacctttgtttttgctgaagaacctaaaaatgtttatattttcaaaagatggagtatttcaagcttggtctatggtgtttttttaatatattcagggattgtttcctgtttctgctgccatgaaatcatgaggattccctggaacaagacaagggggaaatacaagcatttgagatcaccaaggcatggccaaaaggaaagaaatggatggcatggctggcttgctggagctctcgtctgtgtcgtctgtgatcaatcatgattccgtagaaactaccaaagcatgcaaaaggccaattggcataaaaaaaacccctggttattttaattacctacagcagcagttgctcctatatctatatatgcgtgtttcttcatgtttgatagtatatgaattatgagtatataatgacagaatcaaataaaacttttatgtgtcatacttgaattatgagtatataatgacagaatcaaataaaactcatcgtgcaagattcactgatttgcatgaagtttaaaacgactgctttcttgcaacaaaagatcttagcattcaaaagcctaaaattgtgtaagatgcagtgtaatacagtacattctactattcactttccagaaaagatgtagccagtaggacattctacggaatatcttgactgttctgtcttgagggaaattaaagtagctaactctacataatagttgcaattatgcccattccatgcacctagctagaaaaaatatttatattcaaatggaagaacagtttttctctaccatgcatgaagctacagcacacaccatgagctagcccatgcatgactctggagggaattggcaactttatctgacattctgcctatatatgttgttaaatgcctaatctaataactgcagagtacacacaattaagtactggtgtgaagaagaatatgcaatggtccaggcagggataataatacggtttattcttgtcaaaagtaacatgcctaagccctaaggtatgtctattgattgatgttcttacatttgaaataggcattggaaactattttatttgtataaccaaaatgtgaaatgaataaaaagagtactccaatattaaaaaaaaacaaggcattaactttactgataatgtcacaatactgttacggctgagagagtgagattacactgggtagtgtttatttccttgtcaacgctttattttaaaggcggtttcagtaactataatgacatagtagttctcagcttacagccttacactgctgcattgattaaagttctcgaattactgctacggctttctgaagcagtaccgtgttttcttctgaaaaatgtttcataacatttcacttccaatttcattcattttagcagagaaagcatttacatgtactccaattcagtttatcagaaatgaaggaaacctgtgcagttacaactaagtatatacgggcaacaacatgtgcataacatatgaaaaccattagcccataattaaacacagattttgaaaattttacttcatcacaccacatttattttccagataagttattaattaagtgcacccccagctcaaaatgcatgcaaatccattcttcaggaactagaaatttaagggaatgattaatggtaacaactgattacaaatggagctctaatggcagtagctctacacagctttatgagctgagaatggctaaaaattttattattacagtaggaagatgaattaactatgatatatagctagcataaacaacagtatataatttgaaaagttccatatatatgaattgaacagcccataccctcccaaaagaacatcgaattattaaacctcaattggaacatcaaaagagagagagctgggtaaattcgactcacttacccagctatgaaataatcttgacatgatcatcatcatcaggcagttcttgtcgaacgatcgatgagtagcccacgaacaaaatttgtttggatttgcttgcatgattcattcgctattcatccatggcggccgaggtggttactagctatgccatggcttgttgctgtggtggtggtggtcgtacggcgccgccgacgacgccgacgtcgtcgacatgcagggatcgaagccggccatgctcattatgttgccgtgggagaaggctcggagacccaagaagtccctggtgaggccgtcgttgccggctccggcgacgccattgccggtgtcacgatcggacctggcgcccctgctgctctcgtctgctgcgatgaagtgggacgcttcgaaggcgagcccgtagccgccggcgccgacgcaagtgctcgacacgttgctggtaggaggaggagggggagcattggtggtggcggcgctgctgctgctgttgtgcgtgctcgccgccgccgccgccgccatgtgggcgtggctcgacgggcggctcagcgtcgcgcccatctgcgccgccttctgcagcagcgcggtggcggacatgtgcgccgaggaggcggcggggtgcggcggcgcggatgacgtcgacgagaacccgaagctgaggccggcctgctgcgcgccgccgctctccggcgtggagctcccgatgaactcctggtccagcctcgccgacccgtacatcgccgccggattccccgcgccggccatcgcctccagctgctgctgctgctgctgcgccgtgagccacgacggcgcgaactgctgctgctgctgctgctgctccctcttgaggcacagctcttgcatcagcccatgcccccccatcgccatcgccgcctggtgatcaagcacatccgccacctgcgagaagagcatcccgccgccatgctgctgctgccccgccaccgccgccgccgccgtgaccgccctcgcgctctcctccgccagcgcgtcgcagaacgccctgtgcgtgatgaagctgtcccgcctgcacccacaccgcaacccgatcatcagaacctccgacgacggccatggcggcggcggcggcggcggccacgagagacgactgaccgggagaagagggtgccgcaatcgcagcggtactcgcgggtgccgcagaccttggagtgggccttccagtcggagtggacggcgtagcgcttggagcacttgtcgcacttccacttcttctcgccatgcttgcggctgaagtgcttcttgatgccggtgaggtcgccgagggcgcgcgccgggtcgtggtggacgcagccggcctccgggcacacgtacaccttcttcctcaccacctccttggggttccgctgcttcagcttccatggcaggttgtgccctcgccggtgcagctgcaggttctggtctcgctggaaccctttcccgcagatctcgcacacgtacctgttcgtcgccatcagcgtcctcggcgacagcgcgatcacctccgcctcaggatctacccataattagttagttagttcatcctaaattcgattaactcgatcgcgatcgaagaattcggtgctgacctgggttgccggggaggctgcgcttcttcttggcgggaggaggagcggggtgggacgagacgctggcctggtcgccggacgccgacgtcaggttcgacatgttctcctcggcggcggcgagcagctgctgctgctgaatttcggccagatccttgagcatcatctggacgaacttctcttgaattctaccagctgctgctgattatgatatctgaacgtatgatcaatcgatcggcgatggatcaatatcaatcagatctcgctgcgccggtggcgatcgatcgcacttgcaccctgtaacttacaccgatcgatctctgacggcaaggccggccgggacgacgactagctccactgatgctgctgctgctgctgccactagctatctactggtgtgcaccttgcagtgtcactaccggcatagacggaatcatggagcttggctataatctcagcaagaaacgaggtgatgatcgaacgatctcaaattctcaattggcttctcatcacccgatcgatcgagagaagaagagaaggggagatcgaatatattggctggttgaatcaactatcaagctagggttgatgagagagaggagaggagaggagagaggaatgaggagcaagtgtgtgtgcaagtgcaacccctccacccattggatgacacccacaattcacactgaactatagctttctctctctatctctatcactatgtatttctttctttctcttactagggtagtagtagctttctctctctagctagctagctagctagctccgtgtcagcaacaccccacaaggatcgctgggcattctgtcttttcctttgcctctctctctctctctctctctcttcagactgtgatgcactggactcaagaaatcccctgtacatgcctgcctgcctgcttacctgctgttactgtgctctaatcccattatatgctcttccaatggatgttaattactgcctccaaagctagctgggagattagattttagggtcctctttggagagctcctgaagcagcacctgataaaacttaatatctctaggtattagatatctcaagttactaaaatttttacctgtgaatactttctttaaggattgtaaaaattcttcttccgaatagtgcccagatatacatgagctaaagtgcaaagacaagtagtggacaggtgggacatgggtcacaattgacaagtctgaattttgcttatgatcaccattgccctgattaattgtgtagggccctgattaattaaagctaatggtgttcctgtgcaaggattcatactgaataattgaatcttttttctacatctgaaacaaagcatataggtagtgagtgttaactaacttcgaaatgttggaacagggcgtgataacaccaatacatgagacataaaggtcgatctgagatcatccacttctctttttttccacattgttctgaattctgatcggtcactgtgcatgcatgtgtatctttcagcatatgcacatctctcctccagctttgggttaggtatcttaattacaactgttaaattagtggagataagtgagcagtccatgaatgtttgtttgcttcaggcagggcaacaaaattagggcacacacaaacaatcagctttggcgatcttaaaagtggggaaggaaagctagcagctagctagtatggcctgatgaaaggttggtatgatttcctggagaatgatgggcttcttcattcatttatgctgttaaggaagggagaaaagtgtgctgagttagtgggtgaagcaggctaagcaaaagggtcagctttttgcatttacacacacatcattggcccattgattgaatttcacagctaagtagtacagaagtagtagtagattgacatgcatgcatgcttgaaccctgatgcaaaattttatatatgttctccttccatgaaaatttttaaaaggttgtgcccaagtagcttccaaccattcaatctcccctcaagttgattgggggcttcacaagttatttaatactcctttagagcttaaacatgattttttttttcatgaataagaaagatggtgtgacatcccagcccagggcttaataggattaatagaatacttatatcaataagttgcaacttttttccggaagccgatttccaaagaactccggggttaagcgtgcttggcttggagtaatttgggatgggtgaccgaccggaaaattcttcccgggtacacacgagtgaggacaaagtgtgtagaaaagacattgtgttattccagagtagggtagtctacgacctatataagcaggcccggcctgggagcagtctggcactggatacatggacgtggccaagttgcaacttcttttccggaagccgattttcaaataactctagggttaagaaaatggtatcagagccgactctcgtggtttcacgggcgcgtgtatcgcagttgcgcaggcatggtgtgcatggctggtgtggacccggagtggtcacacagcatggcacatgtgctggcactggacaagcgtgcttggcctggagtaatttgggatgggtgaccgaccgggaaattcttcccgggtgcacacgagtgaggacaaagtgtgcagaaaagacatgtgttggtctatgaaccccgcgcattacgaccggatatatagataattaaggatggttgataaacatataaaaaaatagttgtgctaaaaacattagaggaattaagatttgcgaggtgagacaaggcgaaaatgaggtgaagatccatctgaacctaacctctagtttggaccttattagccatttgtatagacgtaataactaatctaaccgcggatgtttgagggaccaattgatccaataaataataaaaatatattgatgatgtggctcagcggggatgaaattctatagtaatttttatttactggcttgtaactctatgttagaaagtagaacgctgctatacgtacgatcgcaacgtccgactttgttacgacgtcagcagcacatgtcagattctattaccgaagtgagacatttatcgtccaagtgattgagccttccattgtggccgtggtcgtatacggtagctagacaataaggacatatgtatatcattttcctagaaagtattatgtttgctggaatacacatcttttttcctgagtaaattgtgctcgatgaagaccggccaaactggaaaagtaaaaacaagctgaaaaattaaagccaatgtcaatgcagatgcagttatggttgtcctggtgtgtgtcatgtgtggcaggggctttgtactgctactcagattaggtcatccaacgacaagagcacaaccacactttgttgcaaaagccccaaatttaaagcctgatcttgggtcccctaccaaagcaaaaatctcatctctggcctggccttctgcatgcaccccaatgctttcctttcatctctgcagggccacaccaccatatgcccatgcacatccatccatcgtccggcttcacctatggtttttcagattcacttcacacatccctagtttgtgctactcctagctacaaattgaaattccatattggcatctcattgttcatttcaggccccaatattgggccctccagccagccagtacgtatgtcctagtcaacaatgacaggacattggtaagttacccagctctgtctgttctgaagcacacagaaattttacagcatttttacacacaagtccaatgtccatgaaaatttaacctccgaaattcctatgttccaaaagaggcatgaatcctgaaatccgtgaaaaatcaaatgaatcagttcattgatatagggattgggggaaactcatgttttaaaatagggcttcagtaagatttgttattcaaggcgttcgcaaaaacaaaaaatagtgttcgcaagacttgttatgcaagtacttaaaacctatatatatgagaggagtaactaccaatgtttattaagaggtgatgaggcttgaagccgagccagctagcccaccaacttgtgctatacagtaaaactctaaggccttctttgtttaggcttataagacagttatgaatcgaaaaatctaaggctaaagctaaacaaataagtaattttttcgtttggcttttttaaagccataagctactttcgctattaagacaaaaactaagttggaaaaacttttttttgacttatgtgagagagatatatgactctatcattaaacttaggactttaaatccattagcttataagtaacttaaaagtctaaaccaataaatctagacctaaaaaaagccccaagtctttctctagactataagattcaaatggtggagctggtgctgctacggatttatggaattctttaccactccaggctaaagaaaaccacacgagggttttaactagctatgacccactgagcccactaaccagtacatttgttctagtgtgatgataagtcaacaacaataggacagtgctaaattcaccgaggcgcattttcaagaatggtaaatttacagtattttcacacctatcagctcaatgcccgtgaaaatcctgcaaaatccgtatgttgcaagagagacctaaatcctctggtataacatataaacttgtgaaaaaaaaaacttgtggattaggaggaaatcatcttcccaataaggcttaatatatactccttccatcctaaaataagtgcagccggtgaactacacggctgcacttattttgggacggagtgagtaattcaagtacttcacctatatatgacactccactcaaatggtggagcaggtgctactatgtacatatggaattatttaccaaaatatgagctaacaaaatcacctgaggatttgaaccagctacctgcagctgcaagttggtccctgcaggcatagatggatgcaggacatgtagaaagaaacaaaagaagatgtcagcaaatgaacagtttatagacccgtgggttagcatgtccttcactcaaaaaaagtgaacttttaaactacgcatagcttggttattctttcatctttgctaattagtttcctttggagacaagcaagggatttgatagatagatagatgggtcaaatattgttccacgtcagcttcactttgcttaatttgataaactgctcttgatttgtactggtgatccaaaaagcaaaacagctactgcgccaaaacattgtacggccgatacatattcttatagtccatgaatataatatgattgatccgtgaaattgaattgagttttctaaatttttggcaagttgttgatggagccttcttgagaggttggtctcgtgggctactttttccaatatgttccttcggtgtagccaggtacagtggatgtaacaattgatatcgacttatggtacagtgatcatggccccattgtctggaatccaatgttggtttttttgtgtattatgatgataaaaataaatttcttccttttttttttcaaaaagatccaatgggtggatggcatggcgcgctatttatacattttttttcatttgtccacaaagaatttgtttttagataatcaatgcattgaaatttgagggaatgggggacaaatgcatattagagtttgaaaatataacggacaaatacattaaagttaaaacaaagtttaagggcattctagtttttttttggctttctattaggtccaatgattgttccccatttccaacttacaccatcaacaccttcgacaccattgcattgttcatatggtctggtgagatggtgcataatggttaactaggactgtggcaaccttaatgttcaagattttgtttttttaaggggaaggcgggattattgcctgatcaattaacccaaggcctgataattattctaaaaaaaattctcctctttcgctcaccaaaagatatatactactacattaatgtagtgtatattagaagaccaacgacatttttatctttgaaatgttgagccatcagccacca

SEQ ID NO: 10358 - DNA, 32592 bp, Oryza sativa
gcttccccccccccccccccccgtgctgatgtcagccctgggatttattgcgcaatgaatgatttaaggtttttcttttatagtaataaacacagtgaatcttctaaaattcataactaattcatccgagatccgtttaagcccattcaagtatcagtaaatcaagaaaaatgtgtagaatccattaaaaatggttttgttctctgtttcagtagtcttatagcctgtttgcaatgtttgccttgtatgtcgctagattccggttcttccgacgctccggtgtacttcgaaatagtcgccgaggttcctccagcagcagagcaaggcaagtcatgcttgtcacttgaacatgttgatcctatattgcaaatgctctattgttttccttcaaatactgcattgttttataatatttctatggggtgtttacctattgtcatagccatgctattgttgcaccatgtcccttttgtcagcttggggttataacatgactagagattggactagggattgcttagccatgcttagttcaactagtgcacaatggggaaaatcttattaatgtttagactgttggttctaatggtagtgttggattagtgccaccgctttggtgctggttaattaaaataaatcacatggtgggctgtgggtgcatggtttcgctggtcgcacccatggcagttaaggaccggttcgcgggatgccctggaagaacttatcgtacttaccacaagctagcgtgggcaacggctgggcttgtagtgtagccttcctctagtcgacgcatccaggcaagggtgggcgtgatggagcggggcgggccctgcgacggcctctgtcgcttccggattcacctaggcacgagaggggactgcccgttgcccgctgggaacgggggtgaaacctgaggtgtggtgtgcttggctagagggggttatgcgaagggtcctgtcacggcctctttccgatgtgtcgtggtggcatgtcggcgcacggaaacgtgttgtggggctgtgtcttgtgggtacagttgtatacctctgatcagagtaaaactattcgaatagccgtgcccgcggttatgggcggtcaaccagattcaccgtgattagtctcaccctagtgtaatcttttgaatttggatggtttaggtggatggttgggcctgttgcaacgtgggatagcgttggacagcggatgatcaatattaattaattattacaactgcttaaatcttttaacttctgtttataaatgctcgctttatgcaaatgaaccactctagctcttctttgataattccctgcatcatacccctattccggtatgacttgctgagtacagtgggtagtactcagtcttgctctatttttcccaacccccccagagttcgagtatgtgtcagatggaggtttctccgaggagtaggcttcgtccgtgccgtcgaggatgcctgtggagtggtgttcccgctgcagttctagtcaaggcttagctcctgttgtctttcgtttttccgctgcatttatgtaagacttttatgatgtttgtaagacgtggatctgaatgtcaacattgtcgtttgtgtaccccggccggtcctggacggggattttaatgcacattctgcttggaattctattcgggaatttctgggcgtgacagatggcggcgtgcgtgcgtgcgtcacgtcgctatccttttgcaggcactaacccacgttcccacgattccctccgcaacagcgcgtccacgttctttctcctgatagataaggaggccgcgagtccgatccgttttcttagcttctttcccggtgttagtttcttcttctccgcgcctgaattgctctcgcttcctcgcttctgatctcttgcgcgcacgagagaatggaaggagcagtgcctccgaaaccacaccttcgcctgaaatctgcaccaggtaggcgggtgatcagatttttggggagtgcctcccgcacgactgctcgactgctcatcgccatgtctggagttgccgccgccactgctggcggaggtggtacgccgccgacgggagctggatccggagctggtgcgccaggaggtgccgtgaacgacaacaacaacggaggcaattctgcctcaccatccagcggagggctattctcggagtatactcttctcctcctgctactgttgttagcgctattcctgttcccattgttagcgctatcgctatactatgtgcgctatgtttttgttcctgttctacatgatgcctctagcatgttatcgcgttactggtatattcctgttcctgacattcatgatgcgcatagtatgctactggttatgttaagatcaccctatactgcttatgccatgatcattgctttaactttttggattaaaatatgtcgattaatgactatatttccaacattgagtgttcagtgttcttgatcagtgatgaaatttaatgcaaatgatgccgtgcgatgcatctagaattctagcatagccgacttcatttttttgttcaatctggccgatcaattgggcctagtggacgtagatgatcgaactatcgaagagccgacctttgacgtggtcgttttcaattttgaacggccctcgccctccatgaccatgcacgcataatcggctcgatcgtgtccagtcttggttgactcctgataaaaaaaagacttaattgacgcgacggcttacgcatcgaagatggcaaaagaaacgctagtaaacgcctgtgcgtagcctcctccgctgctcgtgcctatccgcctgagatgcactgatgcacattggcaactgaaccaggttgggtcagtttctagcataagcacaaacagcaaaccatgaggcccaaacttatattagggcagataaaccatgagaccccaaactaaaagaaatgagaaaatcaataagttatcttaagaacaaactaaatactgctaccttttaaacaccttgcaactaaaaaataataaacccaaatttgaacgttaaaatcacattcataactaattgtttacacaaattcctcatttcaattaaaatatcacatattcaaagatatcttgttaataaaatactactctctccttcccaaattgataatcatataatgaaatccaaaatttcttaaattgatcatcattatgaaagaatgtatgtatagtatcttgattgatgtgatttaaattatccttaacgttggtacataaatatatatcatatcattttgggatggagggagtatcatacttttattgaaaagaagacatactatgataagggtgggttctaaactctcgatgggatatttctcatgtactttttttttctttcgaactgaatacaaatactccctccatttcaaaatataagtcacaaccacccttaacccaaagaccaagaaatagttattatcaccttgtagtttagatcatcctaataaatgtaatgcatccatccaatagagttagagaatgtgagtgaaggatttaaaaaaatagtaatttaatggagaattgttatagttaatggcatacatacatgtatgccttatattatggaatatcttaaaaaaagtggttgtgccttatattatggaatggagggagtaattgtttaacaattttttttatcttttttatatatcgacatgtgagttgagtttggacctaagatttcatgaaattgtacatatagacatgtcatgagtgctttaaatttttttttagaaatttttaaaacagtttggatggtttttaaacaaacgagaagacatcccctcgagaagtttccaatacactgcaggggagtaacaagaagaacatcggtgatcttgctgaaattacgtaccaacctaaaagacataaaattatcgaacgcattcacttagatttccacgataatccgatacataacagagatttggagaaagtagactgccttacagactcgataatacattatttagaagccaccattcatgggccataatcgcgaattctgatcgattagcagcctaacttttggagcgctccaaaacctctacttgccatcgccatggaggccctggaagtagccctgcgggttggactcgaagccggagcgggagatgtacgatccgtcgccgccgggagccttcatgctgtcgcccccaccgccgccgtggtagccgccggacttgcctgcgccaccgccgccaccagcgtgcccgccgctgtatccgccgccgtacttgcctgaacctccttcgccacctccctttcctcctcctcctcctccgccaccgccgctcctgcccccacctccgctgccgcctccacctcctttgccgcctccacctcctccaccaccacccttgccgcctccgcctccgccgccacccttgccgcccatgtctctaccttgcttgatcagtcgaagaataagcttgcagaagtagagtactcttgcgattgaacttgcgaactgcgttatgctgtatcgagctggagtgctttgttttatagaggacgacgtccaccgggataagcgcgagcaatcaaagccgcgttcatggcgacgcctcgcatatcacgtctgagccatgcatatgcccattaccaacgcgaagaatgaatcagaatttactactccggccaaactcccgagagttttaatccgtgaaaattcaaaggtcgagttggaccctgaccgttcggctgaatcatcatcagcaacggcgttgcgagaagccgagaaacaggccgtatttgtagagcccaagactatagactgatctgggccattacgagcaacagcacacagcccagctccttctatgggctgtggcccatagatcacctgggccagtatcctcctcacaggcttccagccaataatcgtagcttgtaaggtaacaacagtacaactgtacaagaaaggatggaagtgtcacatgcatttctgtcatgttgaaccagctaattgcagcaggccaacttaccgtaacacacacgtacgcacgtcgcaacacggctccgcaacagaaaaaaaagaaaaaaaaaagaaacaggatcgattaattatcatacaaaaacgttgccgccttgcgcaaccaccaaaattaattaaactacatcatcatctaccactgtaattaattaattaatgaactccatcttctgctgtaattaatcctgtgtacgtgtgttctgtatgcatgatcgcctcaccggagtatatatatatcgatcgccggcgatcaccggaggaggtggagggccttgaggaggacggggcggaagcggcggacgtcgaggcggacgtcctgctgcccgaggtagatgtccttgacgagcgaccagctctgcttgtggatggggagcgggtcgaggaacaccgggtgcgcccgcgggtacacctccgacagcgtgctctcctccgccgtgatgttgtactgcaggtacctcatgttcatgtcgcgcggcggcacgccgtactcgtccatggcgagcccctccatcctccccagcggcaccacctggatcaccaccgcgttcatggggaggaacaccaggttggtcagccccgacccgtgcaccgccaccatcgcgtcgtacgagttcaccgccgacgccgccgccgggatgtgggcgtccagctccgccgccgccacctcgaacccgaccccctccgccgccgccacgatctcgtccaggttcacgaaccggcggcgggagcgccggttgatcaccagcagccgcggcttcttgctcttgtcctcctcctccatccggatcgcgtgctcccgcggcagcgcgtaccgccacatcaagaaccgcttgaagtccaccatggagtagttgttcggagctcgccgcgggtcgatgctgaggtccttgtggctgtggagcccgacggtggcgcggcggtagcagcggacgcgctgctcggcgtcgaggtcgacgggctcgtacttggtcaggccctccacgatctccctgtacttgccgaaccaccaccgctgcttctgcgtcaccagcagctggacctcgccggcgaggtggcgcgacgtgatgaacagcgggatgatgttgtcgttgaagtcgtggtagtagttgccgcagtagccgccgttggagtacacgatcgccgggacgtcgtgccactcgtcgcacggcggcgcctcgtcggcggtcaccagccgcaccgtcacctccgtgatgccgggcatcacgcgggactcgcccttgcgggtgtacggctggatcttccacctcgtcgcgttcgcgtccacgcccgtcgcgttcacgccgccgccgccgccggagatggaggcgaggctcggcgccaccaggaacacctccgacgtgcggccgaggatgcggatggcgccctccatctcgcacacgtcggatctattgtctctgaagtcgcatcgcaggtgaggctccgggatgaactcatctgcatcaagaatttcatcgagcaaattaaaacaaaatcagaatcttttctccaagataaactcagaatcaacaacgtcagaaattaatcacattgtggggtttgaaattcccaagattatgtgacacatacctacttgtttgaagctcctcctaccatcaatcaacattgatgggaaaccaggcttgcctgcagggacaacccatcaatgtcagttaacccatttcgatcacaagaacatgggaataacaacagatgctgatatcctaacgtgagcagtagcctatcatgaatccatgatggacattgtcaacgaactaatcaattcatcattcagcaactgttaccattttatcccaacaaataaaggaacttgttttcttgaaaggattcagcaactgtttccaaatatgcacaggaatggagtatcgacaagacaaacagcatatgcttctctgacagtactactaatcaacatacaaactgaagaatacaaaacgattatgattacggcgtacctgtggttagcatcaccatgtactgatcaagggttggtgagtaaatcaccaagaactggattgccacgatgagcaggagcagaggagggtggcagaaagagcccttgctcttcttgctcctcacagctgccttcatctctgaaacagcaactacccacacaccagggacaagaacagaacagcagctttacaactatatacaaaacatagagcttagctccctctctgatgcaggtatccataaatgcatcacatttgcatgtattagtacattgctaggcaagttgattagttaagtccaggggaattaacaaaccagattattaatcgatggacccagcgaagcagcagcgagcaatagtgaccgtgaagaacagtactgctacatgatttggaagtgatcaattaattaatcaggccttggtcggttgaaccagctgggcagttcatggaaaccacgtttattcgcgtccttttcctttttgttcttttttttttcgtcacgagaactgacgttgcttcttcgtctttatgctgttatttcttttctctgaaacagctagaattcagaagcaagatttcaagaaaactccagtttgtggtggcgatttcgactgttttaatctcaagtggcaaatctgcccgatataatttgtgaagtcaatgtgtgacatgtgccatctaatggtgttttgcacttgaaaacccgggatgagttcagaggccagatccgttacactgcaaggctacatctgaaaaagaataaaaagcgtgataagtacccctcagatctatcagtttggcatttcatgattctgctctagcaaaagggaattgtttgatagcacaggagcacatggggggtaagggaatcgcggagcaaacgcaacgaaatggtaggggagattgctcagattgcaagtttgtactttatatgtatttatattttggatgaactttgtgcactttatataaagtgggagattatttgttcataagtgaaacacttgctaatcctgcattttgcataatcataatggctgaggcttttgcatcctgtgcttctgcatatacaatgactcaaaactgcgtcttttgctgtctggtcatgacaaaagaaaacaattgcagacaccaataaaaactgcaagctggatatcctggattaacactctggcatgagcaatatacaaggatcaagaagtaaacgccaggatccatgaacaaatgagcatctagctaacatgtacacagcgcgagatcatctcgcgaatagcatggggaattttctttaattctgatccacgttggttctgatgtatggatcatacatttatcttaggatggttgaccaatccttaaaataggatgattgactatgattagagtcagttagctgcaatttcatatttgcccaattgacactcgtcagttgccaccatgtctgaccttgcctgcttaccagatgacagtgaaaacgttgctatccatgtccacagagattctgcagtgatgtacttaggaaatcaatatgcagtggggcgattacacgtttctttaatcctttccatccaaatttgctgacacctctctgaagttcttcttacttaaccctgaattcttttcgaagcactatctgaactataacagtccatacaatcccgtccaaattcatcaaacatatatcgaccagctggagtgctggaccattacacttgtttggattaaaacaatttcttatctctttggatgattttagttagcccatacaatcccgtccaaattcatgaaacgtatatcaaaccagctggagggctggaccaatacacttgtttggattagaaaatttcttatctctttggatgattttaattcaatttttcctgctaatccagatggataaggcattatttctatccatccgtacgagattcctgtgtttaacttatcaagaactcttgctacttgctctgagtttttttttcagagagaggaagagaagacctgagttaattaatagcccgaggcagggtttggctgtgttgtttggggctgggaaccctttcccgacgcttaaaaacagagcaacggattaacatatgattaattaagtattaataaaaaataaattaatataatttttaaaataatttttctgtaaaattatttaaaaaacacacaatttaaaagtgcgcatcgaaaatgagagtaaagttagaaaactgtagtgtgaagcttatggactgtttgggaagcttaagattctgagaagcagctggttgttagccaacttataagaatctagaaaagctgagtttcctaacttctggcttctagttcttttttagaccaaaagctgtttgaggagtttctgatcctgattctaggagaagctgtagctagggatgcaagcaggttttttatccagtttatctcacttctagtttatttttcttctaaaatttgtactaccatgtgaaaaataaattaacaagcgggtttttatacgggtagtgggactacccacttgcatctctactgcagctagaagctcccccaaacaggccctagctttggaggccaaggcccatatatagtaaggcctcatttgagattttcgcccaaataagtcccatccatgatgggccgggaaaacggtgccaatttacgggctttcctcagatatgggccataatttgggccctaccagacgaggccgaagtgggtcgggccatgtatgcgctgtagtcaacggcccgtacgatgcgactccgagaggaaactgctccggccatggccatcgcctccacgagtcaaacccagccaccatcggaattcgagggcgcggagcagcggcgaaatgagcggcggcggcggcgaggtcgaggcggcggcggaggcggcccctctcctcgtcccccacgaccctcagccggcggtgggggcggaggtgcggaggcaggtggggctcgcggcgccgctggtggcgtgtagccttctgcagtacagcttgcaggtggtctccgtcatgttcgccggacatctcggcgagctctccctctccggcgcctccgtcgcctcctccttcgccaacgtcaccggcttcagcgtcctggtaacacttaaaccataattacatatactttaacttcgggttggtaaattcttttagtatgaatagttactcctttgttcggcaaaaaaatttgggaagtgaaaatcagtacaaagtacggcgcgtttgctttatggtaggacatcatatccaaaaattagttcaagttctacaaaaatacaatccatccaatgatctaaagaggccttgtatatgcttgtagttgtattgtgcttatggaattatggtgactggcatttctttataaaatgtatggaatctcgtttgtttttcttaaagaatatgtatggattctcctttgttctactatatgatgcctgatcttttacttgcaagaaaatttcaatgaaaactgcatatctgtttattccatgacaagctgggaatgggaagcgcgctggatacattctgtggacaatcatatggagcaaaacaatatgatatgcttgggacacatgcgcaaagggctatctttgttcttatgcttatgggtgtcccgctggcttttgttttggcattcgctggccaaattcttatcgctcttggtcaaaatcctgagatatcatctgaagctggactatatgccgtgtggttgattcctggtctttttgcatacggtttgcttcagtgccttaccaagtttctgcaaactcaaaacattgtccatccactggtagtttgttctggggccaccttggtaattcacattttgctgtgctgggttatggttcattgttttgaccttggcaacagaggtgcagctttgtcaatatcattatcttactggttcaatgtgatattgctagcaatatatgtaaaagtctccgaagttggcagaaggagttggcctggatggtcaagggaggcacttaagttaaaggatgttaatatgtatctaaggctagccattccatctacttttatgacttggtaagcagcctgacatggagcaaccctgttcaacaatagatactctctttttatgatttaacagataagttacatgaaataccttgttctttctgcatggaaataattatttgacttgtgacataactcagcttggagtattgggcatttgagatggtggttctccttgcaggctttctacctaatccgaaactggaaacttcgattttgtcaataaggtgagcaaacagaatgtctgcattcctttcagtatagtttctagcaaatgagtttagttccaaagttgttccaaaacataaataataggctgtacatttcaaattcatggtattacatgcatttgctttttaaattttctgtgataaccatgaaatacacagctagcaacttagcatgttcaatggattatgctttcagacacttgataatgtgaagtaatgaatggtttgtttccagcctgaatacaatgtggatggtttatacaattccaagtggcctcagcagtgcaataaggtcagcagagcagaaatttgggatgacttttcctttcattttatgagatttgacacctcaaagcttatctaattttggcccatggctcatgtctctttgcagtataagagtttccaacgaactaggtgctaggaatccgcaagcagcacgcctatcagtctttgtttcaggaatcatgtgcctaaccgaaggcatacttgtagctatcatcacagttttggtacgggatatctggggttacttgtacagcaatgaagaagaagttgtgaaatatgtcgcagcaatgatgccaattcttgctttatctgacttcatggatggaatacaatgcacactatcaggtttgggataaaacacacatccaaatatgacaattctgcatttatcacgtagtgcctacactccctgtttttaatcatacatgtaaccagaataccagattgcatatctttttacattgttgccaatcttgcagttggccgttttgccccattacagtgccacttctaataataataaagcccttgaattgtttatatgttgcatgtcacggcctgtttaagagctttactgacgtgccttgtacaatccaattagactcagtaccactaccattccaacgcccaacgatttcactatgcaatctaccagcaacaccagcattaagagagatagtatagaagttttagtgtgtgattacgagaaattattctactgtagaaggatggtaatgtaagtattatgtaggagttttactatgcaagctaccagcaatgcttgtgttaaagaaggctgaccatataagtactgtgtagagaactgtgcctagctcggttggtatgggttgattgctttcacccagcagacccaggttcgaccccttgacctgctcatattccactggattaaatgaagggatggaaaaatatgtggcttctcctatcttaataccattggagtgctagtttttttttgttctgtttttttttttaaagaacaaagagtgctagttcatatgccattttctggggggtgatgtaatcttttgatattttagacttgttattgttcatgatatttctacataatttagttttttttaaccttggtcaaatattttatgttgcctttattatatcacatccatagtaaccatgatgccaacaaacctcaatattattgatcttagtcaccatttgtttattttttttatgactcttaaggtgctgctagagggtgtggctggcaaaaagtctgttctgttatcaacctgtgcgcttactatacaattggtatcccttcagctgttacttttgcatttgttctgaagatcgatggtaaggtaaattttattttttatatgcaattctggcatgacattgttgtgcaagttctgtcgtaatcccactctgagttggttttctgtgcagggactttggttgggaataatatgcgccatgacagtgcaaattttagcgctggttgtcatgctgcttcgtacaagctggaatgaagaggtacacccttaaacttataacctttacagtcaaagaattgatgcttattttttcccttttttaaaaaaaaaaatcgaaggcacaagatctccctctagcccagtaggaactaggaacagaaggacatgcactgttccagtagtatgaaaaattgagattgggcagtagctacgttcagtggcaaagccaggatttagagatggggggtgccatctacgagacatggtaattcacttaaggttcaatgaacagtgattttgtagtgttgatgcatgatcggtaactcgatatcatacatgttacagcgattagctacaagagagaacaagaacccatatatcatgattcgccaatttaaaattcagtaatatttttaatatatggatgattgaacagtttgttccattaattggagtcttgcaatcacttctaaaatgataaatcagttagctaagtcatttcataagtcagttgtcttatatcctatatagttagtctcatctgtaactaatgatataattaatagctagattataagtgctaatcatccttgggagaagagaggggaggggaggtcacataggggttaggggggtgttggccctccctggcccctacggtggcttcgccactggctacattgacctccacaaaattgctgaagcagcacaggactttacacctggtgaatgcttctcagtgcctcagtggggattggggaaggggatgcataactgatatctatgaattgctggttttctgctttgtcacaagaaactaacttgcaattattctttcctctgaaattaatttgcatggagaaatgcatatcaatcgtttccttctaactggtttggtatgacatggaagtctggtttgattgagtctgcgtggcatacctgttgagccttacctcaccagtccttcctgctgtgctgagatgacatgatatgctagcagtctttgtcttactatgttgtctataactaacttgtccttgatgcgtttacttttgttttctttataggctgaaaaggcccgggctagagttcagggttcagatggaagaatcacattggcctgaacatggatttcaccagttttgagtcatgattataccaccacaaaagcagttattgataccatagtactatatatagagtaattgatactgttgattatttgaaacttgtttgctgtacattcaataattgtaactgattgggcatgtgacttcttttcttttgtatagttgatatggtgtgctgtgaatgaaattctgcatagttcgccctgcaacacaggataaaggtaactcctaaccatcttttccaacacaattctatttccgtgtttgaaaagctttttcgaacatttttctacaattagtgcccaagtggaattattggagtagatgaaactaaaccatcagaaactgaaattgaagtcaccaaagcataactagggcagggtactgcaaatttatttttatttccccctccataccagatcagattgctattgttaatcttttgaagacaaagaggagtaatcattaaattactattatgagacactggcctacctaattcgatgttcttttcctgaggaaggtaccaagctagtctagcttcgatctgagagtcgacgagtaccatattacattcctacatgctttagttgttgctactcctctctcagttatagtagatgtataatgcgaaaaagaaacaaagttcaggaatttcctccttttaatgcaaagacatggaaagcttttgtgcattcctaaaaacaaggttcatgaagaaaatacagcataaaccacaccgttataatttgtcaacatccttgaaaattaaggcacgccctcttatgttaaaacaaacagttctggttttacaactcatggataataataacccacccgttcttccctatgtctcctggtagatggcacagcacaaaaaagtctgcagagattctggaacttcctctctggtcttcccattcaaaaattgttctttaaaacacatgcttttacgttagctggtgctgtagtggtgtttctataggcacaatggtacttagatcatcatcctgggtcttggtcttagtttatgatttatcactgttcttgcttattctctatcgcctctgtcttcatttttctttggagtactatatacatatatatatatatatatagctgctctaatatgatatttcgtggttaaaattcctggctccatcttgtttttcactcactttccgccactcagcatcctcagatgttatcatttatcatacatgtgtccctgtattgttggaccagaagtcttcggcacgtaaagctttagataaagcagcacctgacctgagtcagagcttctggacgcatatcataattgcttccctgcttggctagcttaatatacaaggccaattaagaatgcatttatcagaagaacgtgcacaaaccacccttattgatggcatccaaaagctacatttcctctgccaattaggtctgtgaggtcaaaggtctgatgaacctggcaaaagcagagacagatttctgaccacagaaccttcatctcagtgcagaattttcaaagactgcatttctattgtacagtaacatttccctggaaagactcctttacatatgatcagagacaaatgaggcttttgcaaatgtaaaacaatgaagttccacctttgaaagttgaaacccactagaaaggagacagataaagcattatctatgttgagcatatgtttggagtactaaggaggaacttagcatctgttgaggaatttagcatctgttgttgttagagaagaaaataatgagaaaacctgtgatcaaagggattcgaactcaggcaagcatgctgctccctgtcagccgagctctccctgccaaccaagctaggtgccgttctcttctacataagtagtagacgaaactcagctggttttaactgcatagacaagcattttgctgtccttctgtcagtaaccatgaaatgcaacacacggtcacccttgagctggtgagacacagctatcagccacaaagcagatagtactttgcttacaggagatgattctggagtgctttctttctggtttcggcagctcaatgatcccaccgtgaaaggcgaggaagcaacagaaatttggtagctcctccaaagtggagattatcgtggaagctgagctgtttccaaatcccaatactacacctactaatcgtctcttatctgaaagataccactgatcatttctgaataacgaaaaaaatgagaatgtgtaaataggcaaagttctatgattaaggccacgattgtcggttatttgggcgttttccacatatgattgatggcatctaatgatcacatttctactgattatatctctgggtcggttcagtaatgaggaaatgagagggaaacggctccttcaagttgttttactgtcttgtcgtgcagtctttttcttgtgggaaacagttcaacaaccactgcagcttgttgggtacctgggttcatggattcttttaagaccttttctgtggtggtcttgtttggcagtgcttaccttaaagctcttgcaaactggcttctcagatgaactctgaatatttcgttgtctgtacaggtagtgtttcagtttaccctatgagctacaactaacgacataatgtcagtgggtgcttaaagagactagtctctaggtacttttaaggtaatgtcagacttccgactgaatgcatatctgaaaactatgttcttgattgagaacaaggggggcatggttaaccatttcttttttgtttcagaaaggccagattggtatagctgaaatttgtttttttgctcattcttttctcgatataagttgaacattgccttgttttacaaaattgctcggactattcagatttacatactattgatcgtcatctcatattattgatcatcaccatttgcttggcaggttgtcagaattaaagactgccaagatcttggaagaacactattggtggtggcaaaagtgaattgttcatcactccccacaaacaaataattagcatttttcatgttgacattttatcgacaacaaccaatttacaaagtgtgcaagtgtaaattaacctttggacacttgtctatgacacgatcttactcgtctcctcctttttatcaaaaaacaatgaaagaaatgaatctcaccacaagaagaagaaggagaaaaaaagcgaatcaaaaacagaagagctctcctatctaccatcagcatcatcaagatccccagccatggtgtcagggctctggcaagaagtcgcgcgcccgttccagcgtgttggtgagcttggtgaggttgagctccacattctgcttgtccaggtacaccgtcttgatggcgtcccagcctttcttgtgcacatcgtatggatgctggatgtagaaatggtctctcgggtagagctctctcagcgagctctcgtcgaaggagacattgtactccatgtagttgacatccatgtccttggctggatccttgaaggtgacacgggtgagccattcgagccccccgaatggcaccacctggatgagcacggcgcggctggggaggaacaccatgttggtgaggccggcgccatggacgcccatcatcacgtcggcggagttgacgaggcgcgcgaagttgggcatgtcggtgtggttgtccggctcggcgatgcgcacgtcgaacctggcgagcgcggcggcgtgcgccatggcgcgctcgttgaggaagcggcgcgagctcttgcgggagatgatgaggaggcgcggcttgtcgcgccgcggcgcgcccgtgcgcgacgcgacggcgcgctccaggcggaaggtgcggcggaggaggcgcttgaagtcggcgacggtgacgccgcccggggagcgcgccgggtcgatgcccatggcgcggtggaacgtggcgccgatgaagatccgcgggaagcagtgcacctcctggtcgttgtcgacgtcgatgacgtcgtaccgggagagctgccggaacagcggcgtgaacttgtcgagccaccaatccttgatcccgctgagcaagaactgcacctcgccgccgaagtggttggtgctggtgaagagcgggacgagcacgtcggtgtagtcatggtacaggttgccggcgaagccgccgctggagaagaggaacgccgggacggagtggttgcgcgtgcagagcggcggcacggcggtgtggttggcgccgccgaaggggacgagcgtgaactcccgcacgtcgtccatggcgacggcgtcgtggaggcgcgcgtacggcttggttctccactccttgtcgagcgggttgatgtagatcttggagtggttgccgtcgacgcggatgtcgcccacggcggcgcaccgctccgaccgcttgctcgtgacgtagcacgtcggcctggtcgggtcgaagtcctcctcccctatcggccccgtcatcttgtacctcgtgctgtcgtaatcctcgtcgatctccaccacctccatctcctccgccgccttggctgcaaccacaattactcacagctcatcactccatgaatcaatcaaagctcatcactccatgaatcgatcaagaacaaggaggaggaggaggaggaggaggaggaggaggaagaagcgtacggaagggggtggagcagtagcgagccttgatgtaggtgaggacgcagagggagaggagcatggtgatgaccatggcggcgttgcccatccgccgcggctcggcgcgcccccgcgccacatgatggtgcttcatcggcgccgggctctcgccgcgggcggcgcgcgccgcaggtggtggtttggtttggatctgaaggaagcaaaaacgatcgggcgtgagcagcagagagaggttagtagtattaaaggcggggtcggggtggcgtcgcgtcgagtggatgatggcgaggcgatggcaaccagaggttggtggcgtcgtgtggtgggtcggagctcgcaacggcgcaaccactcactacaagcacaagcagcagcagctgctgcacagtgcaaacggcaaagcagagcaggcagctacagctacaggggtggggacgagtagacaaagcagtggcccagctagcgcaccagtgcaccaccaacaacaacccgatcgccgatcgctcgccgtcgattggccgaggcagataagatcgcttattcacagatgtactgcagtgataaagggtgtatggtttcaaggctgaggtacaatgtttaacctctacccctaacacgttcataattttttttcttaaaaaatgtttggaggcagcgcaaacgcaacaacgctttgttgttgatgggtacgtggttcaacaaaaaaatcaaaccagttaagcttcgttcacttttcaattttttttttgggacgctccttccgtcaacccggtgtttttctttgcgtcgattatatgtgatgttggtgaagaaacggtcgcctgcctcgtgcttcatgacgagaggtaggttggttcattcacgcgttggcgttggcgttggcgttggctacagaatggtgatcacaacagattcacagatctaccaaacgtttgagcctaccaagtacacgtaccaagctgcagcgacacgtacagcagtgtggaataaatggcataaaaatgtacagcagatggtgcctgattaattcagagttgctcgcggcggcgccgggcagcgagaggaacactcgtgtctcaggcatgttcatcctcaaatctcaactgaatttttgtcaggatgctgcggtgtcaatgcacgcgcgctcacgtgtttttcccgtttcgcattggctttcaaacgccggaatccaacacaaccgggggctggattaaattaaagttgactccttctttcaaccatgatgttaatttgctaaattgatcataaatcatgtactagtaatcaggcatagagcttagcttgtacaaacctacaagcttaactgcatagtagtggacacatgaaacttgagggagaaaaggaacccatttatccacccaattagttgctcggtcattctcatcaacctgaacgcaagaacaaacctgtatatatgcaaccacttgaccaatcactcgacaagcaatgccaattcatgttctccaatccaatctcaccaaatcgagaaccaacattttccaacgacaaaataatacactgaacctatgcctgcatttggaattttggatcactcgttcagttcttgcaccgttttattaacctgtagcgatgtactaccaccatctgtttcagggattcagaaaaagaactgagagagacagcggagcttactgtcgtcgttgctacgatgaaaagggttgctttcaagtgtccatctctgtggcaggtgaatggcttctttatataagtcccaaatggatggaccatttgccttggatctttgctttcatctactctctgctctgcctctatttctccttttgttaattgacatgtccttgttaaatacttaactatgtagtcgcactgaaaataaaactgttgcttctgatgcaaatttgctagagctggctacagaatgggccttgcttgatgaattgaagcaaaagcaacattgctagcgacttggaggaattgggaatataagatgttgctcgatcagacagccatgaactcccagcaccaatgccctgggcagcatgtgttttgtgggggctatctcgtacaaattggccagcgatccagcgtaccaaaccgatttgtcgtgggattaacaatcagtcgatcacaaggctacaaaaaacggagttaatcaaatcgaagactgcgtctgcgttggtcgtttcataatcacgttcgacaactttccatgtgtgaataaacaaagtcaatcataaggggaaagcacctttatcataaaggttaaaaaatcatgatatatgattacacacagcaggttctcaattttaggtctgttcactttgatgtaaaaaaacattaccaaattttagcattaccaaaatttggcattaccaaaattttggcataggcaggattttttatatggttaccaaaatttgacagcaaactaaatgcagccactttttttacagctttatcaaaatttggtaatgttgaaaatggcatcaaagtaaacaggcccttagcaacttgccaatattttggtaggatttcttatataattaccaaaattcagcaacaaactaaatgtagccacttttatggtaactttaccaaaattggtaaggttgaaaatgacatcaaagtgaacaggccttttttttaaacaaatgttctcaaaatttatggattacatattgatgtgcctattgaggatgtgttagagatacgattacaaacaagtattccttccgtattttaatgtatgacgccgtttactttttgaccaacgtttagccatttgtcttattcaaaaaaatgtaattatcatttactccatccgtcccaaaatataacaacttttagccctcaagatttgtcccaaaatataacttctccactaacattctctttccaaccaatcacacccctccaccattcactttcccacctacctccattacttaaccaatcacaaccatttatcattcacttctacctactttcttaataaccatgtccaactctaaaaatacttatattttgagaccgagtaatattttattatgacttgatttatcatcaaatgttctttaagtataacataaatatttttatatttgcacaaaaattttgaataagacgaatgattaaacattggctaaaaagtaaacggtgtcgtacattaaaatacggagggaggatgtacttacatgtgatgatgatgtgtacgcgtatacatacaagtacattcttacttgcggcccatgttggttagacggtcgtaacgggattacgattttgtgaagcccaagaactagattgaggtcctacgtgcgctgggctttcctcttacttgcggcccatttatgttgggctgtcaatttatgggcctcattttctaaagtggctcaatgaggcctagcaaggtttatcacggcgggccatgaatttgggatccgggcctttccaatgcttgcaaaataaaggaataagatcactttgactccctcaactgaccaacgaatctaaatcgtatccctcaagcgcaataccagaaatcttatcccctgaacttgtaaaaccggtgtaattttactcccttggtggttttggatggcggtttcgctgacgtggtgcacacgtggcagtgttgacctgatctttgttccacgtggcatttgacgtggcgtttatgtggcattaaaataaaaaaatatatgcggggcccatttatcattcacacaaaaaaaaattgtgggacatgtcatcttctctctcactatccttcttcctcctctctcccttatctctctctctctctccccttgacaagagccgatggcaggcgggggctcggtggcggcatcagcgagtgggtgcccggagtggtggctgtggtgggcggtggaccttggagcaatagcttgcacgccccaacgcgcggcggcggactggcctcgagcgctccggcgtcgacctggccatgatgcggaacagcgactggagctcctcctcctccgacacgggccccctccccgaccacgtccgccgcgagaccgccccttcttcctcttggacttgccgccagccgtgcccgcggcggcctcgcggaggctcgggaagttggcagcaggagtagggggctcggtggccgccggggcggcagcgttcttgcgctcctccacctcctcctcggtgcgctcggtgtcctccgccgcgcacattccttcgtgccaccgtgcccggctcgctccctccccaccacggccgccccgcgccatcgtcgccggaatcatcctgctcatcgctgttgtgccctcgccgccatgccctcgccccgccaccatccccatctcccgtggcgccagcgccgctccagtcccggacctgccgaagctgaatccttgctactgcggcggcgagggcggcggcggaggcggcgcgaagaccgtcggctgccgctccgtccattgcccgccgccgccgctccccacgcacgaagagaaagagggagagatagagaagggaggagggggaggaggaagaagagataggagagggtgacctatgggatccacatgtcagtgggtcccacaaattttttttgtgtgaatgacaaatgggtcccgcatatatttttttattttaatgtcacataagcgccacgtcaatgccacgtggaacaaagaccaagtcaacactgccacgtgtgcgccacatcagcgaaaccgccatccaaaaccatcaagggagtcaaattgcaccggttttgcaagttcgggggtcaatatttctggtattgcggttgaggtatacgatttagattcggtagtcagttgatggagtcaaagtgatcttattcccaaaataaaatcccttctttgcatgaatattgtgagtttcaccaatactatcactgaatattttttcagtttctacgaaatttgatctgttttgcacattaaaactcacagatggcactggtatcttgaataatgaaccagattagtacattgtgatcctgacagggcaacctgtcttggccacaactagcaatttgttgttacaagaggtcaaccagagattgacctcgttctcacactgacaagcacatccatttttacaacttattgcaaacaggtcaacaagacgttgacctcacccacgcattcggaagctaaaaaaactttttacaagcagcaagcaggtcaacaaaaagttgagctgcagatgctgaagaaatgaagatatctgaactttgtctgaaaaaaaggaaaaaactctgaacatttcagaattcagactgacggattggcgttcgtcagttggtgcaggaagggaagacccacaccggcggcggccacttccagagcaggtcgcgcacggcgccgcgtggcaccttgtagctcccgtcggcgaggtcgagcacgccgacgtcgggaaccacctcgtggcacctctcgtgcgaccatggcccgtcgtcggtgaagtagacgcagttgcccttcacctccgggcagcaatccgccgggacgcacagcgacgcgctcttgcccaagaacagcgcgcgcccggcgaggatgccggcgccggcgccgtccacccgcgcccactcgccatggccgccgccggcggcgttccactcgaagagctcggccttgacggtggtgtactcgacgcgttcttgccggggctcccacttggaccgcgcgtgcgccttgtccctgagccggtgcacctggagcaggtgtcccggcgagagctcgacgaggtatttgctgcaggggatcgacatggagcacgcgcggccggagcagcagcacggcggcgcgatctccctgggcggcggcggcgtcgtgcccgccgccgtgacgtccatgtcccatgcctcgacgcgacccacggagtccagcgtgtacaccgcttggtgcccgtcggcggcgggggcggaggcggcgcgcacggcgtcgacccagcatcgtgatggcatgtcgaggagagtccacttcgtgtcccctgctctggcaatggcgagacggtacagtggctggcagatgagcagcacggcgtagccgccccaagaccccggcggcgtcgtctgcctccgcggcggtgcaacgaggatggccttctcgtagagctcgtacctgagcctgtccggcgcgaacgactccggcgggacgagcacctcgtcgccgtcgttgtctccatcgccgaagcagcagcggaggtcgtagctcgcgacacggccgtcggcgtcgcggctggcgtcgacgaagggcagcgtggtgaccgagggtagctggacctgcgcgccggtgagcgggttcaggaggtggagctcggaggcggcgtcggcggtgacgagccacccgtcggacgagccaacacatagccgctcagacaccggcggcgccggctgcgggatggcgtacgccctgccatcggagaggctcaagaacctcgcctccaagaacctaccatccccaccgccgccgccgctcgggctctgcctgcgcgccgtcgggttgaacgggagcatgagccacggcggctgcgcggcgcgaaaccgtgcggtggcggaggccgcatcagccgactgccacgccgtgcacacgccggggaagcggaggcggtccggcacggggaggcggccgagcacggactcgaggaggtcccgcgggaggtcggcccacccaggccgcctcaccgcggcgccgactagcttgttcatcgccattgccagagcagagcaaagctcgatcgcatgacaaggaggagaagatcagaggaggaggaagaagaagatgagacggtttgcttgttgggattgcaagaaacgcgaggcgaggtcgcggcttaacaatggccatgtcgcgccgttccgacgtgcggcgcggcccgtgtatttgtgggatgccgcaggcgcggcggtcagagacggctactagttttgggtgcggtcgcagcatgggactgagagggagagaggcgggtggtgcgaacgggaaggcacgcgaacgcgcggcgtgacacggtgaaaatcccgtgggcgctggtggtaaaacgtcgaacaggtcgtcggcgcgggcagctgattttggacgggatgatgagcaatttggtcctccaactttcttactcgtctcactttggtcctaaaagggccaatttggttcatgaacttcttcgctttttgcccttttgtttcagatattttggtcgtccagatattttgtcgattgttaaatagatgaggcttatagaatgtagtgaaacttgacatttctaattattagtatgtaaattaaatgttaaggtgtagtatgtcaaaatattcttaatagattcattatgtggttgtagtggtggttttcgtccagtttcccctaattaattgtgcgttgtatggtttggtttcctttttttttaaaaaaatgggatgtcttctttatataaaacattggcaacaaccaaaccgtttgaaaaaaaatggattcattaacggcctgtttggttggagggagttggtgatggggaatgggagtttatgatatctgggagtttaagtctgtagtttggttggaagacttgagaattcgagggggtttaggatggggaatgatggggaattaaaatgtcgaattcccaccaatctcttacctgggagaggcatgttaattcgtgagacttggagggaattcaatgtgaaaccaaacaagggatgaggactaaaaatgtaactcccatgaccaatcccaccattaactccctccttgaaactcccattcctcttcccttctcttgccaaactggccgtaagcactggagtagttatcttcaataatttttgttcacaaattattataaacattaatgatcgaatatttgttttgagactatgtagatgttcaaaacataaaaataagatatctcccaggttgtttctcgacttgtttctgtgggttttctgtgaaatatttaagattggattttattaactggttacaagaaatgctatttataagtaccactgagagatggagaaagagaacattgcttcttatccatacacgtccatacccaatctgcttctcatcaagtcacaccaattaaaaaatcaattcgagaaaccaaactaagtactcccacctttcctaaatgtttgacgctgttgacttttttaaacatatttaaatgttcgtcttattcaaaaacttttgtgaaatgtataaaactatatgtataataaaagtatatttaacaataaatcaaatgataggataaaaactaataattacttaaattttttgaataagacgaacagtcaaacatttttaaaaaagtcaacggtgtcaagcattttaggatggagggagtactagctctttaaccaaacagcccgagttcattagtagccgcacaaaagtatttcggtgtgtttttatggtaaatacttaatatagttaaatttgctcaggcttttttttttttgaattctccaccagacgaaaccgatcgttgattaaagtcaggggaccaagctgatctgtagtttttcttcttttttttttaaaaaaaaactgatcagtaacccttttctccttgtaattatctgaatttcgtcgtttgattgttgacttaagagcatcaccaacagactacttatctgattcccaaaactaatttaatagattttagtccaaaaaacagctctaacagatctcctactctattaccaaagttttagagttcccttcttccgatttctcgctccgtttatatgcggacgcgaaagttgtgcttccaatttcgcactcccgcccctctcctcctgttcccgtgcatgggagatagcgatctttctgcgcgtgaaagaaaaaaacgaaattttctgttgatagtttaacagaagagtccacttttaagttttggggattgaatttaggctatatgttggagttttttcacttcctattttcagtttaggaaaccaaaaacaattttttagggggagattatagataatctgttggtgatgctcaagcagtatccaaaatttaaaatttgaaacttaatcttagatctgattttgtcattttatcgtagcctactaattttcatcattgggttataaaccccgaacaatataatgtttttacccataaattaattttgttgcttcatttacttttttatagctcatcatctttttttttaaatggcagctctgtgacagtgcaatcctgttcattcagttcagtgcaccttggcccgcttcatttttttttctatagcatgaaggcataatggtcacttggcaagctaatgttgcggtactactcatggcttgacaatactaaccaatagggtggcatgcgcatttacacggctagatctactttaaaatttactaaaatgataatgggatggtcaaatccttaccatgccaatgagaatgggatggtcaaaaaatttaggtttagaaacgagtaaaaaaaatagatttagagacgagccatataaattccctcatcacgccacacaaacagaaggataaatttgatccaattacacacaaacagactcttctgaaaactgagggactaaagtaagcattgattaaaagtcgagggaccaaatcaaccaaatcaaccaaatcaacctcctccttcgagttatcctgattctgacggctgctccgttgacgctgttcattgggtaaacttgggttcagagcaccttcgcgcgctatatacatatctgcgtatttgttatagcaagtggcgtgttccagctcgagatgcaccggagataaccccagataaggatcaaaggattaggcaatctgtatgcgtacaggtcactgatgacctgtagatttgcccttgcttgatactcttccagtcctctttgatcctctccaactaagcatgctattactttaatagtttccatggagtaagagcatgtgattgtaatggagctgattaaataactgcaagcactagaacaaacaggggcatgcgacctgctgttgcagacctgagacttgcagctgtggttacaaggaagaaaggttgtgaacttctaccagagctgcatgttcagttcatccactccttcctttctctagaaacagagggaaaaaaatacagtatcagctagagatctgcaaaaatgaacatatatatgattgaagtgagctcttttacagcatattgaggtagccacaagtgacaagtcaattcaagcaagttatgcacaactactgacggccacatatgcattatttgctagtgaaataacagaagtacatatgttacaaactgcaagcttacaagttgtggaaaatgtcctttgtaaacatcagcctccttgactcatttgtcatggaattgcaggccacaccaactgcaggcaattgagcaggagagaactctccaggtgaagccaccatacttttgaaattgttgacattgttaagtacctcctgctgataaacaagtggaagctgtttgctgtcagaagctgagggaaataatgaagattgtacttcatatagttcaagaagaatgtctgtttctaccgacaagtattaactgactatatgaatacattgcactaccttgatgaactgaagaagaagaaaaattagtatagcacgctgataacatattttaactgaactaggccaacgcaacgtataaatttcggttaactgaactaggccaaaacagggtataaatttcagttaatcagaaaggtactttacatatcgagtctaagagtgccaaattcaacgataagaactgacacaaggaaaatttcagtgaaacacaacagttttctcaaagttaatagttccattaaaacccggaaccgctgaaagatatgataaataggaaaagttgactgaccaaacaatcagctgcagagatgaacttgtatgctttcaccaagcagtttttgtgtaataatacacacggtggaagaggcacaagtcatttattaacttatattgtgcatggaaacaactgtgaaggtaaggcatgtcctaatccaaaaggaggcctgcacagtagatcagaacaagcaggttggtcagatagatgaattaaacaatagcagtggtgtgccaaacagaatgtgaactggggatgtgtcatgtcaaacaagggtgtgttttgttaccattaccttggattagtagtatcgtctgtctttgatgatcggaatggttcctctcaggtcgcggcactgccttttgagctcctcgttgttgctagaacggacatctagtacttccagtgaactcggaaggccgcccttgggcagcgaacggatggctggacaggaccagatctttaatctcttgaggctggtgagtctgtgtaacccagtggggagggactgcagctccgagcagtaccaaaattcaaggtcctggagggaggagaggagcagaagtgccgcgctttgctcctttgtgaagcgctccacctcgtcgttccaactaatggttaggctggtgagtgaggaagcaaggaggctgcagatgggcgcggcaaggacctttgtgatgtcatctgtttggaggcactgcagccgcaaggagtcagagccacacccgacgaagaatttgggggtctcgaagatgttcaggtttgtgagttggccatgggcgaggagagaagacaagtcctcacctcttaaatccatacatttccgtatggttaatctggtgagagagctgaggtttgagagaggcgccagagtctccatgcctcccacaccatcaagatgcagatattgcagggaggatggaaatgggaagcaagacgaggaggaggacgagtagtaggaggagaggaaattggggcaaccccgaatagtgagtgttcttaggaagtgcaggccttgtaatcctcctcctatgcttcttaagcctcctgccatgccatctacgagagaatcaaactgcaggatcagctttgagatattctctatgtacaaatcctgaagttggtgaggcaagagcagcagtcctgcatcagctgctgctttctcatcctctcctcttagttgctcctgctcctgctcctgtcctatatgtgcatcctccaacttatgaccagaaggtgacgacgacaatgctgacattgccattgtctgctccttcgccacaccaagcactcttatcttcccacaaccttgtaatgaaaacattgacagcttggggaaaagagacagcaacagcgtcagttccttcccgctacagctacagtcatcgatactgagaccctcaatctgaaattggtagccgacagtgttctcagcttcaacattcaacaagacattacttgaatcatgtatcgtgggactcctcaaacatgatagcactaggagatgtttcagtggcaaaggaggacatttcttcaaatacaacactttcagttcagttagattactaaatgccaatacattccagaatgacatatctagatggccatcctttcccacaactttcaagcaaaattcagattggttattttttgagtaatccaaccgctgaaaatctgatcccacttcatcaataagaacacgacatggagagcttgtccaaggaatgtgaggaaatgatgacagctttggacaatttacaacctcaagctcccttagtgtagggaattgggtcaagttcatctcctgtcctgatcgagggcaagttgaatgtgaaaatggcaactccataagttctgggcaatctcttataatgaacacctctagcagggagaacacatgggaagcatcatttccaacccattttgctagctgtggtatgccaagcagctctaacctttttaatttttgaaagctctgacttgttgtacaacccaaggattcttcaccggacgcattaaccaaccacaactcacctagagggggaaatttgttccactgtatgctatccaaacgaagagcttgcaagtttttggtagacaagttaacacccaaccatgatgggcaagattgctatgtggtttaagattttcaagaacatgttctgcttgtgaagaatcatcagaccaaactaatactaacttgtgtaagtgccttttgtttaaaaggtttgcttcctcccctgtctgtgcattttcaagattataaatgcacagtgatccttttagctcttccaactgccctagttgtcttaatgcaaatgcctcagcttgtcttttgacttcaaatctccttagttcttgtaaacatttcagctttcccacactagtaatgtcggagtggagattatcgtatgggacaagaaaatgccgtagccttacaagattattcatgtctcttggtaaaccaaagtgacccctgcattgttgtaaatcaaggatccttaagtgataaaatcttgaaatggtattgggtagactcatttctgggaaatatcccttattaatccttaagtagcgcaaatgaataagatttgaaaagttgtgcaacatattttccaccacgtaagatggtgcatacaacaagacgacgcggagtgcttttgctttgcttaacaaattaccaagaggaatgacaaagcttccatggtattgtccaaatagcatcacagagtgaagcttttcaatatccaattgcttatgcagtgtgctgaaatccttcttgatgttttcaaaagtcactctatcatttacatccacatcatctatcacaatagacaagtgccgtatagatggtggaacttgaatagatctcacattagaactacttatagcaagacattcatatgatgaaacc

SEQ ID NO: 10359 - DNA, 31848 bp, Oryza sativa
  unsure (1)..(31848): unsure at all n locations
ttcaaaaaggaccaaaatgtaaaatttcagagcaaaatcaagcatgccacattccagcctcccaagggaaagtatatgttaataactatatcttaaatgaaaacttaaaaaccttttatgtaaaagtttttaaataagtctttaaaaaaatcagacatgttggtaatacgtaaataaataaccttacaaagttgcatgaacaaatttaacttcactaatgagttacaaaattaacaaataacactattcatttttttctttttctgctatgtttctcaatttttcacagatgaagttcagtttatccttaaaactttacatggttgttcaatttgtgagatttttttttccaaatcttttgaaaacttttatatctttgtttgaaatgtaaaaatgagaaacatagaagaaataatgatattttttaaaaaaaataaaaaataaaatctcatagatagctaaggtaatagtactttgacaaccatgcaaagttccatgaataaacttaactttatttttgagatataaaatttgagaaacatagtagaaaaagacaaaaataggaatattgttatttgttaatttatatatcattaatgaagttgattttgttcatgcaactttgtagggtcgttcatttacatattacctacatgtgtgattttttaaagaatttttaagaacttttataaaaaaaaaattcaagtttccacctaggatgtgatttccaccatatactttccccatcaggaataacactatatgtgcatcttcggtaagtgtaagagcatctcaaagagaatggccaaatggctctccaagctaaaatttggcaagtataaagaaaaatgccctccaacagcctctctattcggttggctaagccgtatggctagccaaatcacagcactcactggccaaacttggagagtcatttcggctggccatccatgggctccaccactcctaccatctctctctgcccaaatagcagaggaccatggcagtggtggtgttacagtaggcttccttgtcgttcgccgccgtcagctctcgccttgtgtgcgtgggatctgtcgcctgcctcacgcgtggggagccacagttgcttcgccgcccgcgcgtcgccgctgtcaccgcccgcgcgcgcgcgaagccgccgccgccgtcgccccccgcctctcgcacacgggggagccaccgcagccgtcgctgctcgcacgcgcggggagccgctacagccgttgctgctcacctcgtcgccgcccgcgcgaggggaagccgccgccgcctgcctggcgtgcggggggatccgtcgccgccgcagtcgatgggctgatgcgggagaagagaaagagaaagaggaggaagaagaaggcaatggaggttgacatgggtcccttttttattttggagatgtaaatagagagactattggagtgaatacctagtttgactgcccaaatcagttagagagttggctataagagtatttaaagagtctaatttagagatgctgttggagatgctctaacagagaagaagggaaaacggttcaagatcctaagaggtcaccgaaagatgtcctctaggatttgaggtcttacgaaatatcctcctgatctccaacagatcagacatgtctccatatagtgaaaaacttcgtgaaggcccaacccgacccatcaatcataaaaggaataagtccatcttacctcactcatctctttcacttcgccgaataacatccctcaaccgcaaaaccggctataatacctcccccatctccgtaaaccggtgcaaatcgactcctccggtggttttgaaagcggtttatgctgatatggcaggttgacttggtccgaatgtgctgatgtggcagccatgtcattaaagggattgaagatagaagtgggtcccacatgtaagtgacaaatgctaaaacaaaacggggccccctgtcagccccatttttttcttatcttcttcctcctttctaccttcttcttgcagccgcacgcacggaggccgattcggccggcttcatccaacactggcgccagttgatatgaggtggaagtcgctgacatgtgggccccaattgccaactcagcgagtcaaccgcggtctagcatccatgtcagcaaatactgcttgctaaaccactaaaggagataatttgcaccggtttttgaagatgagggattcattatacccggttttgtggttgagggaggcaattcaatcaagcgcaagagatgagggagacaaaatggacttattccatcataaaaataatgtggcatctctaggcccagtccattacagttcttcaccaatatttattttcctttttgttttttatccacctaagaaagggggaaactacatccaattcgaatccgataagaagaatcaaatccattgcgtgtagaaatggagaggaacgaattcgccggagatctctggttgttgtttccccggaccagctggtgcatttctccctgatgggaagagaagccagctcggttacaagccatggctccgcaccggcgcgtccggcttctacaccggagctcctcgcatcctcctccttcagtaacggcagcgacaaggttctataaataatgcttgtttgcattgtttgttgatatagaggtcgaaaataatgcttccattatcgttgtctagggagtggattttgatatcccgaggggacgacttctcgttgtttgtacgtcactcaaataattatgaaaaaaatttaaaaaatatattaatatgttatgttatattatatttaacttctacatttcacaacgagaaaaacatattaaactacagcttgttaacatatattcatatgtcaaatttattttttttccgttgcgagatgtaaaagttaaatttaaacttgtatgtttatggattgatatatcacatgctaatacatcttcttaatttatttttcataattatttaagtgacatccaaacaacgagaaagattccacattaattatctaaagcctcaatctctactcactactggagaaaccatctttggtcagttgcctaaaatccacaataatcctggtttgaattttaaccgggactaaagatgactttagtcccggttgaaagagctgacatcactttttactctttagtcccggttggtaaaatcaaccgggactaaagatcatttttagtcccggtttaaaagaagacagactgtgtcagacccttctattatctttagtcccggttggtgatccatttttaatctcggttccttataacaaccgggagaaaaaatgaaaacgaaaaaaaaatcgcagagcaagcgccgcgcctcctcgtcctctcgcgcgcacagccttatcctctcatctctcctcgtctcccttcttatcttctccaatctcctcccttctcaactcctcctcttcccccttcctccccttcacctctcctccccctcccttgcgggcgcggcgcgcggcggacggtggatgcggccgcggcggcgcaggcggtggcgtgcgacagaagcggccgcggcagcggccaggcggtggttgggatgcggcctggcggaggacagcagccgggtagcggaagaggccgcgacggcggccgggcggcagctaggcggcggcccggtggagggcggcggccaggcggtggctgggctgtggccgcggcggcgcaggcagcggcgtgcggaagaagcagccgtggcggcggctaggctgcggcctggtggagggcggcgggcaggcgacggcggcagtggaggatttgtttattttttggatttgtaatgaatttgcttttgagaatttgtgatgtatttgatctgtgtgcgatgtaaatatgtgatgtatttatgatgtttgtatttgaagatggtggatttgtaattgatcgatttgagatttagagatgatgttctgttatgtgattctgggggatgtggtgaaatcaatattcaaagtagaaaacaatacaagaaaagagaaactaccaatcagatctgacttcatctttagtcccggttggtaaatgactttatttttaatctcggttggtgttactaaccgggactaaaaatcgatctttagtaccgggtatttgaaccgggactaaagatagcgatttttagtcctgcattcgtagtctcgatcgaaaaactaagactacagatggttataaaccggtagtaaaaagcctttctctgctagtgacttgatccgatcctctctctcttcacctcgccgccagcctcgggtggcgccgccgcctcctcttcgtcgttcttggcgacgacggcggggctgctaactagccgcgcctccagctcccggttcttctcctccagctccgacagctttgactcgagaaacttcacgtactcccttgctccgatcagtatcgacgacgtcttgtctttctgccattaaaatggatcgagaaataatttaagcaaatattagtgaagatcaatactaatcaattaatacggagtagaagaaaatgttcatgaatatgcatgtatgcatatgcacgtgtatacgttcgtgtataagccagctataaacatatttcgaggagataaaagagaagagagaatggtagcgagctacagatttgtagctaacttcagcacggactccaaggtgcaagtgtatatgacatgtgggaccagatattaattatatagtatatgtttataattaactattatattagttggctattaagttggttatagataatttgaagccagcagttgactgtactactgtattaaacttgctctaattaataattgtacctagcttggagccgggagggaggacgtacggcctggactggagggcgacgaagctgccgttgagcttctcccgccgcttccgctccgacatcgtgtgctgcagctggttgctggacggcggcggccgctgtctgctggtattagcactggcgtacgcctgtacattgttgccgtgtgcatcttggtcagcaccgattctatggctgtgtttagatcacactaaaattaaaagtttaatcgaaattaaaacgatgtgacggaaaagttaaaattttgtatgtgtaggaaagttttgatgtgatggaaaaagttgaagtttaaaaaaaaaactttagaaccaaacacgctctggccctgtttagttccccaaaagttttcgccaaaaacatcacatcgaatatttagacacatgtatgaaacattaaatatagattaaaagaaaaaccaattgcacagttagggggaaattgcgagacgaatcttttaagtctaattagtctatgattagccataagtgctacagtaatccacatatgctaatgacggattaattaggctcaatagattcgtctcgcggtttccagacgagttatgaaattagttttttcattcatattcaaaaacctttttttgacatccggttaaacatccgatattaccacccaaaattttcatttggcaaagtaaacggggcctctatctatagaactggcacctagctataatctttaaaataaaaaaatgtgtcgccgccgtctggtggagctccgacaggaagatgacgccgctgaccgtgacgcccgagaaggcgccgccagcctagcttcttgcactgttcaactcattattaatcgattttgctatatatttgtcgacaaattttcccctaaaaatttgacaggtgtaattacagtacaatcgtaatataattacactgtaacttgcatgtaattacactgtaactatagtgtaacttgtatgtaactttcaaaaatctatccgtaatatgttatttcggtaaattggaggtcgtgggaacaaattctttcacatatgtgtgtgctatgatttattttctttctcaccaaaataaatcttgtaatagatctaatgatttaaaattatgtgaaacttacatataagttacactgtagttacatgcaaattacagtataattacatataagttacagtgtaattacactacgattgtactataattatatctattaaatttttagaagaaaatttatcgataaatgtataggtagtctcttattaattagcgtgcctctccgggcttctccccatccccatgtacgagtacgaccacctcccgcccccggcgcggtggccatccaagcgagagctcgaatcaaccggtccaagaaggaggcgccccacaccaactttgtcagcccgcgccgctggctatgtcaccaccggccgtctacatctgcatctcgttatagtgtaattatgtgtggattacactctagttaattacatagtgtagcatttagattgtaatttttattattgttctatagtataatttctacttattgtttatacatgtgcatctctccctgcttcacacaatcctggtctccacaaccacattgaaatagtgtagtaagccaaatgcgtccttggcccgaggaaccgagaaagttgcagctaaacacaagagtaattagtgtgctcacggataacgaatcaacagagaacgtgccaaagaatcacatatctcaagatgggatctgatggtaaaaaaaatcgtatgatacggtggaaaaaaattctgtcaaatgatttatagcaaaaccgataaaatattataaataccggttttccctttaaaactgacacctatagttaattaaatatatcagttttatatatttttattccgtgaaggttagaggtttaaatgagagaacttttatgttacaatatactacaagtatatactagcagtataaatgatagaacgatatagattgtagctgcaatggcttcaactgcgagcttcttagcctcatgattatgcgctctgcttgctgccaacacacccaccaccgcagctgcgcctcccgctatacttggcctccccgccgtgccgtcgttgcctacacaccgccgccgatgtttgtcgttcggtcaatgccatgggtcgtctctctgctccggatagattaggcatctacgatcaatttgacaattagaatgaagatgaatcacgaattactaaatacccctttaaatttggcagggaattccaaatgtgtcctcatttataatgttagtatatactattagtatatatattgtaccgtaaaattctcttaaatgaaccaacacctataaaccgataattattagaagtgttgtagtagtgcgtattggctgaacgcgccaccgatcgctggcaactccatcgccggtgacggtggcggtggcaggctagcggtgtaatggttgtgctggggctcgctcgttgcacaccaagggtggtggtaacggcacctgcgaggagacctccagctactggaatcccgtcaccgccaccaccgccgacaaggtctttgggctgtatgacctattagggaagagatttgcttcagtccaacaaaaagtatctcgaggtaccagtacctcacggtatcaaatcgtttccgatcgttggatttaagaatatctatcttgcctaactagatccaacgatcgaaaacgatttgatactgtgaggtaccagtacctcgagatactttttattggaccggagtaaatctcattagggaagctaccggcggcgacagcatgcatggtgcgtcgacgaatgcatcaggaggtcgtccaccatggcggcgccgtacaccgcggcaccggctcaccgcggactgatcatcgtcacatcatccatgctcaagctcatgctgatctgcatgtcataatccaaaacccaacaaagttaattctacaatatatttctttgatcttatatgcattgattgttcatgatcgagctagttaatcaataaaaaaaattgtgatataagcttgcctggttgaaatggcgctgaatctgcgaggagctgatgaacagccgctcctgctgctgctccctttgctgaaactcccgggggctgcagctgcaataataatatgcacgacagaacagaggaattcacagaccatatatacattatcgtctcgatcaatcgtgatttgtacagtggtgtagaattcctttaccagtttgacatcatggtcctttacttttcagagaatcttgttataatatttgtgtctgctagctatgactgacgacgaacgttacagtagtattagtcaactttcacgcttgattcttaatgttgacctgaagttactaaagtaccacgttaattagccctccatcattatcgatcggccatcatgcagacttttggggctcgcaggatcgtcagcagagtgaagtaattaattgaggtgtcaaggctaattaattcaagccgtcaagaacattgcatgcccacgtattcgaatcaatttgtttggagagcagttcagtttttatttagttaatttataccttcttagaaccatatctaatatgtttgatggttggcttttgagggttgacaagttcagttctcatctgatctatacctttctagaaccatatctaatatgtttgatggttggcttttgacggttgacaagaaaaagagtaaactcatacttgtaggagcatctgccatatgttgggctctgtggttgagtaaaaatgatatggtatttgacaaatcaccatctatctcatatttacaggtaattttcagagcaacatattggctccgatgttgggtacaactgcaaaagtatgaagatgatggagagcttatgaaggttgcatgtcttaggcttgagacgacagttatgtaactttctgcaaaatatagatggagatttataaatagatttgaataaatgtgtactccttatcttgatttggtcttttattttgttgggtgtgtttatttttattttgaactacactcttcgttagagtgatactttgcaaggccggaatgttttattccattatctaaaaaaagtatgagtatgtgtataaggttttccattatcttagagagaaaaatgtgtacaatcataccgtcaataatgtacatgaaatttcttcttttcttttctttttcttttttctgatcaacgaggtgtgagacagctttggcgtttgacttcaataagaaaatgtttaattagttagttagttataccttgagctgtaatgttaggtttgcactaggagggcggccgccggagccggcgctggtgctcatcgccacgaggctggcgccgtcgccgatctgctctctcaggcactgcagcgtccggagcacaacgtccgtcgtgctcatgcctccgccgccgccgccgcgcaagtccacgttgagcgtgcaacaagtctcttgatctcctcctgtcgccgccgcagccgccgctccgctgccgccgctcgtcgtcgtcacctcgatctctactaggtcctctcgcttcgtctcgtcgccggcttccgccgccgccgtctcgcctttgtcgttcttggcggcggggcggctggctagcctcgcctccagctcccggttcttctcctccagctccgacagctttgactcgagagactttatgtgctctcttgccctgatcagtatcgacgccttgtctttctgccattaaaaaagagaaatattttaagcaaatagtacggtttttttttcggtcagataatacttgtcgttttggataagcgtgagatcaaactttagagtatttaattatgaattatttttaaaatatttattttttaaatatggtaactatagtaaatatatgtatatagagtagtcttaaaaagtactttaataaggttatatatttgttaacacttttatatatattataatgaaaaataatggttaaagttgtttatttaagatcgtgccttttacaaaacaataacccatattatggaattgctacgtatctgtcgacagattttctattaaaaatcagtcgatttgttgaccgcatgatttactttgagatacgtgcatgtgccattgagtgaaaaaaaaaagtcgctagaaaagggaatcaaacccatgacgtcgggatgccacaacatgcactccaccaactgagcaagcagcggacaacagctttatgtctatacttaacatttttaaaactttcaatgcagttacactacacccactcacaccattgttataccacgattaaaatgtaagtgcactacagatacaatgtaatttttaagtacatgcgggtgtagtttttgttttacatgtacggatttactcatcgttgttttgttgcattgtagttaacttaattgtttgaggtgtgatttgatatttttgggactatatataccgttgtatttttcataaaagaagttttacattgcaagtacccaaagttacatatgtaattttaatgtatttacactgtaagttttaaaattacatatgtaagttgatgtaaataggtgtaagttgcttgtttttccttttcttttagcatcattgaagtgattaacgtccggtgactgacgtacgttgatatgttttcatttgaaccgcacgtgggggtggcttgaaaatccgactaattttctacgaaaaatctgtcgaatgatttttagtctgtctaaatattattaacccggagagagtattagtcaaggtggtgaagaaaatgttcataaagaagctttgcacatatatatatgcacgtgtaatacgtacaaactagcatgatggcccgcgcagattgcgcggctagcatcattatattttctctcatataatagcatatatgttttctcattatattattcaaatatattaaaataacaacataattttaaattttgcaataactttacaaaactactaatgtgtaatattcatattgcattttatatatgtgttagttattaattatttttaagataaaattttagttatttgtaaattatatatattcctatatggactctagactcgtcttttaatatttcttttttctgtaaattgtatttctatatagactatatgttcttcttctaatattatttatttttatttctgaaattttattatttctaattatatttctatgtggactctaaactcatctttcaatattatttaatttttaatttcgaattttagttacttctaaattgtattcctatattagcattaaactcttcttcccattttttcttaatttcgaattcttttttctgtaaattgtatttctatatagactatatgttcttcttctaatattatttatttttatttctgaaattttattatttctaattatatttctatgtggactctaaactcatctttcaatattatttaatttttaatttcgaattttagttacttctaaattgtattcctatattagcattaaactcttcttcccattttttcttaatttcgaattttaactatttgtaaattgtatttttatacggactctaaactctacttttaattttattatgtttattccaaattttagttagttttaagtttctatatagactctatactctacttctaatattccttatttttaattccgaatttcagttatttcctaattgtatttctacatggactctatactctacttctaatattccttatttttaattccgaatttcagttatttcctaattgtatttctatatggactccggtctcctcttctaatattccttattttttaattccgaatttcagctatttcctaattgtatttctatatggactccggtctcctcttctaatattccttattttttaattccgaatttaagctatttctaaattgtatttctatatggactctgttttttctttttctccgattaatgtgagaatttctaggccatgagagcgaacgtggaggctcctttttctattcctttaattatataatagatagatgtactggagtacgtattaattttaccttggagccggtagggaggacggccttgagggcgacgaagctgtcgttgagcttctcccgccgcttccgctccgagatcatgtgctgcagctggttgtcggacggcggcgccggcccgcctcggccgccgccgccgccgccgcttgctggtagtagtactggcggcggtacgtcgccgccacgtgcatgttggcgagcaccgacatggccgtcttgaacatcctctgcccgcacgctcccggcttgggtggcctcctcgggcggaggtgccgcgcgtagcgactgaacgcgccgccggttgccgccggcaactctggcgccgccgccgccgagctctccgggttgcacgagacggaggcggagcggaaggaggcggaggaggacgtcgtcgacgaggagtactggaagctgccggcaccggcgtggtgcgccgacgaggaagccatgaggaggtcgcccaccatggaggcgccgtcgtacaccgccgactcgtcatccatgcccatctgcatgctgatctgcaaaccatatatacctaccaaattagattaatcctatcattttgattgattttatgcattgttgttgatcgatcagagcaaattaagcttgcctggttgaggtgttgctgaatcggcgagctgaccagctgttgctgctgcggaaactctactgggctgcagccgcaagcacgaacttaagtaggtaactaactgatcagccaaaaccactcaagaacagacgatttacagagatgatattgtcgttgatcgatcgtgtcatgcacggtgatcatctcatcaagatgttttaattcaacacatatatacctggcagcgtagccgcacatgaagccgctgttggcgccggtggcgttggcgtttgtgtagccatggatccagctgctgctatccatgactatatatgatcaccagatcagttgctctggctagctcgattgatcaaactatatctggttaaattagttccagctagctatgagttgcacagttgatgcgctgcttatcactatacattcatactagtagtatttatatagtacagctagtacgttaagatcgatcaggaaattaaaggaagctagtacaacaccgatgtgttgtatagagttgaaaaaagttagagatgcacgagtggtagctaggtagggtgagtctgcaactgatctatctaaactattttaaatgactctaataccacaagctaacatgtggggctataaatacaatgcttttgctttagatatgatattatatatctaatcaactaactatatatgctgtaaatttgtaattgcttttacttttgcttttacttttgtttttatctcttataatatctgttgtaacgcacgggtctttagctagtgtatatatatatagccaacgacgaagccgcagcaacaggagagcaacagatcgatcgatcaattgaccaacacaatgacttgtactccctccgttataagtgtatatatatgtgtttagtttcattaacatctatatgaatatggacaatgttaaaaagtcttataatatgaaacggaggaagtactaaccaattaatccacgtgctaattaagttcgaaattccggcccgatcagcatgcagctaagctagcttgctgatgactctaacgagtaagagtagattaattagtgacaaattgggagatgaatttttgccgagcgagaggatatctcctatttcttgcatgtcacctagatttaagtcatatttattttttaaaagaaattaacttttataagttgtaacaaaataaacaaattacttctaactaatccttatgagaatctctagaaaacttgggtaaatatatcttgataatgacaagtcatcatgggttactcattgtcaagagtacattgcctaccactaaaaaaataaatagtcataaatacgagcaccaacattatcagtagatacaggttttatcaataggaacctaattagttgagctacactttctactttacgaaatcataaatatttaggtaacataaaagaaaaatcattcctcgagggaaaaaatattttatgggcaaattgctagcgagtacgcacatctcgagaccagccagtggcctgactgccgtaggatgtacatcaatcgattataggatcttttaagtgctcctatgtacccactccattatattttaactgttgttgtgggtttctgtattcgatatttgaccgtctatcttatttaaacttttcttatgattagtatttttattgtcattagatgataaaatataaatagtgctttatgtatgactttttttaaataagatggacaaaaatctatgattacatttaaaatgggacgaagtatcaatgaaggatgatgtaatgtaatatgatcagtccacggtcaatttggtttggctggatgcatgcgaaaatggagagaattgagcagctagcgtccggagacgggaagcttttgaattagacgacggatcagatattcaatgagagagatctcacatcatcttcgtcgacactgcctagctatatatagctatccggccccgttctaaatatttgacaaaacttttggatcattgtggtagctagctaacgaaagattggagaaatatttccagtctaggttgaatttccggcgcaaattttagaaaacaaatatgatgatcatgatgatgatgaagaagaattaattgatgattagccagttggttgctaattagccgattaattcgtaaacctagttagaatagcttaatctgcgcattcacgcatcttgatgattcattcatttaatttagaattcattcggagaagttaagatgaatgcatggagagaatctacagtactacatatatatttgtttgcttgggcgacgacacaaagagagcaaatcagataataatgagtttgtgccaagttgtaatacatgataactagcaaacaaaattagcgaaccaactaaccaatcatatgaaatattttctaacaaaaaaacccatatgagatacgtactactgttttctttcaaaagaaaagaatgtgaaacacgtgactagtagtgcaagcaggatccggatcatctacagcagaggagtattgttcatgtgagagaacaatgaattaacaccatgaacagtgccgatttactgcggttacatgatcgaaaatattgtagcacactgttaagtagtacgatatccgaaacttccgttctcgatcggacggtctacagtattccagtattcctattccgctgtactattcatcctttgcattagtaccttcaatacagaggatctgaatttgtgctagcaacgttattattggagagacatgggtcataagatctcttgatcgcatccaacggccaagatcgatcagattattggccacatacctacctattttccatatataaaaggtgttttacattatctttaatgatttgaatttatttaagtttaactaaattaatagagagatagagcaatacttatattacacaataggcacccctatctctaggcttagactctttcagaacacaagattgtaaaaacatatataaatactggaatgcgaaaatcacaataatagaatatagaaatacatgtataataaatagaaaattgaaaaacacatgaaaccaaccataaaaaataaaataaaataaagaggttggagtggatgattttcttctgtcactggagtctacaggaaagataatatttcttaggattttcagtcacagaatccttagaaactagatgaaaccaaacgcattgccgcgggagcttatacaataatagtagaaataacatgtaacatagctagatgtcataagcttagaatttttttttattttttgatcgatcattagaaaaggccattaagttgatgtggtttatgatattttaaatagtatatagattgataatccaaaagtaaaaaagtaaggtgatgtggcttcatgagagaaaaaaatgagggaaataatttggactatagattaataatctaaaggttaggaacaattgaagtgataaggtttaatgagagaagataaaaggcattaactagtggagatgaacggtacatgtatatagaatattgtagaaaacgatagggagatatatattgaaatattatgtaaattatatgggatgatgattgaacatgcttgtattttaaaacttttaaatataacaaaatatagatgatatagcatgtttacatgaggtttaagatgtaataattgctaatggatgataatgttgcacttttgcatgttgagttttaggatttagttggttgtagctttagggcagtcccaaccctccacataggatggtgtctatggtattaactacattgccatgtaggacttttaacttatgtggcactatattaattaagagagaaagtgaagagaggaagaaactgggtctcatgcaagacacagcttcaacacgagaacctatgcactagacactattaagttttgcattgggagataatagtgtcttcataatagatgaagaataaatatgatttgtagagaagagagatgatgtatttattaatggcccactttaagaaaccatgggttgtaaagtgtagtttctattgtgatgtcttattgacatggcaccatagacactgcttattgatactatgggttgggactgcccttatagatactacatatctatatcctctacttggctccgtcttcttccttaatataattccaagagtacatgtacccatatgttgttttatgttaagataatctacaacagcaaaccattttcattaaatacaccacatttcttctatgttgaaaatgttacttgtttttctataaagtcggctaaactcgaagcggttcaaaagcaattaatttaacttataataaactccttaaaacatctccaacggcctctccaaatctagctctctaaatttattggccatcttgccaaaatattagagaactaaatttatctttccctccaatagtctatctattacactctccaatctgataatagatcccacatgttagtcttacttctttttctctctattacactacccaatctttccctctagtttcaccccctccccactatcttctctctccacactgctcagtagcaggctgtggacgagacaagcataggatggtaggaggcgacagcgacgaagcgacgatggcggacaaggcaagcacaggtggctgacgaggcgtgcacgggaggcggcacaggaggatagggaaagggaagggaggacagtaccgtctccgccaagtgagccagatccacgtgagagcccaagggggtgaagagctctcccaacgctattgtatgtcccctctttgccagatcaggagtcgacctcaccgtcccttcctacctcacgcatatcaggggacatggagctcggtgggacagtgtggaagagcttgacagcaacaaagaaggggcagtagtcaacagattttggcttgaggggggcagaggacgagttcaatggagaaggggcagtaattgacaaggtgaacaaactaggcggcgccagggaaggggcaacaatcggtagaggacgagctcaatggcaccggagaagagtcggtgccatgttgggaggaggaatagtgtgtggagcccactattaacatattgtgtattatctttttatataagaaaattacttttatcatatgtgtaagttacttttagattttattaaattacttcttaggtatttatgaaagtaaattgaataaagcctaaaattaaactacataaatcaaatttacttccaaattttattcttattattaaatcatcttgtagcgaaggtatctctagaatggtacggttagtcctattttttttgacaatatcatgaaatgttacttctacagatgtaaaaaagtcagttataataccgtgaatagttatttttatttttctagtcacttctctactattataaaaattaaaaatattttttctgatactttggtacgtcatccgcatatgagttggtttttaagtttgttcgcttttagaaatacaaatatgattttgagtcggcttttaaggccccgtttagttccccaaaaatttttcctaaaaacatcacatcgaatctttggacacatgcatgaagcattaaatatagataaaaatcctaattgcacagttatgggagaaatcgcgagacgaatcttttgagtctaactagtctatgattagccataagtgctacagtaacccatatatgctaatgacggattaattaggctaaaaagattcgtctcacggttttcaggcgagttataaaattaatttttttttcgtgttcgaaaagcccttccgatattcggtcaaacatcttatgtgacaaccaaaaaatttcttttcgtgaactaaacagggcctaagttcgttcgcttttggaaatatagaaggaatcatataagacatagctgtttaaaaaactcacatgctaacttgagacgatcagactcctaattgcaactcatgattttctaacaaaatatatatccaagcgaatttaacacagtgaatttcacctttactaaaccatataacaataataagactaaaatagtcttcacccattgtaatgcacggatattttgcaacacatattttttctagtccctctaataatgtacttgcttctaatattgtgaagagaaaaatagacctattttccctagtgtaattattttaataacgtgaagggtcactagcttctattcttttagaataacttccaatgatgaaaattactttttttaaagaaaaacatagtgattacttcaaaaatatataaaataaatgtatttacccatcaatcttctccatattttacttcgcataatttcttaattcaacatcttctactacgtttactttcgatgatacagaaagctacttctattgtaaacttagttacttatagggtttaagtaaattacttttgactgtttaaatatatttagtattggacttgttttgtcacatattttgagtggagtacgatggttcaaatggatttaaaaaatataaatcatcaaatgttctgtactttaaaaaaaaaggagctatagtgcaaaggaaaggctagtgaattagttggtattaaggaaaggctagtgaattggttggtattgaacccagccacgtgaatagcgttctttttcatacaagagattcttggtacgtctgatcggactatctgcacatgtgtcgctcgataagtccaacatcgaatgtccgcacgaaatagatttcatcactaaaacaaggtgaccgcgcatatgcgctaggtaacttcctatttggacttaaaagaaacttcctagttggacttaaaaataaaaatttaggccgtgctaaaatttttttaatgtacggacaaacatttgacgtattaaacatagactaataacaaaacaattgcagattccgcatataaactgcgagataaatttattaagcctaattagttcgttattagtaaatgtttattgtagcattacattgtcaaatcatggcgtaattaggctcaaaagattcgtctcgcaatttacatgcaaactgtgcaattggtttttttttctcgttcacaattaatattttatgtatatgttcaaacatttgatgtaacggaattttcgaaagtttgaatggaacgccttagctcgatcggtgcagtacgatgaggaatactgtggtatatatgtactagcacacagtagctattttacccggccatctcctgcattgtgtgtactactgtgtacacacacggtgatgcatggcaccgtcctccaatcctacagtagtctaatttattcaaaattccaagccgtacgtgaccggccacgtacgtcaggtatagcagctgccacaaaaagaccgccgtttaagttgaaagaagaaaagtctcttgtaataatatttacgccaatgcttgtcccgctgccacgcatgcacattcatggcttttctgattgaagatatatagattttacctgaacattttcttgcacgtttttttaagtactaaaggtacatctggtacaaaaattttctatataaaatttactttaaatatcaaatatatttattttaaaatttataataattaaaacttaagtaattaagcactgaatgatttctcgttctacgtatcctagactttattttcatctcaacgtatctcgagcaccccacctgaggactgagctaggtacccaaaacatcattcggtgatggtcacggcgccgtccctttactcgcgcacgcaggatcgatcgatcgaacccaaatcaatttttaataaaaaaaatttaaaagtatatgtttaacgtgataacgtgttatttttttagatacaagacaactcacaaaaccctaaccacgaaagtcttattttaatttagtttattttggaacggaaggatacgtagcaatgtgatcagtgttgttacgtcctttcaagagagagagccttcctactattccatcctattttaagtgttgcgatgagtctccgtgcctaactttaattgtccattttatttaaaaaaattttaaaaaaattaaaaattcataagtcacgtataaattattattcatgttttatcatctaataacaacaaaaatattaatcataaaaacctataaactattaaaattagacatgaaaactcatagttacgcttaaattgtaacggatggaggacgtgtacgtacgggcacaacacgtagtgctttttttccgtaacaatgggtttgtgaaaagtcttctcataatacggatctaatacttgaattggtacggaggaattaaggcaccgtcttgtctcggctgacccagcaactccggccgagcgccggagggccagcctccgccatgaactgatgaactcatgaacacgcacttgtacttccctacaatattgaactcgttggaaattcttctcaaaatatataggatgatatctcaattggaaaagtattttctatacctggtgtaggaacatgttaaatacctcttattgaatttgttggaaatttctctcaagattatgcataggatgatgggacagtattttctacaccttaatgctatgacacctgagttatataaaaatttcataaaatttaataaaatagattacaataatctaagacactatacaaacatgtaaatccaaactcaaactacgtataaaaaacaaataaagggtgccatgacccttatattagaaaaaccttctatgaggccgtctctgtgtccgtttgagagaaaacgccgtgtcgcacatgaatgtgttttcattggacttcctttcccccgagtcccttccccgtgaaaatggatcaatctacgtaagaggaacgttcgacgtcgctaggccgctcgttcggcatcggacggacgcaagcaagcacggcacaccaacaggcacctttctctccgcccacgctagcaatatcagcccatcaaacaagggaggatttacagtgtaagcatcggtgtcggacgacaccgacgactttcgataaaacctatggtaaaactgcttatctatatatcataacactattaacactatagtctaagtgtaattagcatgctatgacaccgatagacacattatgacaccaacaaatcaattttctagatccgccgctaccatcaaacagcctcgctctcggccacttcgctcgccaacgcatggccttcgccgacggtgcggcagcgcatgcatggccgccgagtgcatgctccggcggtggcggcagaaggtcctgcacaccttcaagtctctcgatctcctccgtcccggcggccggcgagggagaacccataacgaacacaccaatgcggcataaacatatcatgaatatattaaattggtaaagaatcaaaccctggaaatatcataactgtttatcactgactttatgcctgtgtcaaactatgcttcctttcaggcaatcgttggactgcgtgcagggttgcagctgttattgggggttggtgcaatttcctaactgtcatttacattggtaagaggctgctacttcaaaacttcttcccaaaatccctctcattcaacctctgaacgtcagaaatttcatgtctgtcactattttctgaatgtacgcagtccactgtattagcgacaaatgtcactgatatttcatatttgattaactggaacaggatttgttagtgctcacacactgcccgtcctctacgagaagtatatatgaagatcaagttgatgatttcctctgcaatattcttggcctgctgcgtaaccagtatcagaaactcgatcaagttgtgttgagcaagaaaattttgccaaattaattagttatattaaatctaatttaatatcacaaacatactttgtggtcactattattattgagttacagtggtatatgtttgactgtcttgatgtgtgatcactgatcaagttctgttgaaaccttcagcatatatttatattattcttccattatatcatcactatcagattatcagtgccccctttgtcagtagtggctatataaacgttgatagtactattttttcccacacatcagcatatctattttgttgatttttagcttcaataatcttatgtgtgctgcttagtaacaaattgtgtttacggtttgtttgcatgttagtggcctggccgcaaatagcccagtgggccagcaggacgtgggttggcggttgccacaatacacctcgcggatgctgcgggcaaccgcaacgcgtcccacctacgtactccactaaatattcgacaccattaactttttaaaagtttaaccattcatcttattaaaaaaataaaaataattatcaattctttttctaccatttgatttattgttaaatatacttttatgtatacatatagttttacatatttcataaaagtttttaaataagacaaatagttaaatatattttaaaaaaaatcaacggcgtcagacatgtagagatggagggagtatatccttaccaataccgcccacgggccaccatctatcgtctaccggcacaccacacgaaggcccctaccccacttcgctcagcacgcgggaacaagtcaagacggcgatgccgcgccggacggacgtacgccgacggtgacgcgacgaccaccaccacggcgtacggcctcgatcggtggcccgcgtggggcatgtacaggtcggctttccaggggttaaatgtggccgtgccggacgatcgatatatatcctggcctcctttaagacgagtcgacgtcaatgagctcgatcgattatgtcgctgtctccaccactgaccggctagctgctcaccgacctgctcacttaattaggtccctgtttcagatcaaatctgatcagactttatgccaatgtgatgggaaagggctgttgattttgatgccaatttcaaccataatatttttttttaggcaaagttgctaaaattttagtaacgtttagtttgttgccaaatttggtaaatacataaaaaaatcctgttaaaattttggcatattaccattgccaattttggcaatgccaaaatttggtaatgtttattttggctacaatctgaacaggcccaaagtatgcctaaattatctatgtatatgtgtatatggttgatcttttaaagatattttttgatcttttaaattatctatatgtgtgtattttggaaagttgtccttttgtttttcttttctttttttttttttttttggttttgcatctagaagtaaaggacaacactcgttgcttgcaaaatgcagggagcgagggagcctgcagggagagtgggaggcacggctgcatgtggcagtgtcactgctgccgcagttgtatactctggatgctgccccaatatactaaaagtatttcactatatatgtttttaatttataattagaaatcgcaaatattgacagcatattcttcccacagcatgcaactggatcattaggaagtaggaacacataattaaataaggactgctttaattagtaggttaataaatggagtatttattactggactagaaaattcctatgcatcgcaacgagtggaaacaattttagttatacatatctgctccgtacatgcgtgatttttttaaaaaaaataacatttttgcaattatatatataattaaattcatcaactctcacaactaattcatcaactctcacaactaattatatatggataaggagccgggctctactgacggtattgtaccgcgatgtcctcccagagtacggcattgaattcaagcgctaggagatactccctctgtcccataatataagagtttttgcttgcaacgtttgaccactcgtcttatttaaaaaaaaattgaaattattatttattttatttgtgacttacttattatctatagtactttaatcacaacttttcatttttctatatttgcaaaaaaaatttaataaaacgagtggttaaatattacaagcaaaatctcaaaatcccttatattgtgggacggaggagtaatagacatggctctgctgatgcgtcaggcatctaccccaacaagatcttcacgtcctcgccccacagcagcgacatcgacatggttaggccattagcaggacaagctacgcaaattgaatggccatgtgaaaagggggcttccacgttgcatggaactgcttaaagaaactcattctacaatgcatgtatcctaacagtactaacacgaaattttctatttcaccccttatgtttttattctgtttttattctagtccgcccaaatctaataaatccagaatttattagatttgcgtctcccacggcgacgagctcagtgtcaccatcggtgcaaagccgctgacagatgccttgaccaccggatctagcctggtgcgaggcgacaaggccggagatggagctcggcggcgtagatccggtcagctcctccggtccatggcgggacgcgatctcctctctctctctctctctctctctctctctctctctctctctctctctctctctctctctctctctctctctctctctccatttggttgcgagggactcgacatatgcatacatggaagggaatctccttggtggcaggttggggctggatgccacctaagagcattgtgaaaggtcttagatagtggcttcaggacatcgagatttcctctagccgatgtttacacctatgcaagttagcacatttttgcgattcgctaagtactctttctattccaaaatattacaacctagaaatttatctgtgtattacaaatctggacagaggtcctatccattctagaaggatatggattttcatccatcgagagaaatcccctcgttacttataggtcatctaatataaaaaaattttaaaaaaagttgacaatatagattaatatgaaatatattactccacaaacatacaagctcaaattagacttctacaagttacaacaaaaggaacaaattaaactgaaaatagttatcgtacgctcgtagttatatttgttttttttttagaacctgtagaagttgataactagttgataacttgcatgtttgagtgatacattttatattaatctatctcatcattcctttttttaaaaaaaatgactatttaggtgacatagataaaacgagaggatatcctttttgattgatgaaaatgtctccttcttgtggcttacgtatcatcttataaaaaaattatctaaagcctcgatctctaccggatcctctctcttcacctcgccgccggcctccggtggcgccgccacctcctcttcgtcgttcttggtgtcgtcggggcgggtggacagccgcgcctcgagctcccggttcttctcctccagctccgacagctttgactcgagagacttcacgtactcccttgctctgatcagtatcgacgtcttgtctttctgccattaaaaacgatcgagaaataatttaagcaaatattagtcaagatcaatactaatcaatagaagaaaatgttcatgaatatgcacgtgtatacgttcgtaatacgtacaaatgtacgtattaataattgtaccttggagccgggagggaggacggccttgagggcgacgaagctgtcgttgagcttctcccgccgcttccgctccgacatcgtgtgctgcagctggttgttgccggacggcggcggcggcgccgcctcggccgccgccgccgcttgctggtagtagtactggcggcgcctgtacgtcgtctccatgtgcatcttggccagcgctgacatggccgtcttgaacatcctctgcccgcacgcccccggcttgggcgccctcctcgggccgaggtgccgcgcgtaccgcctgaacgcgccaccggtcaccggcggcggcggtggcggcggcaggccggcggtgtaacggccgggctggggctcgttgcgcaccaagggtggtggtggnnnnnnnnnnnnnnnnnnnnnnnnnnnnnnnnggtagaatcccgtcgccgccgccgctgccgccgacgacgaggtgtccgggctgtacgacacggaggcggagcggaaggaggccgaggaggatgacgaggaagggaagctgccggcggcggcggcgacggcgtggtgcgtcgacggcgaaggcgtcaggaggtcgtccaccatggcgacgccgtacaccgcggactgatcatcgtcatcatccatgctcaggtgcatgctgatctgcacgtcataattaattaatccaacgcctaccaaattaatcctacaatttctttgattttatacgcattgttcttgatcgatcggacgctcgaggcctcgagctagctagtgaatcaatgtacaattaaactgcagcaattaagcttgcctcattgagacggtgctgaatctgcgagctgatgaactgctgctccctttgctcgaactcccaagaaccgcagctataaccatatacgtaactgatcaccagccaaacaacgcaagaacagtggaatttacaaattacagagacgatattatcgtcgcgatcaatcgatcgaattcctgatccgagagatggagtagctacctgctggcagcatagccacaggtgaagccgtggttgccggcgccggtggcggtggcgccattggtgtagccatggacgatccagccgccgctgtccatgatatgatcagataaccaccacttctgttgctttgctacagctcgatcgatgatctagctatgtgtttgatcggcacaatatcgatatgatacagttgatgctgaacatgcagacatatatagttatatactagcagtatctaattaataaagtataagatgaggaagctacgaagagcacaactccgaatgtgtgtccgaatacaaaaatatagccattgaaggcagccgtagcatggagcaactgatcaactgaaccagtagcaattaatccacgtgggagatatataaacacattgtcttgtagtagcaaatatatattactaccacatatatagtatatatgtaacgtacatttagtatctggaatcagtgattgattaagagattcatgtggaaaaagagaactaaaggcgcctgatgactatcataagccattagtagattaattagtggcaaactaattgcctgagtctggagtatcatactccacggtcaatgacggaatctaactaagatatatcaatggaggatggatagatgatagatcagtccacggtcaatttggttggctagctagctggatcgatatccatgagagaatgtgggaaaaagaagcaactgctagcggccggagccgggaagctttaatttattcagagatcgatcgacaagagaacaatcctacgaaattttaggtgttatctcaattctacgatccctacgatactacaaaatattatttaaaataagctggtttcaaaatattataaataaatatgctcaagtttatataaaaatcagttaaatatatcaaaaccaacgtgattcctgttgataaatgtccctatttgcatgacatatattattactatatttttatatagaatggccatatgtaaataatataaatattaattaaactttaaaaaaaaatttcatagtatcccggtactacgatacgatcatacgatacgatattactttgagcaaaacgatactgtctaggatcccgatcctgacaaccttgatagaaataggcggtttgtatgagcggattgtacatcggtgtatgaaaatccatttttacgggccacctctaaaaataaattttatcttttcaaaaaataattgttaatttgcaaaagcctgataaaatattttgtattttactagaggctctatatacactatgtgcatgtgaatagaacatttcacattttagtgggtgcaaaaatattttcataagttacatgattttccatacgagatatgtacaaagtttatcgactacaaagctataggtcttgtcgaactctaaaatttttatatagaacttgtattaatctaaggtctcaaatatttgtatttcaaaatagacgtaggaccttgtaacgaatatacagaacactaatcgatctcaaataaaaaaaataactacaaagctggagatctcgtcaagagctatactttcatataaatatgtcttcatctgacttcatatacgaagtttgaaacttttttcttaaaatatgttgtttgtttcaatttttagagtctgttctttaagaaccacctatgaaaaacattttttcattattctttgaaataactaaagttaataaaaatatttttaagttcaattgagatgaatcgatctctatgatcattacaatgttttctttgttatggccaggtccatatttctatagattatttggaaaaggattgatcacttacgtcatgtttcctccaatatgagttggcatgttatctatttcgacattagtaaatgactatatctctactattataaaaattgaagttgtttttgccggtagcttgttacgtcatctgtgtatgagtcggtttttaacttcgtttgcttttagaaatacatatccgtatttgagtcagtttttaggttcgttcgcttttgaaaatacaaaaggagtcatataagaaatgtctttaaaaaactcgcatattaacttgagatgatcggacttctaattgcagcttatgattttctaaaaatatatatatatattcaagcaaattcacatagtaaacttcaccttaattaaaccgtataacaatgataagattaaaataacctcacccattgcaacgttgcaacgcacaggcattttttctagttatagtaaatattttaagaaaatattgcccaaacaatgtaaggaaaatactgaaagaatctcggagaactttggttcaccttaattagacttaaaataacttttcaaagtatggacttattttcttagtgcttcaataaacttttttttcatatagcaaaattcagtgcgacaacgtttaacctctcatcagcaattctatttgtgaaatctccataaaagtgtcaagactgtactcctaaaaatatttaattttggtaaagaccacactgacatctcacaatttatgaaaacatgtcgattcggttaagcacgtgcgaacttgagtggtttttcaggaaaactaagtaggtaggggcgcatttgtaataaaatgacttgtgggtgaaatactgaacttcatgcgacttatggggtggattttacaaaattcccaaaaatttatctacattggacttggttacaatttgttaacgacagtttcttatgagaaccacccttaaaaatttgatttatacttaaatcttgcctaaaaattgtgtaaaaatattttcctaagaaattggctataaaaatgatatttgcaggcggtttttttttaggaaaaccactcgtggaaatagactaatttctacatacagtttccttaatgaaccgaccgtaaaaatatgtgttttcacgggtgttctataacccagagacaatctcaattatttcgtactccctccgtctaaaaataaaccaagacaaaacctggtacagtgaatctgaataagcccgatctagatgctttattttgagaacataggagtaaacggctttaaaaaaaaagatagttgtctagggcatccataatgtggctggtgaaatagtgggaaataagcattgaatgcatccctattactaggtaatatacattgtggaggtggtaacaactactatcagggtataagtttactactaggtattagcacttcatatagatctcgtcttttttttaattgtggcattacacatgtttgaaaaaaaaatttagatgggtcatatcttactacccactctacgtatatatattataatacatcttcaacctatttattatcatctgacacagatccatcttattacctagttttacaataataaatattgacaatgtcaaaaaaacatagcataagtgaaaactgtttttttaagtagtgtgtaggccacaggctgctgggctaggccgtggctgccaggaagacgggggtgtcgacgtcccttcgacaccgccgccgaatgggagaaaagtccccgtcaaaattaacactccgctcgcgtacgtgaatgcgccgccggtagccgtcgccgacatgcctgcactgcatgcgcagcacatcgatagcaacagtacctaccctaactaccccggtggtcaatactaccatttcaatagctaatcataatcgcacgtttcgcaaatcgaggcaaagcattttaaattcggagtaattccgatccatcggtttggtttgacgcatttgtggaggagcaagaaagagtgtaatacttcgtaataggatagggttagtatggtccaatatatatgtgcagcctgctatccatgttgattaataattgatgtactgacgtatactccatatatctatactactgaagaaaaaaaaacaaagtgagacagtgaatctcctaccaccttccatatcaatggcatgtgggttcttatctagtattccctccatactcataaaggaagtcgtttaggacaatgtttaagtcaaaccttgagaatataaatcatgaaaaactctcaagttattgagtttgaaaatgtaaaaattatatgaatagatttgtcttgaaaaatactttcataaaagtatacatatatcacttttcaataaatatttttaggggcaattgcttatttgacctcgttttgaattgtaattaccgatttgaccctactttttgaactttgcttatttgaccctcattttcgagtacgaagctctggtctgaccctattccgtttgtgtgaggtgacggtgttaattttggggtaaatagtccattttgcccttgcttatttggccctgttatatcttgtttgtttgcttgtttgacctaaagtttggataatataaaaaaaaatctctttccccggcggcggcggcggcggcgcacccgcagaggaagacggaggccggcgcgcgctggggggagagagcggcgccctgtgctcttcgccacagcggcgtcgtcgtcgttgccgactggtggcggcgcgcgcagtagaagattgaggccgacgcgcgcggggagggagggagcggctccctgtgatcttcgccgtggcgtcgtcgtcgtcattgttgctgacccggcgggggggcgcgcgcggaggaa

SEQ ID NO: 10360 - DNA, 15246 bp, Oryza sativa
ccagatgaaaaagtacggccgcaagctctttatgggcggccaaaattgcaattagccccttgccgccctctgtatgggcggcaagggcctaatcgcaattttggccgacggcggcagacggcgcggtcgacccaccgtctgccacgtcagcttgccgcccaccattagggcagcaggggctatttctgcaattttttcggtcgatagattatttctgtaaatataaaaaaaaatctaaaaacgaaaaaaattcttgaattgagtgcctcggtgcaactgaagcccggaagaacagtcaacaagattgatgggtggggttcaatcttccatttgcacaagcacaaaatgagcatatcctatgatgatagttgtacacatctaacaaatgccagcttatctctgaatactctgctggagatgatgcacaatactctcctatctgccatgcagaaaccatgctaatcttgctaggttagtgagaatcaagctactcatgctacaaacttccacacggccggtcatctggtgtttccctttcatgtaccagatcatgctgaactatgctcttgtatgtgtccttttagcttgcgactttggcaaaggcatgtcctgatgctcactcatttgctgatatttcgcagccaagacatcatcaaatgctttctgaagtgcagcctttgcaaccttgtaaacttctggtgacatggctcctctcattccgtatgtcaaaccgtcgagagagagatcgttgtaccaagcaactaggcgctcaggaaagctaactccagtctccaacgatcgctcgtctggtacaacactactcacagcatccattgtccacctcttcatgatgtattcctccggtagattccgaaccccgaccatgaagaagattcttagcgcatgcctgcataatataccagcgtactcaaacttgcaacatgtacactctgctttcctgtccagctggttgaaagagactatatagccccggccattttcttcctcactggccacattgtacttgaggataactccatcctcaattttatcagcatgatagcctagcgattcgataaattcctcctgaaatatgtcaaacactgcccttgtatagatggccgcagcctgcctttcaattacagaaggagttttcagggtaggctttgaatatgctgtcacaaagtttgcttgagcttccttctcgaaactcaacgccatcacttgatcaaacctagagataagaacaagcagtggagtcttcatgttgaaatgcgtcttaaaaaacttgttcagcctctcagatctttgcgacttgagtaactctggaaagaaggatcccttctgatacacccaagcccattgctgccgagtgtcatacaacgactgaagccaagtgttctcctcgagattatacttatggatgacatagtcccaccgagcctgaaactcctcaattgtctcagcctcaaagacacattccctcagatcagctttcaggttgatgtgctgtatatacacagcagacaacttctgcttacataggctcaaaatgttccgctggcagaaacgatggcgggtgttgggcaacaccctcgcaattcctgcttccatcgccttacactggtctgtcaccagcagatcaggttggcggccacccattgcagcaagccatgtatcaaacaaccaggtgtatgaactctttgtctcatccatcagcagacagcacccgaatatgatcccctgcaaatgatggttgattccccggaacaccgcgaacggcatcatgtacttggtcttcctgtatgtggtatcaaatgtcactgcatctccaaagctcttgtatgccatccttgcctttgcatcagcccagaacacattggtcacgcaattgccgctatctacctgcatcgcgtagaagaatcccgggctctcggcctgcatcttcctgaggtaatcgagcaaatcttgcacctcggcacgcaccccagctggattcgctctgacgagcctattgcagaaggatggccctccattgggcgccccattgcccactgcagcaggagctccggtgggttcgtccgagggttcggtggcggcttgggtaggttcatccaatgctgcggcgtgctctccggcgagaccatcggactcaccggcgggaggagggcgggggcagagcgggagcgagacggggtggacgtggtgggcgacgaacttggtgacgacccagcgcaaggggggctccttcttggtgacctcgcacatggccatgcacccctcccggatgatgaggcgcttccgccgcctcttcccggcggcggcctccgactccgtgaggtcgtcgtgcctggtggggtggaacccctcgcgggtgcagacgaagcggcgcatgatgacggagtcgtcgcggcgggagcggcgggacttgtcggtgcgcacggcgaacccggcgcggtcggcgtaggcgcagtagaactccctggccgcctccgacgtcgggaactccatccccaccgacggcggctcgcctgccgccgccgccgcggcggaagcgccggcgctagcgaggccgagacgcagccccagctcctcctcctcgtcgtccgcttcgccgcggcgatgcccctccattccgcccacgcctcgcagctcgcgccgccgagaatggagcagcgccggagttggagtcgagcggaaggggaaggggattcgttcgagaggaagaagaagaaatcgcgcaaagagagagagaagggattgggcctcgcagggtgggcccatgttctgcgtaagtgggccatagccagtgaggcacaagcccacgttgggtgggctcatgtccggcctgctagcttgggatggtaggtagatcctgggaccacctatacatttgtcgataaattttctcctaaaaatttgacagatataattatagtataatcgtagtgtacactataacttatatgtaattacactgtaacttgcatataactacagtgtaacttgtatttaagtttcacgtaatttttaatcgttaaatctattacaagatttgttttggtgaggaagaaaaaaaaatcacagcacacacatatgtgtaaggatttgttcctacaacctccattttactgaaataacatattacagagagatttttgaaagttacatacacgttacactatagttacagtgtattacatgcaagttacagtgtaattacactatgattgtactgtaattacatctgctaaatttttgggagaaaatttgtcgacaaatatatagcaaaatcgtccttttttataagagaaaaaaagagtcttaggcctgttcactttgatgccattttcaaccttaccaaattttggtaaagttgccaaaaaaagtggctacatttagtttgctgtcaaattttggtaactatataagaaatcctgccaaaatttggtaaagttttttttcatcaaagtgaacaggcccttagtattgattttttttggataatgaataaacatcagcctctatatttacaagtgggcatacacagcacaaagaaaaactcttattgatggttggttttttttttctttgcaaaacgattgcggtgatacttgttggtattgaaatatatttatacatgtttatatgcaaattgaacagattgagaaaaaaagttagttgcaagtgtaacttaaagggtgtaattacaggacgcgaggaaataattattcacgatggatattttttatgtaaatcttatcagtttatcaccgatatggaatgtagcaacctacttttattgggactcaaatttgctgaagattcaacaattggtatttggtagcaatgtatcggtaagctgcttgagatgatttgacgacatgtcgtcattcgctcactggaagtatgggttattgaaatcccctaaatgattcatttatagacctattaatacattgctctcaaactctttaggtagatgccgtaaaattgagaattaggcattcatagctttattattgataaccgttagttcatgatgtcatggttatggataccacatacactacactggccaaggtcacctgtgacgggcccaaaccctcatctttgacggcttcgcgcatggtcagtgatcagtggtcactggtgagtccagtcacctttgacgggtggccggccgtcacaggtgacacccacctctgacgggcaagttactagaaggccgtcagaggtgttggtctccgctagccttgagcgagttaggacccgtcacaggtgactcatctctgacggccctttaaataaaggccgtcagaggttgaggtctccgtaattagaagctgtcacaggtgatctacctgtgacggccccaaaagtaaaggcccgtcacaggtaggtcacctctgacgggcctttatttgctagtccgtcacaggttatgttacctttgacggatttttgttccgacccgtcactgatgagttaattccaaaaaaaaaataaatgctaaatattggctagcctcaggatttgctagccatgccctctgaaaaatagaaacatcacagatatattccagtgacagatccatcacagatacattacccccccaatataacatcacagatccccaacaacacatatatgcagttcaaatgccataattttgcacagcaaattcacaccccttgaaagccacaatttcggtcgttgctcatagaaccgcatatatacttaccaaatggattaaagccataatgtcatcgacctgcacaacctgtcaataaggaaaaaaaaaggagaaaacagatgaatagtacaacataaatcgtagttgatcaaatgtgatgacaatttagtaaagtaccataaatattgcacatatgaaagttaattacattgcactctataaaaacataattttttacatcgccagaaattataaaaacatcttttttacatcacaataaattatctagccaatttcatgaatctatttggcatgaaaacgtcctttcttgttcattatttctgcaagaataaaggcgcacaattcgcctctgatagcggggggggggttgatgggtgagatcttgaagccagctctacctttctgtttaataaataagaggttaattagcacgttttgaatagcaatgtagatattgaaatgagcttattcgccattagcaacaacctcagggtcgaaatctttcacctctcttagaagtgttgacatgttgtggcacacgtggaaaccacattggtctccgatctgttgtgcgcatgcaaacttggtgtcatgataaagttcattcttgccctccttgtgcctaccacccttttccacatatggaccccaagccatatttaaggccttggtgatttcactgaaatcataatctttggacttattggagttaaggtaggtaaccctactccacttaggtacgatgactaggagaatccaatgtcgcctgcgcagtggttatgtagcgttagtactaagaaccttaacttcaaaaacaatatacacgaagggtattgtcctcttactcttggttgtgtgcgcacatgatgtactccttgtcttgatgggcccataaacaccggttgacatagtcaaccacctcagtgaagctctgtcgtaaattaacctcattcaccatggatggatcaaggaacccaacctgattaccatggcgacgactctcgatccaacacaaccttaaaatatttacgtattagaactaatttaattaggagatatagtccagtcatatcacaagtatagaaggtatgcacttacaaggagtagcattttagaagaccagtgtccaacttccggatcctgaaaaggtcgaagaggtcatcaaagcctatagttatataggcaggcgacgataggaacggctggtggttgtgatgtccaactatggatgactccctcattttccgcttggcattgcttagctccatgtattgcttatgtagctctcggcaagcaatacccatcacagctaacacattgtcctccaccaatggcatgcctagctcaaattgggctggcgccctcacgaccttccccgatttgctcaccggcatcgacgtcgcagccttgcccctttttggctccggcgccaactccccgaccttccccttgccgcgttcacgcttctggcccttgacaagtggtggggagctatcggcctttcttgtggtctttattggagccaagctttgagctatatctgccaagtccatatcagctccaccgggagaatgaggtactgacaatgccggtccacggggagcctcaattgatagcttacacttgggaggtgtaagctccgtcggtcgacttggatgaggagtcatcttcacaactatgtcttctttgggccattgtatgaacgtcttgcgcgcatcgcccaaagtcatgatttcatcatttgggggcacgggcagcggatagcctgaccaggtgtcctttactgtatcgatggacaccttggcatacccagctagcaggtctgcgccgtggaccttgtctgtaaccgagggcttgaaagccatgccctcagcgacttcaggagcgaaagttgggtggactctcgctagtaggacacactgtgctgcgccctgcataaggtgaaagtttgaatttaatattggaatgtgtaaatgtcttttattagaaatggatcggataacaacaattacctcgatgtggtccactacagctagtggtgcgatcgggagaccaggggccggcacctctgtggatgcacaactactcctatgctgtgacggactcgcgtcgtgttgtacacgaggagttggttgcacagcaggtgttgtgactcggggtatattcatgtcggcgagcaccttgttaaccctttcttccacccttgcattcatgctagcttctagttcttgaatgacctcaaccttaagttcggccttcaaacgagtgtccctctcttccttggagactttccgtttcctgtattgggagctgtactgagggagtccatgcttccagggcacatcgctaccaattccccgagatcggccaggatgttctttggttccgagcgcctttgtgaggatgtcatcttcgcgcctcttcggcgcggactcaacctcgctttgtgaagcttgttcagcaaccaagcccaactagaaaagaagatagtcgtttatacgaacttgtactttatacgaacggaaattagttaggttatgtagtgaactcaccagttcctgatagacgacggcatcacttttgttctcaaatgtgacagagccgtccgggttgaccttaccccttgcccgcgcccagttgcgagctctttgttcagggatgtctgaaaacggggcagggacattcgctgctacagcggctgcatcttcttgggcccatattgcctccttgccgatgtaccctgcggtgcccagccgatgcgggtgctcattccgctgttgcagtacgcgatgtgcctcgctggattccctaaactcttgggtggtcttgagagaacagaattcctcccacaccgcttcggttatttgagggtattcatcgaacggcgtatgattgccgggcgggttgacatactcggtgaagagcttcgacttccaattcttccaagctttgcccatcttttggaatgccttccacttgagcctatccttttcttcggctggaaatgtgaaccatttctccattgccgtccaagctcgctctttctcggcttctgtgaccttcccgatatctttatggaggatcccgaagttctcacgtgccgctagcccgcagcagttagaccatcttccaatgacagtcctgggcgccgtgggcctaccactagcgtcaacctctcttataacttgcactgtggtcggccatatattttgtgaccgcggatttctactagacctacttgcacttgtctcgcccgacatcgacgtatgttgttcctgcggcaattctgcagcacaaacagaaggcaatatttgctaaggggtgctagctaaaatttatgtggtcatgtggtgaaaatttatcctataaattaccatgaatttcgggttgttggaccgccgttgtcgcgggatgaccttcggcaactgcctctgtggctgggtttgcttcttcctggatcctcgcaggtgttggggagggcgggtttgcgccgggcgttgacatggtttaactttcgcgaaaaagattataaatttcctaccattagactaaatagaattagatccaatgtaatacggggtatactatgaaagatatggcctcagttttgctgagaaatatgcatcaattacaatcatttgcatgaagggataaaaagaggaaatcagctactaggagaaaaaagcaaccgaaagaaaatagaacaagtgtagttcatctgttcttatccataaaatagaacaagtgtagttcatctgttcttatccataaggaaaagagcaagtgcaggaaattagagtagtagcaacagcatggccatataatagcagcaataagagcagtagcagggccatataacagcagtaggggtatatatgccacaggggcagcaacagcagggggagattcacataaacagcaacagcagagggaaattcacatagacagcaagggtatataaatcaacaagtgtagataatctgttcttatccataaagaaaagaacaggtatagatagaatgttattaagcaattcatccttgaccatttaacaagaagtacaggggcaacgacagcagtggtatataaatcatgcatatattattgtagataaaaaaatgaacaagtgcagaaaatctgttcttatgcataaaaaaagagcaagtgcacaaaatctgttcttatgcataaaaaaagaacaagtgtagaggtatataaccactgaatcaatcatgcaaatttaaaaaacagcagcagcaagggtacagaatttgcatgattgacataaaacagcagcaggaggagtatatatgccacaggggtagcaacagcaggggcaaattaactaaaacaacatgtctagatatactccattcaacatgtctagatatcatccattcaattcaagcaagtctagataataaaacagcccacaatcattgtggcagcagcagcaagggtatataaatcatgtatataaacaacaattcatacaattgacctattcatagacaaaaagggtatataaatcaacaagtttagataatctgcaaagcctccttaatcatcaaattatgacagaaaacaaaatgcatggagaattttggtgtctaggtcggttccgtccatggactacactggcctatccaccaaaattccccatgcattttgtattctgtgatggtttgataacctcggaactacattaaatctgcggccaatctatcaattcttcccttgtaactagatttcaaaccctacacctaataaaggtccttaattatcaaagatttcaaacaaaatgcttaataaactatttctagctagcttaataaccctcaatccatcctttttcagctaaatgtaaacatgatccacaaaattcaataggtctagcaaaagggaacaaaacaacatatatagcagtacacactccatgaatggttatatgtccaaatggctcttaaatccacatccaagttgcaaactagctacacattcaagttttaactaacagttgcaaccataggcagcagcatgggcaaacatagacagcaaggggcaagtgtagataataaaacagcccacaataatttatgtggcagcagcagcaggggtatataaatcatgtatataaacaacaattcaactattcatagacaacaagggtatataaatcaataacttatccataaagaaaagaacatctactgcagcaaaattcatgctaagatcctctattgatgctaagattcactgcaccaaaatcatgtatataaaatctagcccctacattcatccaaaacatccacagacaacaaatcacatttaattcatctatacagcagcaccaataatcgaaacaacaaatcacatttcattcatctaaacaatgcaattcatccatcggaaaaaaggaggaatgggggagggtggcggcatacttggagaagcggcgtacttggagacggcggcgcaggccgtagtcgtcctggatcctggtggcggcggcggagaggcagtggcgaagaggtcgaggcagtcggcggtggtcggggatcccggcgtcgggaaggtcaggatcggggaggtcggggaagtcgatggacggacggcggagaggacgaccggcggcgagggcggcggtggaggcggcggcggagagggcgaggcggcgatggagagggtggagatggcggcagagagggcggcggagatggcggcggataggtcgagacggcgacggtggagatggcggtggagatggatggcggcggtcgagagagtgagtgcggcggcggtggtgcaggccggcgtcgggaaggtcggcggagagggtgagcggcagagaggtcggcagtggagaggtcgaggcggtggtggggaggtctaggcaacggtggagagggtggcggagagggcggagagggcggcggatttggcggcggcgaggacggcggtggagaggtcgaggcggcggtggagaggagggcggcagagaggtcgagagaggcgaggcggcggtcgagagagtgagtgagtgagtgagagtgggcgccggatctggatcgatctagaagatgtccaaccctaggtcaaccctagtcaaactcacctgtgacgggctccaactatgtggccgtcacaggtggcctcacctgtgacgggcgccaaccgtggagccgtcacaggtaagaccacctgtgacgggcccaacactctgggccgtcacaggtgagtttgcctagagcaattttattttattttatttcacttagttcttttattttccttaacatattttcacatacactacatatttttttatacttaattattttatttcactaacagtagtaattgcacttcattattatactactttaattattttatttccaatgcttatacttgcttaattattttatttcacttctagtgggtgcttcacttaattattttatttgactatttcataagcaatatactattgatcattgcgaacatattagagtcatacagataacagacatgtagacataaactacgtacataaattacaaaaataatccttcctcatggttgacacgtgcatattgaacttcatcttcttcctcctcctcttctagaggtatttcttgacctatgccgtggacgtgctggttgtaatcatcctcgtctgcaatattgtccaatccaacaattctccttttcccttcacgaacaacatgtagtttcttgttacacgggtcaactatgtagaacacttgaacaacttgtttggcgagaacgaacggttcatccttgtacgcgttgttagccaagttgatagtggtgaaaccttcattgtcaacttttacattgcgaagatcgacccatcgacaacgaaacaacgggactttgaacttcaagtaatctagctccaatatttgctcaactctaccatagtattgatcacgacgaccaccgtcactagcagcctcgatgcgtaacccactgttctgcactgtgcatttgctgtcttgctttaccgtgtgaaaggtgtatccatttatgtcatatccttgccaggtggtggcactccattcaggaccctgtgacaaccactgaagtgtttcactagacaagttctgcaacctggcaattcggttcttcagccactcgttgaaagaagacatgtgcttattcctgacccaactctctgatcggcctgggttctcttgtcggataactgcaaggtgttcgtcaacgtacggcaccacctcagtcatatgctgtagtaccgtgaaatgacctttatcgtacaccttccgatccaacctaatagtctttcttccaacagtaccaacaccgtcaagcctcccttcgtgatgagatcgtggtaatccaattgaagatgtttctgacatgtagtccacacaaaattcgatggcctcttcggtggtgtaactctcgatgatactcccctcggggtgtgaacggttccgtacataacccttaagaatccccaggtacctttcgcaaggatacatctgcgtcatgaatgctggaccacagcactttgtttgcctcacaaggtgcaccggaagatgttccattatgtcaaagaaagttggaggaaagtacatctcaagatgacatagggttctcacaagttctgcctgtagttcatctagtccctcgggattaatgatcttctggccgattgcatggaagaaggaacacaaccgctggatcgtgtgtcgcaccttaggaggcaaaatattccttattgcaacgggcaacagctgtgtgataagaacgtggcaatcatgcgacttcattccaaccaacttaagatcttgcagtgaaacgagcctactgattcttgatgagtaaccagatggaacctttataccactcaaacatgttagcaaatcaatcttctcttctttcgaaagagtgtagcaggctggaggaaggtaaaccctgccggattccgtgcttatgggatgtagctccgaccgaacacccatatcttccagatctcgtcgggcgttgagaccatcctttgtagtacctgggttaagcagtaatcccattaaactctcgcatacattcttctcgacatgcatcaaatctatgcagtggcgaacttcaagatccttccagtatggtactctccagaatattgacttctttttccacatgctcctctcttttgtcttttgtttttccacatgctcctctgttttttccttcgatgtgctcttctcttttcgctttccaactttcctcttttttccaaactcgttggttattcccatcactaagttgtgcacctctgtccctgttagctctgtcgggggtccggctgtatctctatgtccattgaaattctttctcatattcctatacgggtgataccttgggagaaatctcctgtgacccatgtagaccgtcttgtgtgaatgcttcaaccatttgcttcttgtttcctccatacactccgaacacgcccatttccctttcacagtttggccagaaaggttgccaagggccggataatcgttgatggtacaaaacagcatcgcatggaggttgaaatactcttgtgcatatgcgtcccatgttcgtgtgccctcattccatagcctttcgaagtcatcgattatcggttcaaggaacacatcgatatcgttgccaggttgtctcggtccttgaatgagcatggcaagcataatgtactttcttttgaaacacaaccagggaggaaggttatagttaacaagcagaactggccatgtactgtgacgactgctcaaatcaccaaaaggattaatgccgtccgtacacattgcgaaacgcatgtttcttgggtcatttgagaattcctggtaaatcctattgattgtcctccactgcactgaatctgctgggtgcctcagcatagtatcgactttccgttcttcggcatgccagcgcacaagcttagcttgttccttgttcgcaaacattctcttcatgcgctccgcaattgggagataccacaccacctttgctgggcctcccctctttgacttacttccttcaccttcactctttgctcgtttgtatcttgatcccccacagatagggcagacatccaagtcagcgtattccttgtaatacaaaatgcagtcgttcggacatgcatgaattcttctgacctccaggcccaacggacataatacttgcttcgcttcatatgtcgtctgaggtaaattgttcccctctggcaacagatcctttaacagctcaaggagttctgtaaaactcttgtccgaccagccattactagccttaagcttcatcagttccaacacgcatgacaacttgctgtgcttcgacttgcatccatcatacaacggcatctggcaatcttccaccaacttactaaacttctcataatctctgtcgttgtcctctgcgtcttcaatgtcatgcaacattgtagatagacattgagtgtccaaatctatggtctctccacctaaaggagaaggtacgaacatgccttctcgagctgcggcggtgttctctacatcctgatccaacacttcttcagctgcgacatcaggcgcctcttgctctccatgcttggtccagctggtatatttcttcatgaatccattcattatcaaatgagcatgcacttcatccttgtcttcgatcatctgttcattcttacagtccctacatgggcacaacatgtgcatgctcatcctactttttctgtcattatccgcaaatgtgacaaattcagtgaccccctctctatactcggtagacgaacgatgcgcatagtacatccatctacgatccatctgaaatcaacaacatacgaagaaaaataaatgatgatcgatatgttgagaatgaatggagaataatgtgttttttaccttgaattttagcaaaaaatcgccccccttgccctcccaatggtcgggatggaaagcagttggcagtttgggggtatttatagacccaacacacctcaaacgggttagataaaaaaagcccgtcaaaggtattgctcatacctttgacgggcttctattcaacggcccgtcactggtatccgctcacctgtgacgggccagaaatgaaagccgtcacaggtggcggcccatcacctctgacggcttctaatgtatcggcccgtcacaggtgaggggataccagtgacgggttggaagaaaaaactcgtcactggtatacctctaacgggttttcctttcggcccgtcacaggtgaggggatacctgtgacgggccgatggcagatgcctcaccggtgacggtatcccgtataacccgtcaaaggttatggtcattcctgatcaattcctttccccgctaacagttttccagtaggatgtttgaagatttcgctctcgtgatcaccaaataggagtggactaaattatcggcggaactccaccagaatttcattgtctttgtcggaaaccaacctttcgaattttggaggtattctccggtaaaact

SEQ ID NO: 10361 - DNA, 36742 bp, Oryza sativa
agtatctacaatgttgtcctcctcaggattttcctcaggcgtttgatcattgtgttctatcggtgcaaagtgctcatggggcatgacagtttctttactagaagtgctaggtgtatatttcataggaaattcattctcaaagaatgtagcatctctagactcaagaattgtaccagcatgcatgtcgggtactccagagtttactattaagaatctataacccacactgtggatagcataaccaaaaaacacacaatcaacagtttttggtccaagtttccgctttttggctataggtacatttaccttggccaaacagccccatgttcataggtatgagagatttaacttcttcctttcccattcctcgaatggtgttacttccttatgcttcattggaattttattcaggacatgacacgcagtcaaaactgcctcaccccaccattccttggaaagccccgcagtgtctaacatggcattcaccatctcagttagagtacggttctttctttcggccaccccatttgattggggtgaatagggaggcatcatctcatgaataattccaaactcttcgcaaaaggatgcaaactcattggaaaaatactccccacctctatcagacctcaaccgtttgattttcctttcaagttggttttctacctcagctttatagattttaaagtaatgcaatgcctcatcctttgttttcaatagatacacatagcaaaatctagtgcaatcatctatcagtgtcatgaaatatttctttccccctttagtcaacacgccgttcatttcgcacaaatcggaatgaacaagttctagaggtgccaaattcctcgcctcagacgccttgtgagccttgcgaggttgtttcgattgaacacaagtatggcacttggaacctttgaccaaagtgaattttggaattaaactcatgttagctaagcgcgtcatacaaccgaaattcacatgacagagtcacgaatgccacacattagactcatcattctcgctaatatggttcacagcattatgattattacacatgtcattcaaagaaaagcggaacaagcctccgctgtcataaccttttccaacaaaagtcccatatttagaaacgacacatttattggactcaaacacaagtctaaaaccttctctacacaatagagagccgctaactagattcttctttattgaagggacatgctgcacgttcttcagctgcacggtctttcccgaagtaaacttcagatcgaccgtaccaacaccatgaacagccgcaagcgacccgtttcccatcaacaaggaggaacctctcccgacctgataagaagaaaacagagaaatgtcagcacatacatgaatattagcaccagtatccacccaccaatcaggtgaatgaaaaacagagagaactgtaggtaatattttaccgtaccccgatgttcctccgccctcgctaatgaccatgttggcagacttcctgtctttgcgctcaggacagtccttggcccaatgcccatacttgccacacacaaagcagtctccctttgcctttcccttgcctttcttcttaaaattggttgcagccttgggtttgacatcaggcttgactttcttgttgttgtgggatgcatgagggttcttcttctgtaccatattggcactagaacctccctcaacctttttgccccgcacgtcctttgccctcgccttctcctcaacacccaaagagccaatgagatcaggaacactgaactcttgtctcttgtgctttagagaagtggcaaagtccgaccaagaaggtggtagtttggcaataatgccacccgccacaaacttgtccggcaactcacagttgttgttctcaagttctttagccagcatctgaatctcatgagcttgttctactacagaacggtcatcgaccatcttgtagtcatagaactgctccatgacatacagctcactgccggcgtcagaaactccgaacttggcctcaagtgcatcccacatgtccttcccagaaggcatgtgcatgtacacgtccactatgttgtcagcgagtacactgatcaatgctccacggaacaggcaatccgaagcctcgaacttagcctcttcctcaggagaaagaggtggttcacttcgtttgccccgtgaaacatagaagcactgcatcgctgtcaaccacaatagtgcacgtgctttccatctcttatagtttgaaccatcaaaagcatgtggtttcagtgcagcagcaaagccaactaccgaaaatgacctatcaggtttttggattgttggaaatatagtcattaatcggcatattttaatccaaaaagttaaagcaatgatcatggcataagcagtgtagggtgatcttaacataaccagtagcatactatgcgcatcatgaatgtcaggaacaggaacataccagtaacacgataacatgctagaggcattatgtagaacaggaacaagaacatagcgcacatagtatagcgatagcgctaacaatgggaacaggaatagcgctaacaacagtagcaggaggagaagagtataccccgagaatggccctccgctggatggtgaggcagaattgcctccgttgttgttgtcgttcacggcacctcctggcgcaccagctccggatccagctcctgtcggcggcgtaccaccaccgccagcagtggcggcggcaactccagacatggcgatgagcagtcgagcagtcgtgcgggaggcactccccaaaaacctgatcacccgcctacccggtgcagatctcaggcgaaggtgtggtttcggaggcactgctccttccaatctctcgtgcgcgcaagagatcagaagcgaggaagcgagagcaactcaggcgcggagaagaagaaactaacaccgggaaagaagctaagaaaatggatcggactcgcggcctccttatctatcaggagaaagaacatggacgcgctgttgcggagggaatcgtgggaacgtggaacgtggacgcgctgttgcggagggaatcgtgggaacgtgggttagtgcctgcaaaaggatagtgacgcccgcccgccgccatccacgccctcgccctcgccctcgcccacggcccggcgcgcgcgtgtggtattccgacccctacctcaactggtcaacagggagcctccaataactccctatttaggttgagatatttctcgcttaaatcctgaggtggtattattatcctcaacacttattatgggcctttgagatttaatattataagttgggcctagcccaattattctaacactcaagtcatcgggttcgcccaagtactatataacatgcatgaagctagcttagcatagatgtcaagtttctcaagaatttaacacgcctatacattctcctctcaaaaattagcatctgctacgacagccacctccaggcacggatgacgaagcatcatccaatgctgctcttccttggcctagctttgctcgccctgcagcctctgatcgcggccgcatcacggcggccgccgccgtcgccgctgtgtccgaagaagtgcggcaacgtcgacatcgagtacccgttcggcatcgggccaaactgctcgctgtccgacgatttcagcctcgagtgcgtccacgacaccccgcagcttcgcctcggcaccgatcggcagcaagtggtgccagaaacacctagggatattttggctagcttcacaaagtagtgggctggacgatctgggttcgaagcctcaccccttctaattatatttgatattaggtctttcgggggcggagacaggcctagagcagctaaggcttgagccctaggcctgtctccaaaaacttgcttaaattttgttgattcaccatgtaaatttttcagaaaactaaaactccattagtcgagccctaccttattcttagtcttatataatttttggctccgccactggtctttccctaatattcgtgttctttttagcaggtggtggccgtgctcgacatcaacctgctccacggcaagatccggattgccaacagcatctcctggcagtgcaaggacgagaacgacccaaccggcgccccgttgaagaacagctcgtggatgggcctcgacgtgacggagctgccgtaccgcttctcctacgaggacaaccaattcgtcaccgtcggctgcaacgtgctcgtcttgctatccggagaggaggcgtcagtcgacccgatcctgaacgtctgcatgtccacatgcttcggcaacgggagcaacatcaggaacggctactgctctggcgcgggatgctgcgagatggccatccccgtgggactcaaatcctaccggcttgaattcagcgggccattattatttaataacagctggtcgccggacaattacacctggtgcagccacgccgtgttgatggaggctaaaagcttcagcttcgagagggactacgcgacaaccgataagtttttcagaaacaagaacggcacggtccccgtcgtgctcaacttcgcggcgggcagcgagaagtgcaaggaagcaagaatgaaagatacctacgcgtgcgtcagcgaccacagcgcgtgcgtcggcacggctgatggctacgtgtgcaactgcacgagtgggtacaagggcaacccctacctccccggcggatgcacaggtacgtccgtccgtctccaataccactgatttgagttcccggatttgtggagagtttttttttagaatgatttgtggggagttgcacgtgattttttattttaataatgaaaatcggtactaagtatatcttttagtcctactgaagcctgtttagttcacgaaaagaaaatttttggatgtcacatcggatgtttgaccggatgtcggaaggggttttcggatacgaatgaaaaaactaatttcataactcgtctggaaaccgcgagacgaatcttttgagcctaattaatccgtcattagggcatgtacaatggtgtttattagtggtctctctcaattgccatgcaagtaaatttgatgacatggaagaaagagaaaggagtacggttgttatgcatgacaacggctcagagtcgattcttagcatttattagagcaaattttgttgcatggtgttgaaagaaaggaaagaagagtaagaaaaagtattttgatacattaattattagagactatattgtctctaattgttgtaggatgctagtctctaaataatgtagagttcatatctaactctaccttttgtacatgcccttagcatatatgtgttactatagcacttatggctaattatggactaattagattgaaaagattcgtctcgcgatttaacccctaactatataattagtttttttaatttatatttaatgctccatacaagattcaaagattcaatgtgatgtttttgggaaaaaaaattaggaactaaaccaagcctgagttgcatgtacatttaactgtactataatttttttttacgggaatgctaggggacgggataccgttccccaatgggatactcctcctccacaaatgcgattctcactcatgcgacgcggccgaagccatcagcgcgcgcccatccctgtccttgtcccctaccgccgctgccgccgccgtcagcatccctcgccgccgcgcccgtcccccgccgccgccgtccccgtcccccaccgccgccgcgcccgtcccctacagtcgtcgccacgcccgcacccgccaccgtcgtcgtccctcgccgccgccgccgcgcccgtcccctgccgtcgccgtcgccatcctcgtctacagggggagggctgcaggtggccggcagcgcgtcgggatgctcctcccccaacgggatgcacaattatatctactaggaatcacctgatacctggtaagtatcatccgataactcttaagtatcacgcgatatataagtataaatcatcttatacctgacatgatacctcacgagtatcacacgatacgtggtagaaatcgtctgatacctgacaggtatcacatgatacctcgcgagtattacacgatacgtggtagaaatcgcatgatacctgataagtatcacatgatactttgcaagtgtcacctaaaacatgtgtagaatcgtctgatacctgataggtatcacacctgatacctactcgggatcatcccgttcgaaaacggattccgttatatagcagccttttttaagaaacaaagaaaaacgcaaacaaaacactcaccatgtgcacgtattcatccctgtgaacttatatgaatgcacacgtaacatgcatctaactgtattatatagtgtcatctggatttcaaaaaattttctatatgcttaggacttattcgtttcaaaggaattgtaaaggaaaagtacaggaataggcaatcctttgaaatggacactatactgtcattcgtttcaaaggaatgcaccaaactaaaaattcctatccctccacttttttagggaaaacaaaggaaaaaaataatccactccaacccaatgttttcaatcctttggattgtttgctacacaaccatagaaaaattttctatgtttttcaatccttaagtttatacatgcatttctatactatttctatgttttctttattcctatgttttaaaaatcctacaaaccaaacaagctcttaatttggtctggttccaatgccatcctatatgcagatattgacgtatgtgctcctggaaatgacgggtgtccggacgggatgatttgcagtaattttcccggcggacacaactgctcgtgtccagaaggagagcacaagagcaacaagagtggagtactcatctgcgagccggacctgaaacgatctttgccggacctgaaatttaaacgatcttaccggctcccggtctcagcgatcatagctatcggtacgtaacaaaaatgcaattgagcaaatttttttttcagagaagggtatattttttacccagcctctatattcaaccgaatatatgcagtcatttaaattaggaatttagcctatcgaatataaaacttagcccttaaataaaaatttgctcccatagagatttgactcagaatcttagggtgctactcatgtcactgtaaccattaggctacatgcactttcacaaatgcaattgagcttgccctgtcatcatctactctaatatatgcacgcacagctagcacgcatggactttaataagttcgataatttttatatgcttaattcaatatagaatatattgtggtcaaatttgtattttgaaaagcgcaaaaaaaagtcaaacatgatgtatatacatataaagtatttcaagcgtaacttagagcaagtttaataatatagccaaccactaactttaaatcatctatagtcaatttaatagccaactcatacacatagttaccaataaatatatatcgcattagtaatatgtggtcccacctatcataaacatattgtgtcttgtagtttgtgatacagctgactataaatctgtaacccgctactcttctcttcttatttctcttctcgatatatacttgctcttagactatcatatttttccctcgtaaacaggcgtcaccggtggcatcgctatcatcgtgatgagcttcctgagctcatacctagtacaccagcgaagagcgcttgccgacatcaagcgcagctacttcaagcgacatggcggcctgcttctgtacgaggagctgaacgcgaggaagagcaacgcgttcaccatatacaccgaggagcagctcgagcaggcgaccaacggcttcgacgagagcaacgtcctcggccgcggcggccacggcaccgtgtacaagggctgggtggctgcagcctccgacgacctcgttgtcgccatcaagcggtgcaagctaatggacgagaggaacaagaaggaattcgggaaggagatgctgatcctctcccaggtcaaccacaagaacatcgtcaagctactcggctgctgcctcgaggtcgacgtccccatgttggtctacgagtacgtccccaatggcaccttgtaccagctcatccatggcggatctgccggcgccatctccttcgcttcccgtctccggatcgcccacgagtcggcggagtcactcgcgtacctgcactccttcgcgtcgccgccgatcctccatggcgatgtcaagtcctccaacatcctcctcgacgagagcatcatggccaaggtgtccgacttcggcgcctccatcttggctcccactgacgaagcccaaatgatgaccatggtgcaggtgagaaatgcccagaggttttccggctagctccacaaggtagtgggttagacgacctgagtttaaagcctcaccctttctaattactccctccgtttcaaaatatttgacaccgttgactttttagcatatgtttgaccgttcgtcttattcaaaaaattttgtgaaatatgtaaaaccatatgtgtacatgaaagtatatttaacaataaatcaaatgatatgaaaagaataaataattacttaatttttttaatattaggtcatttcctaatattcgtgtctttttttaccatggtgcaggggacgtgcggttacctcgacccagaatacatgcagacatgccagctcacggagaagagcgacgtgtacagcttcggcgttgtcctgctcgagctgctcaccggcaagaagccgctctgcctcgacgggccggatgaggggcggagcttgtcggcgaggttcttggccgccatgagggagaacagagccgatttgatactggatgagcaggtgaagagcgaggcgagcggtgagttgctggaggagatcacgctgctggctctggagtgcctgcagatgtgcggcggcgacaggccggcgatgaaggaggtcgccgagaggctgggcggactgcggaagctgcaccagcatccatggacgcaggacgtcgtcgagctcgacgaggtgcggtgtttgctcagcgactcgccggaaagtatcagttttgaagtggacgccaccagtagtagcggatactgaaatttgaattagagaatagtgttgcgtcagtttgaaatttgagtcatgtctcttcttctcctcggtttgataaaatgtactacctccgtcccataataattgtatttctagaatttgaatttgtcccaaaataattatcacaatagagtactaatagtctcattaatcacttctcatttaaatttctttctattttaccctcgattacctttccactcttatatagtatacactacttcctccgtttcacaatgtattctatctagatttattaacatcaatataaatgtgagaaatgctagaatgacttacattatgaaacggaaggagtatttaataagggacacattatagtctttcttcttaaaccttaatatttgctaaacaaactagaattacaagttatacgagaggaaggtagtatgacttgtagacttgtagtcactatggtaacgctgtagccaaattaatttcctgctcaatacgaacagagcgaagatattagggtctcatcttttcgcttatatttatacttatcagctaaaatttgaatttttaactttaaatttgaagctgattttaaggtttttttcatcgaagtttatttttcagcctttacttttgcttttagatcactaagaatacgcatataaaaattttattcacatatttcttttcgtttgtaaataagatgttttgcttattccgcgaataagcgaaacgattccatttattacaacaatcctgctattttttcctctctaattacttaactgcagttctcaaaaaataatatttactcaaatgctgtacagtttagactaataactttgttgatggtctaataaaatgcctttctttgtaccgagctggcctagtacctatgccgatgctcagatgccttgtttgagaggcccgtaatcaattcccataacccacatacataaggaataagtctattttggctccctcatttcttgcccttggtcgaattgcatccctcaactgcaaaatcggatataacacctcccacatctccgaaaaccgttgcaaatagactcctcaagtggtttggaaggtggttttgagctgacgtgggtagttgactagttgaattagcaagtaggacccgcatgtcatcctaatcttatctttcttcctcacctctcccccctccccccctcaccaggagccgccggcgacagcccgtcccacggtaacagcagattggccacctgcaacgtcggcatcgcgtgcgcatgcgcgcccgcttccacgcgccgcctctgctgtccttccccattcctctttcatatcttcctctctctcccctcgcaactagcagcggaagcggcggtcatggcgtgttgtcgtcttcatcgtggaagcagaagcgacgctcctggcatgtcagcgaagcggcgcacatgggggaggatctcaccggccggctttgcacgggaggaggatctcgtcggccggcagtgacacgcgcgagaagtagatcgtccatgcacgcgcagaggcggacacgcacctaagaaagaaagagataggccaattacttggttagacatacacaactacagaacaccgcaatcactatgagaattggtcgctctgccatcggtgtggattggagctacgagatctaggaccttggaaacgattcttggcctgaaaaatcttcttggacgggagggccggcgatctggttgtgtggagattatgggtaccccatacccacacggcattattatccgactagttataggggataacttatatatatggaatatgtaacagatcatgacttgggtattacatttccttgtatattacagaatggcgtaaagtcctagtttggtaatattgtaaagtagatttaggaaattgataccgtgttggttaaaatttttatcttgtaatcctgcctctcatcctatataaggtgggcaggaggccctctagggggcatgagacaatctgattgtcagatcaataaacacccggtggattcaaatccccaaacaggagtagggtattacctctcattgagagggtctgaacctgtctagatccctgtctctgcatccatccacttttagctctcgtgcgctacccccttttcatattgccgaaaatttgtttcgacagttggcgcgccagggaggggtgcgtcgagtttcccgtcggtaaagtgcgttggaatcaatcaccaacatgaccggatcgtacacgcgcgtcattcaccgccgcaagaagcacggagggcgcgtctcatcagagcgttgagcgcctgccagatcgagagatcgcgccgatcggtcgtgtgctgtttggacttccggatcggcgagcagctacgcgtgaccggcagcaaccagccgccggcgcatgatctccgtcgacgtcgcttggtctaattcaatccggccgaccacctcgatcgatctacatccatgcggctgtatagtccacgcgtcagatcgatccgcatgtgcatcacatgacgagggtcaagcagggagcaagactatggcatatgcatctaatcttcttcctgctaattagattgattattaaatcagattgattgatggtctttttcctctttgctctttcttctggtgtatgcatgttgccggcgaccaaggtgttcaattaggcacggtatgattaagccgtcgctacgcaaggcgaagccgtccactctctgagcgaatccaactcgtgggctggacaggcatgcacgaaagttcacatgacgagatcgctggagatgtacaggatgtgtcgattcaaccgccatgcatggattaattaatccagccatacatgcattcaatcgctgagatttatacatttaatttgctgatattaatcagatttattttatttgtttccatgtgaatctcggagcatcaccgatggacgtcctgcgggctatggccaccacgggccacacatgggaacagccagcctatggctaatcaggagagaacacgtgcagaaagttgatcttaccgatcaacaagcaccattaatttacttaatcatgcctatatatttttatcattaaccaagttggtttgttgtcttgttctgtaagcacgccgagccatggatcgcttgattagtcctagcgacagagtgcaacaccagcaaccaattttctccgtctcggagtcagtccggtcgagaaaatcaatctcggcgagttcaacaatttaaatctccgactccgccgggttttttcccttccaacttattgttgtttattagattgatctctaaatatcagattaatctcttggtatttcctgttgtttacatgtaatgctgtggcactgctgttgccgattggtgtttccgcctgcacggctggcctattataccgtcgttgttgggcatctacgacttcactgtcggcctgcctccgtcgccgccgactggtgtcctcgcctatacggctggcctattatgccgccgttggtgggcatcttcgctttcaccatcgaccgccttctttcgccgccgactggtgttttcattgccattaataggcgactttgttcccacatcagccacctctgccgtcattaagagagatattacaaagctaagtcatcatttttccttatatgatatttttcttttcctctgcctcactacatcaactggttcgtcgttgactagtgagtcaggggctacagatgttatatcatattttttaaataactttcataatatttatcttgattgctcgtgacataatctgagtacaaaagtgcctatcgagttatggatttccatcttcctatgctttccgtttggtttgccaatggatagttgcctttgggccgattcctagcacccgagggcttgttggatggaccgaataacgcaaggtgctaagtattattcggaataaatcaaaagcatagagataagataatttattttctgctcttaataattgcaaaagtacccgagtagtaaattctgatccgtgaaactttgttccattaatgacgaactcatgttactcatatgcatgtttgggaagtgcctaggccgactcccggtgcttggtggctatgactagtcgggcagagtgtttaaacgtaatgagtcatctactcgaggaaatcaaaattgacgagaggagaaatacatatttataaatattttaaaatgcttgaatttttctcgagtattatatttacatcagatactactcatcctatctgtttgttctgtgggatccagatccagatatgcataaaaggaattcatggctttaagcttatctcctacgcttcaggaatggatcagtcagaacatcaccatcggcttgccttcgccgccgccgactggtgtctccgcctgcacggctggcctattatgccgccgtctgttgggtgtctacgtcttcactgaccggcttgccttcgccgccgccgactggtgtcttcgcctacacggctggcctattatgccgccattgttgggcgtctacgtcttcaccgaccggccgcctcgtctgccgccgactggtgtctccgcctgcacggctggcctattatgccgccgttgttgggcgtctacgtcttcaccgaccggccgcctcgtctgccgtcgactggtgtctccgtctgcacggctggcctattatgccgccgttgttgggcgtctacgtcttcaccgaccggccgcctcgtctaccaccgactggtgtctccgcctgcacggctggcctattatgccgtcgttgttgggcgtctacgtcttcaccgaccggccgcctcgtctgccgtcggctggtgtctccgcctgcacggctggcctattatgctgccgttgttgggcgtctacgtcttcaccgaccggccatctgccgccgactggtgtctccgcctgcacggctggcctattatgccgccgttgttgggtgtctacgtcttcaccgaccggccgcctcgtctgccgccgactggtgtctccgcctgcacggctggcctattatgccgccgttgttggacgtctatatcttcaccgaccggccgcctcgtatgacgccaactggtgttatcatcttcacggctggcctcgtcgccgtcaccgctaatcggcgtcatcatcttcaatgcaagctgtctacgtctgctgccgactggtttcttcacttccatggctgcatgattctgccaatgttgattggccttatcgtcttcactgccggtcgtctcttctgctgttgactagtgccgtcgcctctactgctggtttatattgctaccactactgatggacgttattgttttcattgttggccgacttgtctgacgccgactggcttgttcacctccacggctgcgcgtcttcatcatcattgactggcgtcatcgtcatcgccggtttgccttcggcgctgcccatgatgtcttcacgttcatggctggcctattttgcgctgttaaaaaacgtcttcgttttcatcatcattctacttcttccgttgccgactggttatgccgccgccaactggtgtttttatcttcatgactgcgcatcttcgccaccggtttgcttctgttgccgccaactcctgttcacgtcatcacggctatgcaactttgtcgccatggtggagcgacttcatatttattatctttggcactagcaaacactattgcctctacttcgcaagttttgctacttcaccagccacgacgtctacaagagcttgggcatctcggtatgcgtcaccaaatatgatgccgtgtcattttactactacaagtggttctacaattttcaagattcctactcggacatcctcaacacatatctttactcaagcaatgactactcgatgacaagaagctacagttctcgactctatgttcaattgctttccaactaaccaaagagtcaggggatacacaaatacaagactcaaaattcgacaagttttatgtcaagatgaagcaatcaatcaatcgacaagtcaactctgggagttattattttcgtcttcgcttcagagccgacattttatttcagcgactccaattattacactgattcaatgagttggacaacagcatctactttcctccaagtgaagcatctacaacatctataacactaagttctgcagtcatcttcgtaaatcaagaagcgttgcatcagccttctttatgcacacgctcgcatcaaggaaactactcgagctttgatatcttgtcaacagtttgatggattattgtcactaacatcatcaccagcacctctgcttcatcggccctgacatctccgttgttgctaatggatgattatgtcttcgccgacttattatttcacattcacggttgacctactacgcaaacactgatgagcgtcttcatcattattaccgactattttcttcatcttcatgattggtggatttcgccatcaccgttgatgcgtgtctacgtcttcgtcgtcgacttgctttcgttgccaccgactgctctatcggtgttgttgggcgtcttcatcttcactgctagctgatttgattgctgccgactggtttcttcgtctccacggctatgcgacttcatcacctttaattggcgtcactgtttttaccaccaccaacatcttcgtcagctttgatggatgatattatcttcatgttggtcatttcgtctccatgccgactacgtcagctaccatcaatggacaattgtgactataacagaaggataagctacatgcttaggggctcatcgacacaagcgcgagggttatatcttcaatttggacttgttccggatacatgcaacatgaatttgatgatcatgggtctattttctacgctcaaagactggactatttattattccctgtaagggttatcaaccgaatacttgcgccagtcagaattcaattattatatctattttggagtatcccataaaggataatcattcagatcagaagctattcatatgagctgcacttggtctatataacccgaaagatttattactcgggaatatgttacatgcgtcatcctttaaagggtgtcgaaggcatattttttggcctaggcctaatatgtctgcagcccatattttcaggtgtagcctgtcacgttttttagggacttaggcatctttttgcttaggcaaaagtgcgcgtgattatgtgcccaataccttaaaatccttttataccgcagttattcaactttttaggagttggtacaatgcaatttaaaaggtgccaaacagtaatgctttatatggctccccgctgacttttttatataagtcaaggcgctgtttgggttcataaagcaattgattggatacaatatcattgcgttttgccacgtaagtgtgcacttttattgaccaatattatggtttaggctgattatatattttggtcattttccaggcggttggtaaatcctttatgagtttatttactcggattttataccacatatgccatatatttccaggtgtggtggaaccatgtgtcttctagggacttaagcacatctgttaaagcaatgtgcgtatggcgtatgcccaatactttgaaaatttctttattcacaacatacaagcttctttatagttgttttgctatgtgaattttcaatgatatagccaactttaggttacactcatcatattttacaaagcggttggtatatcactcggatcatgttattcagggattcacaccgcatatgctacatattaatatcaagtcacttggttgactataattatcaaagccactcggttggttggattattttttccttaactatatgcttggtttgttcaattaaccacatagtcgggggctacacctattaggtgcatctagtcgatgcacctgactttatttttcagccctccacagtcttcagatttggtaaaagtactcgggagaccatggcaaagatgattgaagcactcggctttggagtaatctagttcgagagaagattatcttttcgactgtgaaggtctcaggggctactgtggagattatgggtaccccatacccacacggcatggttatccgactagttataggggataacttatatttatggaatatgtaacagttcatgacttgggtattacgtttccttgtatattacagaacggcctaaagtcctagtttggtaatattgtaaagtagatttaggaaactgataccgtgttggttaaggtttttatcttgtaatcctgcctcccatcctatataaggtgggcaggaggccctctagggggcatgagacaacctgatcgtcagataaataaacacccggtggattcaaatccccaaacaggagtagggtattacctctcattgagagggcctgaacctgtctaaatccctgtatctgcatccatccacttttaggtctcgtacgctacccccttttcatattaccgaaaatttgtttcgacacgttggggaggtggttgtgatgttggcgccgccgtcatctgggtcgctgccgccaactaatcggacaccactgccgagcgcctcttcaccgagcttgtcgtcctcccgctggctcaggcacatgcatcggcgcacttgcaccctagccccccgagggcgccggtggcattgtagctccgaccacgccaatcgaggccgtcacgaacagcgacggcgcagccgccgccgctccccgcgcgagaaagggagaggtgaggaacattgtgcacatctgcgcgtaaaccccttcctggtggtggccacgaccaccagctcgtagaaggagagctcggtgcgaacctctcggggatggcggtgagcgagtgcgcgcatgcgatagcaaaggaggcggcactgccacgggttgacatagaggaagaagataatattaggatgacatgtgggtcctagttgctgattcagctagtcaatcacggtcaatgtgccacgtcagctgaaaccaccttccaaaccactcgaggagtctatttgcaccggttttgggagattcaggaggcgttttacccagttttttgcggctgagggatgcgattcgaccaagtgcaagagatgagggaggtcggatggacttattcccatacataatggcccgtcagagtgcatgggccggaatttcgagcctaccaaacaagcccagaagtatcaacaggccttcctggatttgtacctcatggcacagctcgtaaacaccacaagattgaggcaaccgagcccagccatcatccagaagaagcgatcaggtgcccctcgttgaggtcgtcggggatccaccccggccggccgccggtcgccgtcgcccacgacacggccgtcacgacgagcgagctcaggtactcccccgccgcgacggagatgaacccgagcgccgtgcacaccgtcttcatggccggcggcgcctggctgtagaagaagtccagctgccccacggtggcgagcagctcgccgacgcccaccagcacgtactgcggcgcctgccacaggatgctcgtcggctccatcccggcgtgcgccgcgcgggcgcgcctcgtctcgaccagcgccgccgcggccatggcgagcgcggccatggcgaggccgccgccgatcctgagaaggtcggagatgcccttctctctccccgtcagcctcctcgccgccggcacgaacgcgcggtcgtacagcgggatcaacacgatcgtggtgatgatctggaaggtggccagggatgccggcgggacgtggaaggagccgacgcgcgtgtccatcgccatgccctgctcgacgaacgtcgaattggcctgcgccgtcgcggtgtagtagaaggcgacgcacgcccacaggggcagcatcctgacgagaatcttgagctcctccacctgcgtcaccacgcaaagcctccatggattgcgcggcgcggcgccctccgcctcctcgtccgacgccgtcacgacggcggccttgtcgaagaatctgatcgagcagttgcatctcaagaattagccaattacattacacctacagcatcacaaacaccagatgcaacgagagacatgaactgaccggagatcggcggtgtgctcgatcctctgaactcccttcatggaggaggcatcctccgataggtcgtagagaagggccatgtcggccggcggcgcgacgttgaacttgcggacggcggcgacgacgacctggcagactctggtgagcgggctaccgcgggttgtctgaaacctgtacgcccgagacgcggcgacaaggcaggagagcccgacggcgaggaccatcgccggaatccccaaccccaatgcccacccgtagtggtcttgcacccacaccatggcggtggtggatatcacggacgcgcagttcatggtgaagatgtaccagttgaagtaggagcccttgctgatgcgctccgacgtgtcgccgtcgtcgaactggtcggcgccgaaggacatcaggcacggccggagaccacccaccccaaatgcgatcatgtacaggccaagaaacaggatgatcacttgagctgaagccatggacgacgtgtccttgatcagcagcggcagaagcgccgacagagccgccatgagcatgccctgcaccacagattaggtacgtacagccatgaagctgattggatttgcattcatggcagcacacagtggggaaagtgatttcatccctccaggaaatatccctcgtttcatccatgccaactaattagtcataaaaaaattaaaaaaaatggacaacataaattaatataaaatataaaattaaatgacaacataaattaacataaattaatattaatataaaattaaatgttctctcaagggataaaaatccacatcccacacagtgactgattacttgccatcagccataaattcacggcaggaaggacacagtgactaattctaattaaggctgtgtttagattggtataaagtttagattttggttgaaattgaagacgacgtgactgaaaaaaattgtgtgtatgaaaaatttaatgtgatggaaagttagaagtttgaaaaaaaaaatttggaactaaacacaacccggatcgaatgaaatggaggggactaacagcgacgccgatgcagcagctgacgaccatggtgcggtaccttccccagtaggaatcggcggcgacggctccggccagcggcgtgaggaagcaggtggcctgccacgtcgacacgttgttggcggcggcgacgttgctctggtgcagctcggcggtgaggtaggtgacgaggttgaacgtgatgccgtagtaggccaggcagtagcagaactcggtgcctatccacaatcacaaagcaagcagaataagcatctctcctcagtgttgtcatagctcagataaccacatcaacaaagaagttcctcatttattttttttttcatttttttcttttttggaacaagaacacacaaagtgagagacacattaatcatcaaaaaattggcaagtaaaaaaggttaggaaataattaatagagctgcagggatatctaatgaagtttattaccaagaatcgggcggcatgccatccatccgcctgtgcgatgcttcagcgccgggttgccatcgacgccaagagacccatcagtggtgtatgcttcttcaacctgcagcaaccaaaatccccagcctagttagcactgaacgtatccatgagcggctgcttcaaattaactaggagtagctagttcaggcaaggctcaatcaatatttttctgcagggaaactgatgagaaattaaacaaactgcatcgtggaaatcggcataaggctagcagtaaggagattatgaacagcgattaattaattacctcgggttgtagcagcgccactgcgtgttcctgctgctcagtgtccgtggacgccattgccggagccggtcgagagctcgaggacaaactgtacaagctaatcaagacctcgagaggatatacaggacaaccttatcccgtaccaactctatcagagacccaaaaggaaaataaagcgaataaagattagtatacaagttaatttagatacgaaggagtatattattaattacctcggcatgcataattaattgtggtttctgcgacattgaagcctcggaaattattgttgctggctgtactagcgtctatttcttgaacaagactgagaaatcccttgttccttttgatttctttagtcagtagtgtcactatccgcaccgatttattcttggacgtttccttttgtttcttgtatgcgagaagcagatatttctgacctacacagtgccgtgatactacctccgttcccttgtccttagcgttgacccgtgtggtttcatttctatcaaccactaaaaacatctaaattttatcgtgtaatttgatagatgcaagtagtatataaacttatattaagcatataaggtacttcgatgactttaaatatgaaactgttgctaatgaatggttaaaatttgtatatgaatggtatctggtgacaatggatggacggccgatgttgcatgcagttgctaagttgcagttactactgcaactgcacctgatccgaattacactatgggttcgtctagttgcctgttactttttgtcacactgaaatatattctggtgactaacttagatagtttggctctatatggttataacaagattatcttccaacaaaataaatctcatacatcaataacttggaaatttttgctaagattttcttgaacttgctaaggtgtggtgaaagtatttcaggcgtggcaatgatgttaagcacacaacctttgacaagtttggtaagggcctgtttagttcacgagaaattttttagcgtgtcacatcggatacacggtcacacattgaagtattaaacgtagactaataacaaaaaaaattacatattctacaaatttattaagcctaattaattcgtcgttagcaaatgtttactgtagcatcacattgtcaaatcatgacgctattaggcttaagagattcatctcgcaatttacacgtaaactgtgtaatttttttttcatatttaatactccatgcataattgtgacaggtgaaaaatttttatttggaactaaacaggacctaactttcattggtaaatggtaatgatagcaacccatgtgctgtgactaaggccgtgtttagttccaaaataattcttcaaacttctaacttttttatcacatcaaaacttttctacacacatgaactttcaatttttccatcacatcgatccaatttcaaccaaactttcaattttggtgtgaacaaaaacacagcctaaactgaatatgcctagatgtaacaccttatctctttgacttcttttccgatgacattgatttggatgtgatatttggcttggcttttctttttccttttttttattgtgaactgttagtttctttttggctggaactaacagttcagattatatgattgcgttgagagcttctttaaaacacaataatatagaaagcatagcaataaaatgaatatataaggttggcatatcacggcttattaaacccaacaggaacaaaaccacattatttgtataaaataactgtttggtgtctcataagaaaagtaacgaaaacttaattcaaaaatatatgttacattgatttcctattgagataatttagagaggaaatccattgaaattttggctaaaccttttgctagaaacactccaaaatatagaggaaattttcctgtcctacgaattcctttgaagcaatcatatcatccaaaggctctcaaatgttttttttaacatgtaattcctctataagatatttctttgattggtcaagcaagctagaagaatggggtggtcatctatttcatatatatacgcaggtaattttcagggcaacccattggctccggtcttaggcacaactacaaaagtgtgaggaagatagtgagcttttaaaggctacatgccgtattcttaagacaaccgttatgcaactttttatcaattttggacggaggttcacaaacagaattcaataattgtgtactcttaatcttgggttggcagtctttagtttgttttttcttgatggttggtttcgtcttttaagtttctttgaacttcactcattttaagtgtgaggttgtaataattggctgtagctttttgagcaaaggccgggatactctatttcattatctaaaaaaaaataagaatgtggtggtagatatggccacaattgaataggtggcggcaaaggtggtggtgtttgtaacgctccgcttttcgcgagacgttaaaaactaattcgacaaaatcttatatgcgaaaatttagttctttgtgtgagagtctaagttgtgccaaggatctcaatttaatcccgttgttcctcctcatcgaaatcaaaatcctccacctcaaaaattcctcttccgattcgagtctccgaaatcaaattccgaaagtcaatcccttcccttgaatcctctccaaataattgttcccattcccgaaagtatcaaactcccactttgtttccttactcgtctccttgaacccttgtgtacaagtatcaaatttagattcaaatccccttttttgaatcccgttggcgactcctccctctcatccaaatcccaattccggaagtcaatctctcccttccttgaactcgttgccaaatccttctctcgatttcgagaggatcgatcctcatccgaatcatttccttgacctcaccttatgctcccaagaacaaatacccaagtattccttttgaatattttccatgacttctccttgagtttcccttgatacatccctaaacccttgagttcgaatatcaaatttgaatttgaatccactcctaatcagtcttctctacaaaagtctattttacctccctcgggtgttgtgggccgtattccccctcagcccacctccctccctcaaccgtttctcctccctcagcctcgcacgtgcgttgcacgtgccaagccgagccgagctctctctgtttctccttctctctcggctctctctctctctctctttctttctctctgtttctctctctccctcgtcgaactccctctccccggcgtcgatttcccgtcgtcgctgtttgaatccggccgcgccctcacgtccgcgcgcgcgcgctcgcgcgtggccgaccgcccggtcgccgccgcgtcggccctgccgcgcctgccgcgcctgcgccgcccggccccgctgccctgccgcgctgcaccacgcagccgcacggccccgcgcgcatgcccgagccgctccacgcgcgtcctgccaaaacccggaggccgagctctccctctccctcctactcctttcccgaatcggcttggagcgagcctctctttttcccccttctttttccctttccccgaccaccgccggcgtcatcacctgtcgccgcctttgctgcacgcgtcgatgaccgccagctcgctctccttgaccgccaatgtcggttcttcctctctaaatcgacattgccatctattaaaccaagccgccccatctccctctcgttcattccctcgccaccaccgtgcccttgccgccttgctaccgccgtcctcgcctccctcctccattgcgcgtgctggtgaatccggcgtgtgcgcgaggagctgacgcgggactccaggcgccgtctccttccccttccccggcccgaggccggagaactcgctcccgcgtcggcggccgctcgtcacagcgtccgtctcggctcggtagtgcctctcccgttctccctcctcgctccctctcctctccttagctctgggcagtagtgcgagtagccttccagtagtaagctggcgccgccccgaccgccgccgctgctcgccgtaggctcgccgccgtcgccgcccaaactcggtagtagccgctcgtcgtcggccttcctcggtgtagctccacccaatccgactctagaaatgaactcaggaggtcgcgtagatgctcaagtccctaggaatcgagctctcgtcgcatcgtcgtcgtttccctcttttgccgccgccggcaagcgtcgccgcgattcgtcgtcgccggcctccctccggcgaatccgatccggtggctcactccctctcgtccgtcctatcgttcaaatgtactccctctctctcgaatcgtcgcgacgagctccggtgaactcggccgccgtccgccgtccatctcgggcgcctcctcctcctcctcccctttcgcccctgcccgcgtggccgaccacgtggcagcaacctcagccccgggcccgcttgaccgggtcaagcacctagtcagccgcccccaccgccctttcttctgtgcgcgcggtccacggagagcccttaggctgcgcatgggccctccacctcttggtccacccgcgtgccgcgccgtgagccgcgaccgtaaaaccctagcgccccgcgccgcatgaacccttccccgtgtgccgagtcgctgactcgtgggcccgtcccgggacccggcacgatggatccggtccacccggacccatccccctctctcttcctgcgcgccccgcccgcttgggccgcgccttgcccggccatgggccgcctcctcgcgcccgcgcccggcccattggctcgaccacgccgcgcttatcccttgggccgtacccgagccgccaaaggaagtctaaatctcatccctccttccttttcttatccaaagggattaataaatccttttccctttttcataaatcaattccttattcccaaaattccgtaaatcatttccttggtcccgcacgtcagtgacggtcaataatattcttgagaatattatttctataaatttcataaatcaatttccccttgttccacaaatatcttcctttgcccagaaattccaattaaacttccaaaattcatatctctcaatccgtagctctgattgactccgttttacttccagtatttccataaaattgagatctatttaatggcactactaattagtctaaataggatctttcttttggtctttgtttaggttttcgattgtttgcgtatagttgcggttaccggatttccgtcgatcgcgggttttcttgaagattcgtgaagcttcgtgaagaccttgagcaaggcaagtcaccctttgatcaattgctcctataattgaaaaatcaatattattttgtttgcaacttgcattattagaatcactcctataacatgcttggcctcggtttgcatgtcaaaccgacggacctacctagtagtcgcactaattcctgtaggctgtactaccctaattccttgtcgctccacccttgtggtacctcggtatccgtgctctctgagcgtgtataccaaatatcccacatacaccgttgattgtcgaaaatttgggaaatgggtttgagaagccttgaaaacccgacatgtggcgtcggtgggtttgaaaataaaatgagctgcgaaaactcgcgatgcgggggttgtgcctacgtggcactgtcccgtattcgcatataaggaccgattcctgtaggaaactcatcgaacataatcaaagtgcaaccacaaggtggaatgggacaccctggctaagtaactagtcggttcagggaaacctcgcatgccaatagttgggaaagccggggcggggtcggttggagccaaaccgggttcctggtaaggcaaggaagagaagcttgccagattaccgatcgagatggttggagtttgatttgtgaaaactaaaatgacctatatttatgtgatgatttgatccttctatgtggcatgaggtatccctgggtcggcttgggaaaggctttgttgcgagcctccgataccgacgggtgttcggaataagttcgtatcttgtgggtaaagtgtgcccctctgcagaggattaactaactgttcgaacagccgtgcccacggtcatgggcggatgtgaggtggttcccgtttcatagatttgtttgcctgtgctttgtgaaaagttgttgtggtgtgggaatcgtaaccagaatcagcctacgtggcagatggatgacctgagtggtcagaaacgaatctgtgtggttcgggatgtctgcgggcatcatagactaggcttcccgagtggaagcggattgctttgctgctgggcagctggactctgggagtccgagaaaatgagaaaggctttgggagccgattaatcaagtgaaatgactctgggagccgagaggtaatgatctgacccgggaggtcggtacattaccaattgagttgttgaaaagcatctcttaagtcgatttgagacgcgagtctcttttcagcccaaacttaacaagaagtgaatcacttagtgatttcaaaatgatttcaaacaaaggatttgcaaatcaaccttgcctctcttccaagcttgcattaaactcctaaattcccatgacttgctgagtacgaaagtactcacccttgctctatataaatatatatagttccttcgctctgaagctgaagatgaagtgaagtgaagattagggtttcgtcctggttcccagccgtcacctgtggtgttgggtgttagtccgttggctccgctgctactgctgttgttggtgtttcctcgtccgtgtcgtcggttgcattctcgggctgttctgagctgcaacctaagttaaggtaaataagtcctctatttattttaaggatttgcgatgattcatatttgtcaccgtgggtaccagcactatgtcctgggactggtaccgagatcgcggtttcgtaggaagcggttcgcgccgttattcctacgacacgcttctattaggtgccgttgtacggcggtgccggattggggtgtgacagttttggtgggagcaggagtagaggtgaagagaagggtggtggcgggggagattatgccaagtcaaatggtgaatacacaataatgaaaacaaaagtgatggtgttgggggtacggttagcaaaaccacgcggttattacatacagtaaccttttccattcttgaaaccacaataatcctcgtaccgggataaccactgcatggggcaggattacaactttagaagcctcccaaacaagccctcaaaacttaacaatccttccttgatttgtacctcatggcgcagctcgtgaacgccaccagattgaggcagccgagtccggccatcatccagaagaagcgatcaaggtgcccctcgttgaggtcgtcggggatccaccccggccggcctccggtcgccgtcgcccacgacacggcggtcaggacgagcgagctcaggtatacccctgccgcgacggcgaggaaaccaagcgccatgcacaccgtcttcatggcgggcggcgcctggctgtagaagaagtccagctgcccggcggaggcgagcatctcgcccacgcccatcaccgcgtactgcggcacctgccacacgatgctcgtcttctccattcccatccgcgcagcgcgggcgcgcttcgtctcgaccagcgccgcggcggccatggcgagcacggccatggtgagcccggcgccgatcctcagcaggtcgggaatgcccttctccctcccggcgagcctcctcgccgccggcacgaacgcgcggtcgtacagcgggatcagtgccatggaggtgagcaactcgaaggttgccagcgaggccggcgggacgcggagggagccgacgcgggcgtccatcgccatgccctgctcgacggacatcgaattgacctgcgccgtcccggtgtagaagaaggcaatgctcgcccacagaggcagcatcctgacgagaatcttgagctcttcgacctgcgtcaagctgcaaagcctccacggatcgcccgccgcctcctcatccgacgccgtcacgacggcggccttgtcgaagaatctgatcatggcagatgcatcttgagaattagtactatcggtttatcggtttataagatgttttgacttttgttaaaattaaactgttttaattttaactaagtttatagacaaatatagtaatatttacattctaaattagttttattaaattaataattaaataaacttttataataaatttattttgtgtcaaaatattactatttttttctataaactttgttaaatttgaagtagtttgactttaaccaaaatcaaaaacattttataacctgaaactaagggagtagctacaaattcaccaacagcaactcactggagatcatcggtgtgtttgatcctcttaactctttccatggagcagtcgtcctccggcacctcgtagagaagggcgacgtcggccggcggcgcgacgttgaacttgcggacggcggcgacgacgacctggcagactcttgtgaaagggctcccacggtttcgctgaaacctgtacgccggcgtcgcggcgaccaggaaggacagcccgacggcgagaaccatcgccggaatcgctaagcccagggcccacccgtagtggtcctgcaaccacaccatggcggtggtggatatcacggaggcgcagttcatggtgaataggtaccagttgaagtaggagcccttgctattgcgctccgatgggtcgccggcgtcgaactggtcggcgccgaaggacatcaggcacggccggagcccgcccaccccgaaagcgatcatgtacaggccgagaaacaagacgaattcttgagctgaagccatggccagagtcgaaatgttcttgatcagcagcggcagaagcgctgagagagacgccatgagcaagccctgcacagagcaaaagaccaaacttgaggtcccgagctgaattcatggagtaggttttaaattctcaaggggatgtggactggttgttttaatgtcactcaaatagttataaaaaaaataaatattaaaaaaacgtattaatatgtgatatatcattctacaaatatgcaagttaaaatttaatttctacatgtcacaactaaaaaaaaatactgaatatacgttaactagctgtaattcaatttttttccgttgcaatatataaaagttaaatttgcatttatatgtttgtgtaatgatacatcacatattaatactctttttaatttttttttccataatcatttgatatacaaccaacaagtgaatatcccctcaacagtatacagttactgattgtagtgggaattggttgtgactaacagcgacgccgatgcagcagccgaccaccatggtgtggtactttccccagtaggaatcggcgacgatggctccggccaacggcgtgaggaagcaggtggcctgccacgtggacacgttcttggcggcggcgacattgctctgatgcagctcggtggtgaggtaggtgacgaggttgatcgtcatcccgaagtaggccaggcattggcagaactcggtgcctatatatccaaaagcactcagataatcacatgaacaagaaattaagcacctttttcaaacagaaaacatcacaaaacacactaaattaaattaccaagaatcgagcggcatgctctccatccaccagtgcgatgcttcagcgccgggttgccatcgatgtcaagagacccatccgttgtgtatacttcttcttctgctacctgcaaccccagccaagttgaattcaggcaaggctgcaatgaaatttcaggcaaattgcatagtaaaaatagacatggcatcggcattgagtaacagcgagaccttggggtcaagcagcgccactgcgtgttcttgctgctccgtggaggccatggcgagaaccgatggagagatcgcaaactaagctattagcaccaggtgcgcgacctgattggtatactggtctacttatccaacaactctaccagaacccacaaaatgggaaaacaacaatagtttaggtgtggagactgattacagtgatatgatatgcagatatggtatatgattgctcttgcgacattgacgccttggcattttttttctggttgtatcgtcgatttctcaaacaatgacgagatcagcaagatcattattcttgtactttcgtctttggaatatattgtaggtcgtaacaatatgcgtctcgatctcatttctttcgatttctttaatcataagaatcacgatccacaccagtgtagtggaggacctgagtcatgtattgaactttctcatttattcctgtacgccacgtgcagacatatgtatatttctgtcctaactaccactgacatgacatcatctattgggttaatttgattaatgctattataaatgtgccaaattagaaaataatattaatattcgctatatcggctgggtatcacttgaattttttaaaagtgtaatcatatcatcgcaatcacgttttttatcatcagatagaccaaaatgaccccccacatatggaacccgtgtatcagtttcatcctcttcaaccctcccctttcattttacttcttcgtcccccccccccccgaccctctctctctctctctctcaagctgcatccgagcggagcggaattagaacgttgaaggccaatgggcggaaaggttggggagggtgacgctgcgcacggtgtcattgggacatgtggacactctttgggagcttttgcactgcttgcaggacggctacagcatgcgccgctctatttgtgaaagggcatgtagcctattggttgcagtgacctgagtagcacccaaagtcctgagttcaaatcttcatatgagcgaattgggttatttgagagctaagttccttgtttgataggctaagttcctaacttaaaaagactgtatatatccgattggatgtagaggctggataaaaatacccttctcttaaaaaaatgtgccgctccatgctcgacgggtgccacctcctcatccatctaagccaacgcccgcgagctcgtcactggcaagccggccacttcccatcggcactcgtgtgccctcagtgacgtcggcggccacactgcgaccatggctggtagcgagccaccaaccagttccttattgtctggttcgcgccgtgcccgctcgctcgcagcaggcatcaccaccgcgaacgccgccatcgccgcagggagtgctgcctccatggaggaccagtccggcggcttgctgttgtgctcgcatggctgtgcgggctcttggagacacggcgctgcttgatcttgacctgcgagatagacgcgacactccttccttctcgagccaacggcgagctcgagcaggctataggggcgggaggtcttgggagccaccgctatcgacgttgttgtcgaccccctcctatccgcaacattgtcgagccatatcgggatcttgttggcgagcagagagaagaaaatagaagagggaggagagaagaaaaaggtcgtgacagaaaacgtgacggagattgcatgattctaattttataattagtggcatccaaccaatatcataaatagtaatggtattttttttgatttagtatatttgcaatggcatggatcaaattaaccccattgcaccgtgtagcaaatggagaaaaaacaccaaagccctagcagcaggtggacgtggtttttctgcacctagggcctctgccgtccgatcgattaagcgattcgtgatgtatttcccaggtttcaatatacagcatgtaggtatcgtgtacgtccgaatcttaaggcgcatccagcggtaatgagcctaggtgcagcagcaggtctcccaaacaagcccagaaacatcaacaagccttcctggttttgtacttcatggcgcagctcataaacgctgcaagattgaggcagccaagtccggccatcatccagaagaagcgatcaaggtggccctcgttgaggtcgtcggggatccaccccggccgcccgccggtcgccgtcgcccacgacacggccgtcacgatgatggagctcaggtagtcccccgccgcgatggcgccgagcgcgagcgccgcgcacaccgtcttcatggcgggcggcgcctggctgtagaagaagtccagctgcccgatggaggtgagcagctcgccgacgcccaccagcacgaactgcggcacctgccacatgatgctcgtcttctccatcgccgtctgccacgcgcggacgcgcttcgtctcgaccagcgccgcggcggccatggcgagcacgaccatggcgaggccgccgccgatcctcaccagctcggagatgcccttctccctgccagtgagcctcctgaccgccggcacgaacgcgcggtcgtatagcgggatcagcgtgatggtggttagcatttggaaggtgagcagcgaggccggcgggacgcggagggagccgacgcgggcgtccatcgccatgccctgctcgacgaacgtcgagttgacctgcgccgtcccggtgtagaagaaggtaatgcacgcccacaggggcagcatcctgacgaagatcttgagctcctccacctgcgtcaccacgcaaagcctccatggattgcgcggcgcggcgcccgccgcctcctcatccgaagccgtcacgacggcggccttgtcgaagaatctgagatcagtggtgtgttcgatcctctcaactactttcatggaggaggcgtcgtccggtagctcgtagagaagggacatgtcgtccggcggcgcgacgttgaacttgcagacggcggcgacgacgacctggcacactctggtgagcgggctaccgcgggttgtctgaaacctgtacgcccgcgacgcggcgaccaggcaggagagcccaacggcgaggaccatcgccggaatggccaagcccagtgcccacccgtagtggtcttgcacccacaccatgccagaggtggatatcacggagccgcagttcatggtgaagatgtaccagttgaagtaggagcccttgctgataagctccgacgggtcgccggcgtcgaactggtcggcgccgaaggatatcaggcatggccggagcccgcccaccccgaaagcgatcatgtacaggccaagaaacaagatgatctccatggacagtgttgatgagctctcgatcagctgcggcagaagcgccgacagagacgccatgagcatcccctgcacgaacgaagcagagagaaaccaaactttgagctgaattcatggcgggacgcaatgattcgattgaattggggatcgagtcatcactaacagcgacggcgacgcagcagccgacgaccatggtacgataccttccccagtaggaatcggcgacgacggcgccagccagcggcgtgaggaagcaggtggcctgccacgtggacacgttcttggcggcggcgacattgctctggtgcagcacggtggtgaggtaggtgacgaggttgtacatgatgccgtagtaggccaggcagtaacagaattcagtacctatcagaaacagaataagcatcgcctcagtggacgaatcaaagaaataaattcttctttgttgaaacaagaacattaatcatcaacaaatcagcaactaattaagcataccaagaatcgagcggcatgccctccatccaccggtgcgatgcttcagcgccggattgccatcgatgtcgagtgacccatctgtggtgtatgcttcttcaacctgcagcaacgagaatccccagccaaagttagcactgaacttgttcaagcaagtcccaatccattcagccatgcagaaaactgaagtgcacagtgaaaatcgacataagaattgctgaggtgttcaggaagagcgagaccttgggttggagcagcgccactgcgtgttcttgctgctcgctggaggccatggcgaaaatccggtcgattgagagctcgtgaactagatgatagcacagccaccgagtcgagatatgggtctactctatcactcaatcagaaaccacaaaaagagagaaaaggaaagattcgttctactaatttaggtgtggatattagattactctggtgtggtatggtaccattcaaattgcgcttttctgacgttgacgcttcggcattttgttagtcgttgtagcgtcaatttctccaacaatgacaattgacggtaagatcaagtagaccattttttgttcattctactagctgttgcttatataatatcccttattccttttgatttattaatcatagtttttttttaaggacggatgtagtactactccctctagttctataataattgatgttttggacaaagttgaggtcaaacttttataactttgaccatcaataactttaaaaatatttagtttaaagaaactaggacaacatatatagatttgtctttcaaagcactataataaaagtaaacatgcatttatttattttgtatattataataggaaaataaggtcaaaaatatattttgtagaccgtgccattgtccaaaacgtcaattaaaatgaaaccggagggagtactagtctactacagtatagtggagagcttgtgctgtactgaggcccctgtttagttcccacgcaaaaacttctcacactgtcatattgaatgtttggacacatgcatagagtattaaatatagacaaaataaactaattacacagattgcgtgtaaattgcgagacgaatcttttaagcctaattgctttatgattcgacaatgtggtgctacagtaaatatttgctactgacggattaattaggtttaataaattcgtctcgcgatttacgtgcggaatctataatttgttttgttattagactacgtttaatacttcaaatgtgtatctatccgatattgaatattttcctctactcttggatgtgacatgcaaatatttcagtcccaaagtgacccgtgacatcatgttcttgacttttgctcagtgcagcaaattgagaaaaaaaaaactgcacaaattgccaaccatactactcctatacgtgatgtaagagtactagctagcacctcatctctttgggttttttcctccttttttgtggccgggcccttttttacattgtttttgggatttttttagccactagttttaaaagttcagattttattattacactaaccgtgccaacaaaataaagccaaaatcaggtgtaaaaagcggtagaaaagcgtgtgaccgagacggtgagggcagtacgtatgcacattgttgttggtttattagggtctcctctcgggcatgactaataacaatgtgcgacctcgaatctgatctcgggtagaagtttaggccattcccaacccaataattagaatggtgttcatagcattaaataagctgtcatatatgatgaaaaatgatgtgacaaatgaataaatgaggaaagagaagaaaaccatgagtcttgcatgagacatggtttctacacaacatccaagacatcatgtgaaataagtagcattaaatttaagtatagaataatggtgtttgtattggaagaatggagtctagtagtagtttttcgatgatgtgaagtttatgaacactatgtgtagtgttttgggttaggaatggccttaggtaggttctttccggatccggcttctctgactttggacggaaaaagcatagaagaatagtaaagtgtgcctggtgctacag

SEQ ID NO: 10362 - DNA, 94820 bp, Oryza sativa
ccggcaaaggggcaagccccctttctccccctcctttttcccttttcctcccgccggcgtcatcctccctgtcgccaatttggccgctagccggagcgtcagctcgcgccttgaccgcgcaagtcagtcctcgaaccgacattgccgtcccctttaaacccccggcctccccttacccctcctcttccattcgtctccgcgctgttgccgccgccccgtgctctgtctcgcctccgccgtccttcgccgagcgccgggagagccggtgcattcgaggacgcggaaggggacttcggccgcgccctctccttccccttccccggcccgaggccggagagattactcccgcgccgtcggcctctcgtcacagcgcccctcctcttctcggtgatgtctctctccgttctccctcctcgctccgtctcctccccctagctttcggtagtagctcgagtagaccccccgtagctagccggcgccgccccaaccgtcgccttcgctcgccgtgtgctcgccgccgtcgccgcccgagctccgtagcacccgctcgtcgccggcctcgctcggcgtagttccgcccaatccgacgatagcgtcgagttcccgaagccgcgtagatgctctcaccgacgggaatcgacccctcgtagcctcgtcgccgtttccctcttctcccgccgccggttgccgccgccgcaatccgccgccgtcgagcaaacctccggtgaatccgagccattggctcgcctccccctgtcgcgaacaaccgcccggtgtgctcgcttctgcccgtatcaccatggttcgcttcgccgctcgccgccgccgcccgccgtccattcgcggccgggtcgtcgtctaccttccgccggcctgcatggcagccacgtaggcgccacgtcggcgccagctcagcctagaccgggtcgagccgaccccggtcggtccctccccgtgcgcgcgttccaccgcgagccgtgaggctgcgcgtgggcccgtcgcatccgcgtccaccgcaaaccgcgcgcgtgcaccgcgttcctccccgcccgcgcgcgtgcgccgcgtgctccctccgcacggcgagccgagccgttgacaagcgggtcccacccgggaccgcgcgtggtgagcccggtccaccggactctctctcccctcccccgcgcgcgcgcgcgcttgggccgttttgggccggccggcccattaagctcggccgagccgccccagatcccttgggccgcaccctagccgcccgaggaaagtctaaatttcctccctccttccttttctttctcttttccaaaaaaaaagggatttaatttaatccttttttccgttagaccaaaaatccaataatcttagaaattcaatatcttcccaaccgtaaatccgtttgactccgttcaacttccaaaattcatcaaatctcgagatctatctaatggcacgcttagaggtcgttaatagggctttattttcgctgtttgttgagttgccccatttcgcgtgtagtttcggagcccgaagacccgcagtgcgaggatttcgaggatcaagccccagatctcgagcaaggcaagccacctttgaacatcttgagcctatatttgaaatctaattatattgcttgcaaaatattatgcattgataggattgcacttaatctgttgttccgtctgcaaggcagattggcagacctacctaacttgttgcatttgatccttccattgttaattgctataccatgtccccttgtaaccatccagttgtgcctcgatattcgtgcaccctgtgccagtatcgacggtcgccttcaaacttaaaatctgagtaacaacttgggtaaaactggagttttacaaaagacttggaaaacccgacacctgggtcggtgcttgcgaactaaatgaatttccaaaaccgcggaccggggaatgtaccgggtgtacggtttcccgctctcgcacttaaggaccgattccttggaatttcatccaaacataagacaagtacgaccacatgggtggaatgggacacccctggctgagtaactagcttatcaggggagccttgatgccgagagacatgtggattcgccggggtggtgtcggggaggacccctgggcttcctggcacagtatggtctgggacctaacctgttgttggtctgggacccctctcgtcggcatatggtaaacctgtatcggctttcgaaatgccttgtcatgaaagcttggaggtctcccgacgtggctgatccccacgggctgggtgacccgggttagtaatgtcgtgtgggtaaagcgtaccccctcttcagaggtcattaaactgttcgaacagccgtgcccacggtcacgggcggatgtgaggtgattcctagcgtagttttgtttgactactgcttgtgaaattgctgtgtgaaaaggggttcggtgtttgaaaaatctgcagctgatgggatcagctaggcccgggtggccgtttgaaaagttgttggcctgggtggccgtttgaaaagttgttagccgggtggccgttgaaaaagctgttggccgggtgccaaccttgtttaaattctaaagactgatacattgcacatactccgaccggacgagacgcactgtctcatccgtgtcgtttgagaagcactcacttagttgtttcagaaaagagttcaaataaaattaattgcagaaacatcagcctttccttgaagcctgcattaaacacttacttcccatggcttgctgagtactcccgtactcacccttgcactatataaataatcccccccctagttgctgaagaagatgaagcgggtcctgctgatgaggagttcttccaggagcaagccggctacaatgagttttagggtttcggcctagttcccaagtcgcgcctgtgttgattggtccaagtcctggcttccgctttccttttgtaatgcagttgtgagctcgggatctgtccgcagcccaacatgactgtacatctactctataataaagagacctctgttgctgtgatactctgtctccctgtgataccagcactgtttcctgggactggtatcgattaacaggttaatttggagcgtcacgggctagttccggtcgggactagttcggggcgtgacactttgcttccgcctccctctctctctctttcaggaccatgtcgttgccagtcgcgttcatgctattcttattttattcgttgccaacctccaccatctatggacaagacacatcatgggacacattcttccatcttcctcagcaccatttggtcgcccgagcaccggcgcccatctttcctcctcttttgtttctcacctttggttatgaaagacaatgaacattgcgtattgtgcactattccttcttggtccagtccaaccatgcttctagaccactcacataatattgagatcataaaaatagaacatgaaaaattctaattatgtcaatgaaacgggcactcatccaaaattaatggattaggttttcatctatgaggtaaaataagttttttttttcaatttctagctaatttcagtttttttctatttgctgtattagttttagcactatttgatccattaaaaatttattataatttataatttttctctgtattgaattatttatagctaaataaaaaaatggggatttagttatataattttcctaatattgaaatatcattccggccaaagttatttgcagtttcatgttgttattttattgattatattttcttcatcatttatgtctaattgtgatatatggtttaggattttaatttgtgtcaatgaatgctaatccattgcaacgcacgtgcattatgctagttataaaaaaattgcttgaaaaaaatcatattaatccatttcttaatttttaaataatgcttaattaattatactctaatgagctgctctgttttccgtcctaagggtctgatgcttggattaatgagcaatcgattgcccaacaagcacctcaccttgtggaggtagtttcagctcgactgcgacgctcccgaatggtggcggaggccatcctccataggcagtggacgagggacataatccaaggtgcactgaccatgtgactgatcgttgattacctctgtctttggccagtgatcgaggctactactctgatccccgacgtcggcgaccagatggtccggcgatggtctagtgatcatcaatacttgtcgagttcggcctaccagctcttcttctccggcatgcagccgttcccctgctggaaagagctttggcgggcttgggcactgcctcgatgtaagttcttcctctggctcgcacttcagaagagatgctggatggtggatcgactcctaaagcatggcatggcctagacacacatcctgcccttgtgcagccaagatgccgaggacgtcaatcacgttcttatctgttttgtcttcttgaggcaagtctggcagaaggtgttggccatcgcgaggctcactcttgctgcgccaatggaccaagacgacctcgtcgactggtggtccagtgctcgatgatcagtggacaaatgcaccttgcctagcctcgactctctcatgctactttgtgtcctggtgcctgtggaaggagaggaatgctcgggtcttcgacaacaacctatcctcaattcaggcggtggttgatgagatcttgcaggaggttgctgctagcatagcgcgatcgtgtaaatgtatttttcacagcttctaacatattgacatgcaaaacttttgcgtgttatgaaaaaaaatattcaggtaatgttcattcagcttctgagcttcagctcgacttctgtcagccatttcattaatcagacttgttaccagactgatgcatcacaaccctttccgacattgcactgtctgaatgacgtgcgtgtagatggttacagattgcacatttcaacttgcttgatgacgccgccctgcagctttgtctgcgaataattttacaggcatgtcgatgcaactatgggagaagttcgatagagaaatggtagtaatctgcaacaataaaacatctgtccccaaaatcagtactctgtctggtttagtggcaaaaggatgccttcttttttccctgaactcctaaagcatatactcctatataagttaaaaaagaagagaaaaaagaaagccagagaacaggccattttacaaagagagatagagaagagtgatatgatatctgcagccatcatctgattttttttctttgaacatttgccgtatccccttctggccagtctgcaaaacagcccgggccaagtcagataaccatgcgcgtcatcctcccggtttacttataataatggaaagatatatcagccgctgcaccaccacaacctatatggctatattactagtgaaataacaaagtacatatgtttaaaattgtaaaatttaccagacagggtgtagaaaatgtcccttgtaaccagcagcctccttgactccttcgttagggacttgcaggctacacctactgcagggaaaacagaacttaggtgtgttttacagtctttccttggcaaaagagatgaaacaattatctttagaaagcaacttacatgaaaaaaagaaagttaatgcaggagcaaactatccagctaaggatgccatagtacttctgaaactgttgagattagttaaatcactcctgctgacaaacaagtggaagttgttcgctgtcagaggctgagggaaataatgaagatcgtatttcatatgattcaaaaagaatgtctgtttctactgtgaagttttaactgaatgtctgaatacattgcaccaccttgatgaactaaagaagaagaaaaactagcatggcatgctgataagttttaacccgtttctcgaactaggcttacacagtgttattagttccagttcatcagacagctattttgtgcatcgaatctcatggtgtcaaattcaatgatcaaactaactagtaaaattgcagtgaaaggcaacagttttctcaaagctaataattctattaaaacctggaaccggttaaagatctgatgaacttgtatggtatcatcaaccagctttgtgtatgtttttcaaaacaacaacaacaacaacatcttttgtgtacagacgaaggaagaagcacaatccaacactaccacacctatcaacataaaaaaaaggttgtgcatggatgcaaagaaaagaagagattctgagagggataaaataggagtaccttggattagtactctctatctttgatgatcggaattgttcctcttagcttgcggcactgccttttgagctcctcgttctcacaacgacagacatctagttcttgcaatgaactcggaaggccacccttgggcagtgaacagatggctggacaccagtcgatctctaatatcttgaggccgacgagtctgtgtaacccagtggggagggactgcagcttccggcaggagtaaaactcgaggtcctggagggaggagaggagcagaagggcctcactctgctccttggtgatgcgctccacctcatgattaaaaccaatggttagcttggtgagtgatgaagaaatgaggctgcagattggtggtgcaaggacccttgcaatgtcatccgtttgaagctgctgcagccgcgaggggtcagacctgacgaagaatttgggggtcatttggatgcgaaggtctgtgagttggccatggtcgagcagagaagacaagccctcaccacttaagtccatacatttccatatggttaatctggtgagagagctgaggtttgagaggggagcaagagtctccatgcctctcacatcactcagatacatcttttgaagggaggatggaaacgggaaacaagacaaggaggtcgagtagtaggaggagaggaaagtggggcaaccccaaatagagaatgctcgtagggagtgcaggccttgtaatcctcctcctatgcctcttaagcctccttccatgccatctacaagagaatggatctgcaggatcagctctgggatttcgctgatgttcaactcctgaagttggtgaggcaagagcaatagtcctgcttcagctgacactttctcatcctctcctcttggttgttgctgctccagtccgaaacgagcatcctccaacttattaccacaaggtgatgatgacgatgccaacattgttgtcatctgcttccccagcacaccaagccctcttatcttattacatctccttgaaataaacatggagagtttggggaaatgagatagaaacaacgtcaattccttcccgctacaaccacactcaaagatctccaatttctcgattggaaactggtagctgacagtgttctcagattcaagatgtgacatgacattgcttgagtcagatatagtgagtctcctcaaacatgatagcattaggaggtattccagcggcaaaggagggcatttcttcaaatccaactctttcagatcagttagattaccaaaaaccaatctcctccagaatgcaccatctagatgttcatcctttcccttgactagcatgcataattcatattgcttattttttgagtaatccaactgctgaaaatccaatccaactccttcaatcagcgcacggcatggagagcctctccaaggaatgggagggaatgatgacagctttggacaattaacaatctcaagctcctttagtgtacggagttgggtcaagttcatctcttgctccgatcgagggcatgtggaatgtgaaaatggcaactccgtgagttctggacaatctcttatgatgagcacctttagcagagagaacacaaagcaagaatcatttccaacccattttgctagtctctgtatgccaacaagctctaacctttttaaattcggaaagctcctctctgttgtacaaaccagggattcttcaccatgctcattaatcaacaacaacttccctagaggaggaaatttgttccagtctacaccatcaagacgaagagtttgcaagcctttgatggacaagttaacacccaaccatgaagggcaagtagtgcccccacgcccattaatgtgtagctcccgaagattgctatgtggtttaagactttcaaggatatgctcttcttgtaaagaatcctttgtcaaacgtttaatatcacaatctaatatcaacttgtgtaagcgacttttgtttgaaagttctgcttcctctggtgcctgcgcattttcaagattatagatgcccaatgacccttttaggtcttccaactgccccagctgtcttagtgcaaatgcctcaacttgtctttgaacttcaaatctccttaactcttgtaaacattttagctttcccacactagcaatttcagagtgaagattatcatttgggacaagaaaatgccgcatccttacaaggtgattcatatctcttggtaaaccaaagtgaccactgcattgtctcacatcaaggatcctcaggtgataaaatcttgaaataatgttggacagacttagttcaggaaaatatcccttattaatccttaagtaacgaagatgaacaagatttgaaaagttgtgcaacatattctccacagcataagatgctacagacaacaagatgacacggagggcttttgctttacttaacaaattaccaaaaggaatgacaaagcttccattgttttttccaaatatcattagagagtgtagcttttcgacatcaagcctcttacttagtgtgccaaaatccttcttaatattttcaaaagttgctctgtcgtttacgtccatgtcatctatcacaatagataagtgccgtatagatggcggaatttgcatagacattactttagtattacttatagaaagatattcatatgatgaaaccttcaatgctaactcatgtagtaggtcatgcatagtgtagtaaggtgacccatcttcattcacatcttttatgaaaaatccataattaaccaaatcattcaaatatctcaacccaatatcttcaattgttttgttttcatcctgggaatgtaaaatgccttgccctatccacaagtgaatcatctcctcactatcaaacttgtaatcttcagggaacaaagcacaatatgtgaaacattgttgtagatggaaagatagatagtcatagctaagcttcaaagctggcataatatcattttcactagtttgtgattcccattccttactttctaggaccctcatccaatcatccaaatcaaggtgatttctcagcaatctacccaccgtttttgctgccaaaggagagcccttaagttttttcactatcttttctcctgtctcaagtaagttagcatgatcatctattgatttgtcatcaccaaaaacacatgcttggaataattcccagaactcttcaggttctagcccttccaattgtattggtcgatcaaatgttttcaccatttctgcaaccactggaaatcgagtggtgactagaattatgtttccctttgtcattgcttttctgaggggagctaagaactttttccactcatcctcattatcacacttccacatatcatccaagacaagaagaagcttcttagatttcaatctttgctcaattgaatcatccatgtcgacatatttctcatcatccttgagtttaggtatccactttgagatctcttctttcaatctatacagattgaaattgagagagacgcatacccaaaccttaacatcaaaatggttatgtacttccttgtatatgtgctgagtgagagttgtcttccctattccccctggaccaacaattggaatgacggtcaaatccttgtcacagtaatcaccccgagtaatgtcctcaataattctacttctatcacccttcctcccataaaattcagggtctataatccctgaagtagttacaggacgattcatagcaacgttgcttggatgaactagcgtttgccctggtttccttgaaaattcagcattgatactgatggcaatgcatgattccaacagctctagattaaggattgtagagactttggcacatacgggcttcaattgttcgacgatgtgcttcattcttgtggacagatccaccctatcgaacttcagctttggtgttttcatggtagatatgtgcaaggcaccggagtcatcacaattgtcaagaccaggtgcaaaagggaagcatggaaggtgtttaccaacgagatggatggtgctctgagcactgcaagcgaggatgcgcatgcagccgctgccagcaacagcctcctcttcgttggcgtggcgactcgcttcctcgtcaccaccgcacgagcaagaggcagagaggtaccttctcttgatgtttctggcagtgtggtgagcgttgagcacaaggccaaggagacagccgctggcatgctcatcggcggcctcgtaggtgccatcgagctcgtcctggatgcggaagtagtcgagctcgtcgagcacgtcgtcggcatcataggcgaggccacggagctccaggagcagctgctgcagcgcggggttgctggtttctctgccacgggtgttgtgcagcatcccctgcgcgtagagcagctccatcttgatggcgccgacgtttggcccgagctccgtgctggccgcccacgcctccacgaaccctcccgacagcgggctcagcgccttgccaaccacccaccgcgccgcgttcacggccgccgactccattgatctgtctggtctctactccgctagctaagctgaggagagtgggagggatggaagagctgtggactgcgagagaacaaagcagtccaggagtagtagagaagggaatggtgaatagcgagcagacagtgaagtgaaggactaccaaaccacggcagaagtattgtttgttttctgaaccctctgttcgaactttaccaaatggtgttctcaaaaatggatttaaaaaaaccaaagtcgtcctgctcttcttgaatctgatgccattccgtgccatttggaagataagaaaaaaactaaacgtctaatcagcccccaaaaccataattagaacgcaatagtaaaggtacaggcggtacagccaatggatttacttaaatctgttgcgattgcaaaggtgcataatgccagattcgccactgttcattcagtaaactaccgggatagagcaatttgcctgcatgtgggatgtggcacagaggaagaacagatctgataagcaacagcctgtgctgtatcagtgatcaaagtaggcatgaacagaaacctgcaagcaaccaaatggaagtaactgtagtgtagatgcagagagcttaaggaacatacgcttcaaagcgatttgcgctctgggggtgcaggcacacaagaagagtagcctcacgtacatcgtggccggcgcagcggcggcgatcgtgtggaggcgcgtgtgctcgttgccggagcaaggccggcggcgggagcggagcccctcgccgaccgcccacccgccgagattctccgtgtctaccactctcgagtctcgagtgagtctccgatggtcgagtccaaccccaacaaccaaacagtcccgcgtgcgcatgtatgcctccactccctaggccaccccaccacatgtacacacacaaataactctattaaaaaaaacccatatattttgaaacacctctattaagagaattcggtttatttttgtttcacaaaaaaatatttcacctagtatactcacaatgttttactgtgtatagatctaatgttgcagtgaactgaaatattccattgcaacaaaaaagcccacatattttggaaaccccctattaagggaattcgttttatttttttttccaccaaaaaatgtttcacctagtgtacttgtaatgtttcaccatgcctacactcccctggctcaccacgtgtccacacacaaacaactctattgcaaaaaaaaacccacatattttggaacccctctattaagggaattcggtttattttttgttccacaaaaaatatttcacctagtgtactcacaatgtttcactatgtatagatctaatgttgcagtgaactgaaatattccattgcaacaaaaaaacccacatattttggaaaccccctattaagggaattcgttttattttttgttccaccgaaaaatgtttcacctagtgtacttataatgtttcaatatgtatggatcaaatgttgcagtaaattgaaacattctttcgctatttgctgaaacattgtttttatataaggtgaaataacacccgatttaaacgagtgaaacattttcagtctacttagtgaaacaattccgatatacctggtagaacatcgtgcaacatttaaaaataattcaataataagctaaaaaaaattcgtcggaatatatccatgtgtggtcttgttttaaagatttaattgcaacgaatttaatggtgcaatcggatcatgatttggataagtaatttaagagaaaaaacagtttaaagtaattttgcacgtaaattggacgctgacgtcatgctgacattagcgcccgatttcaccccctcccgattgggcgcctgaccaggagtcgtcccatttcaggtcccttaacttacaccgaatcctattttcatcccggaaccgaaaaaccagatacaacaagtctctcaacttataaaaccggtacaaacaagatccctcaataatattatccctaattttaactcacatacacctacgtggctaatttgactaggtcttcgtcctacgtggcattgattgacatggcgcttacgtggtagtttaattcgggaaaaaaaatgaaaggagcaaaattgaaaactaaataattaaaacaaaatatggggtccccatgtcagtcaaataagataaaaatagtgggactcacatgtcgatgggtcccacttcctccacctcactctatctcctcaatctcttcaccgaggcagtgccgctatcgacgacaacacaccgaaaaggcagaggagatgcgaggggatagggtgggagccctgcccatggcgagaacgcagtcgaggtcatctccgtcgcccccaccgacgcctagctccttgtctcctctagcgacagggcgggaatggagcggcgtgctattaacaccaaaatttggtaagcccgaagtcatcatcggcatagagtcactatcggcttcagagtcttggaatcggccgatgggagttgtcaagtcgccagcaattgtgttctatatgaagtcggatcaattaaagaaaatttatccaaaagagtccgagttcaaggaggatgcggcatgacaagtatatctattaattaagaatagtatgttagttttcttttatctctagaaaagtgtgtttatgtttttcgatacctaatttataagcaatccccgttcatcatctaaaaatccaatcatattcaaaaccactttgccaataatctttaaatttaaaaactaataatctcactagtgaagtgaagtggagcggagagtaaacatactattgagtgagctgatatcgtcatatcatgcgcctgaaaaggtaaagaaaaactattgcaaagttaagaacctcttcctgatcaacaagtaatagctatttgctctcagaggctgagggcaaaaatgaagcttgcattcatatgatttaagaagaatatgtgttccaattatgaactgttaagaattaataactgaaacaagtgttacgaatagtagaagaatatgaaagatcaacaagagtacatgacttgtcaatgacacattgacttgtcttccttaaaacaatacaatctctcaaaccgtgtcattaacattttgcataagttttagttcatcagataactactttgcacactgagtctcagacatcaaatttgacaaggagctgaactaacagatcattaatttccgtgaaagcaaacaattctctcactgacagaacagctgaaagattaaaaaagagaacagtgacaaaataagtatataaccaaataaaggagcgacagcgaagaacttatatgagatgttagtgtagacgctggaagcggaacaagttgacgtcttcacacttatcaacacaaaactgtgtaggatgcaaaagattatgcagaggcgctagaataaggcccatatcaatccaagatgaaacctgcacagcaggttacaaggttgatcagatcgatgagtcaagcagtgcgtgcattttaccaaacagaaagtaatcgggtatgagttgaaaaggggcatgtttgttacctgtaccttggattattagtactttctgtcttggatgatcggaatggttcctcttagcttacggcactgtcttttgagctcctcgtttttgctctcactgacatctaatacttttagtgatctcggaagaccgcccttgggcagcaaacggatggctggacacaaggcgatctctaatctcttgaggcgggtgagcctgtgtagccctgttgggaggaatcgcagcttcgagtaacaccaaaatcggaggtcctggagagaggagaggagcagaagggccgcgttttgccccttggtgaagtgctccacctcgtcgttccagccaatggttagctcggtgagtgaggaagcgagaatgttgcagacaggggcaacaaggagccatgtgatgtcatccgtttttagttgcaataatagcgagaggtcggatccgacgaagaagttgggggacctccggacatctagctctttgagttggccatgggcgatgagagaactcaagccatcagctcttaaatccccaaagtcccatatggctaacttagcaagagaattgaggttagagaggggtgacagagtattcatcccactcatataactaagaaacagttcttgcagggaggacggaaatggggaatgatgcgaggaggacgagtaggaggacaagaaattggggcaattccatatattcaaattttttatggagtgcagaccttgtaatccttctcctacgcctctgaggcctcctgccgtgtcaaatactaatgccagctctgacatttccccgatagtcaaatactgaagttgctgaggtaagagcagcagccctccatctgcggctgctttctcatcctcctctcctggttcttgctgctcctgtccgagacattcatcctccaacttactaccagcagacggcaatgacgatgctgacattgctgtcatcccctgcttcgccacaccaagccctcttatattctcacatccccttattacaaacattgagagcttggggaaatgggatgacaacagtgtcaattccttcccgctacaactacagttaaagatcctaagtttctcaacaggaaattggtatctgacagtgttctcggctttgtcctgcaacaagacattactcaagtcttgcatacagagcatcctcaatgatgacagactctgtaggtgttccaatggcaaaggagggcactttgtcaacgtcaactcttttagctcagttagattactgaacaccaataacctccagaatgcactatctagattgtcgtcctttcccttaactagcaagcataattcagattggttatttgttgagtaatccaactgctgaaaatccgatcccacttcttcaatataagcatggcatggacagcttgtccaaggaatgggaggcaatgatgacaacttttgacaatttacaatctcaagcttctttagtgtagggaattgggtcaggtttgtcccttgttctggccgagagcaagtggtgggatgtgaaaatggcaactccatcagttcagggcaatctcttacgatgagcacctctagcagggagaacacatggcaagcatcatttccagcccattttgacaatcttggtatggcaactagctccaacctttttaaattcggaaagctccgatctgttgtacaatccaaggatttatgaccatgctcattaaccaatgacaactcccctataggcgggaaattgttccagtcgacacaattcagacgaagagatttcaaacctttcatggacaagttaacacccaaccatgatgggcaagtggcgccaccatgcccattaatgtgtagctccaggagattgctatgtggtttaagattttccaggatatgttcttcttgtgaaggatcatttgtcgaacgcttaatatcccaatctaatattagcttgtgtaagcgacttttgtttaaaagttctgcctcctttgctgccttcacattttcaagattatagatgcccaatgatccttttaggtcttccaactgccctagttgtcttaatgcaaatgcctcaacctgtcttttgacttcaaatctccttagttcttgtaaacatttcagctttcccacactagtaatgtcggagtggagattatcgtatgggacaagaaaatgccgtagccttacaagattattcatgtctcttggtaaaccaaagtgacccctgcattgttgtaaatcaaggatccttaagtgataaaatcttgaaatggtattgggtagactcatttctgggaaatatcccttattaatccttaagtagcgcaaatgaataagatttgaaaagttgtgcaacatattttccaccacgtaagatggtgcatacaacaagacgacgcggagtgcttttgctttgcttaacaaattaccaagaggaatgacaaagcttccatggtattgtccaaatagcatcacagagtgaagcttttcaatatccaattgcttatgcagtgtgctgaaatccttcttgatgttttcaaaagtcactctatcatttacatccacatcatctatcacaatagacaagtgccgtatagatggtggaacttgaatagatctcacattagaactacttatagcaagacattcatatgatgaaaccttcaatgctaactcatgcagcaaatcaggcataacgtagtaaggagacccatcattttgttcatcttttttgaaaaatccataactaaccaagtcattcaaatagttcaatcctatgtcttcggttcttgtattttgatcatgtgaatgcaaaatgtctagtcctatccataagtgaatcaattgctcactgtcaaagatgtaatcttcagggaacaaagcacaatatgtaaaacattgttgtagatggaaagggagatagtcatagctaagctttaatgccggcataatatcattcttaccagtttgtaattcccattctttactatctaggattcctgtccaatgatcaatatcaaggtgctttctcaacaatcttcctacagtttttgccgccaaaggggagcccttcaattttttggctatcatttttccagtctcttgtaagttaccatgatcatttactgttttctcatcgccaaaagcatatgctttgaataattcccaaaacattttaggttccagcccttccaattgtattgaacaattagttgttttaaccatttccgcaaccgctggaaaacgagtggtgactacaattatgtttccctttgattgtgcttttttgaggggtgctaatagctgcttccactcatcctcataaaccaaattccatatatcatccaggacaagcaaaaatctctttgatttcaacctttgctcaatcaaatcatccggccaaccagagttctcttcattgacttttggtatcgacttggcaatctcctctttcaatctatacacattgaaattgagagagacacaaacccaaatattaacatcaaaatggttttgtacttctttgtatatttgctgagtgagagttgtctttcctatccctcctggaccaacaattggaatgacggttaggtccacgtcacagtaatcaccctcaataacgtcattgataattgtacttttctcaccctccctcccataaaatttaggttctatgaaatctgaagtggtcacaggacgattcatagcaatgctgcttggaagaacaactgcatgccccattttcccagagaactcagaattcagactcattgcaatgcactggccaatgctgcggtttgattccagcaactccaggttaaggatggtggcgaccttggcacagactggttttagctgctcgacgatgtgcttcattcttgtcgacagatccaccctatcaaacttcagctttggtgttttcgtggtgtgctctatgtgcaatgctttgcagggataagcgcagcagaggaaccggcttctttctgtagaaatgtttcaacggtgatgaaggtgtcacagccgtcatgttcagttacaaaagagaggcgtggaaggtgttttatattatcgatgagatagatagtaagtagtacctcgagcattggaaaagagcttgtgaatacagccgctgcctgcaagtgcctcctcatcattggcatggcgactctcttccccattatctccgcatgagcacgccttcttcttgatgtttctgactgtgtggcgtgtgttgagcacgagtccttggagacagcccttggcgtgctcttcggcggcctcataggtgccatcaagctcgtcctggatacggaagtagtcgagctcgtccagcacatcctcggcgttgtaggcgaggccacggagctccaggagcagctgctgcagcgcggggttgctggtctctctgccgcgggcattgtgcagcatcccctgcgcgtagagcagctccgtcttgatggcgccgatgttggggccgagctccgtgctagcggcccacgcctccacgagccctccggacagcgggctcagcgccttgccgaccacccaccgcgccgcgttcacggccaccgactccattgctctgatccctgcaccgctagcaagctgggttagagatgagaagcaagcagtggcagacgtgtaggggagaagaggctggaatgttactctggctaagagagaagcaagcaagcacactggcacagcgaatagagaagggctaaggaaacgtcgtgcagactgcagagttgagatccgatcggtgtcagtctggctgggcaaattggcttgagtgtaacatgcttaggcactacggcactaccttgccgcatttttatttggaatcagaaatcagtaacatgttctccctgcatggcttgctggctgcaatcttcagaggcttccctatttttgcctgcagcaagaatgttagaaatgcgtggttttcgttccagtcatccagtgccggacaaagcaaaagtagttttgcaggcttacagtacatctgtttgctgtgcaagtactgcagaggcttcaaaaggaagaaaaaaaagaaagagagggtgttatgaaagacaaaatggcaaggtaacagttatacaacaaagaagaaacaagtgttggaatattcagaccgggaagaaagcacaagcattcaaaatttctcaataaaaattaaactatccttactggggtaatctgttttccatttcttataaaaacaagcaggtttattttctacaatgacacgccatatataattctctgcagctacagagagtgtatacaatgatagttaaagataacttaaactcacaagaatacacgtaccttttttttccttataaaacaggcagtttatttttttcatcaaagtcatcagaacaccatggcaacggaacagaggtgcagacgttgcaattgaaaacgagcatcatgccgcattccccggtttgttcagttgaaacgaccatgatctggcataggcctcatcttttcattgaacaatattaaagctgccatataaccaaataattgatgggcaacttgcccactttcaaagcaattaacatggctgtacaacatgtgctctccttgagcgcagttgactatccattaggttctactaataatcagaaatctccgatcagcatcagtattcattttctaacttcagtttttcttgttaccacttgtgacctcctcttggcttagaacaacatgccacattcaccaaacgccagagtaaatatcaagaaagcaacacctttctggatccactaaaccatcaactgcgttggctgctatctcttcatggtatgttcatgcaggttgtgatctccaggttgccattcatgcctgcaacatcagtatgaccatgatctgccacttgccgcttgtgcaggttctctccagaggtgccattgcatgtgtaccattgccatttcaacagcaatatttcaggcttcacttataacacctcatcttttataaaaactttgatcttcagctaccacatgcttgaccacttccctttcggctcttttggtacttacctacttatcccacataaacttcatatcatctccaaaaaaaatacaaatttgaatgtgtatttcttggaagctacaacttcagttgaccggactcctaggccgctcaatttgaaggaggtggtttctggcgcccccaaagcccaccccatagccaccctccttcccacctccttcctttttcctctcattttcctttttccctctctttctactccagatccgttttcttgcgtttttgaagtcgtctggcgacttggtggtcgtcgggctggcgagggccggatccgcctatggcgcccctggagaaatacggattggaaggcagctgtttagggcaatgtggcggcagggaggtgtgctggttgcgctggtcaccggttgctacttgcgtctcctgcatgcgtgcggtgggatggcggatcagttgttggtgacttgatggctgtcatgctgatgaggaccagatccactggtggcgctccaaaaaagcttcagatctgatggtggtcgttcagggtggtacggcggatggtggacggccatgctatggcggtaccacctgatggctgtcgaccgacgtgacagtggtgatggcattggtggtggccgagggaggtggcagtggaggcggttaccagtcggccttgcactccatcgatgtgtggtcgtgccatcgtggttgtggtggcagcgaggactggtggcatcggcactcctgatggcggcgacgggcagtagtgaagttgggtggtgtcgggggctagtcctccgatccatcccttcctctgtcaccggaggagagggctggtgatgacggatagtggtgggggctagcttccccctgcaacgacggatcaacaaataggtatggtgatagttgtggacttgtatttcggccatggtagtttgtgatgacgatggcagatgctctcggtgtcagcatcctagggatggcagcgacttgacgaggtccgatgcccggttctgaccatgaccaggtgaggacgagggatggtgatcgtcgatgacagggctagttgacgatgcaatggtcgtcggctcgcccaacgcggataaggacgatggcaatggaggctcttggtgatggcatcctagggaaggtaggtaccaagtgagcatcggcgccaaggtctggttgcggttaggggtcgacggcagtggagcatctttgacaagttcttgattgtaaaggcagcgcgtgtcatactaggcggctccacgacgctctagaagcgacagtgagatcgatcgtctacagagaagactggtggtgcggcaaggcggcttcgtgacgcactaagggtgttcaaaatgcggctgcggcgtaggtgttttggatggcgacggcggacagagggcataaatgttggtagcagatggtggttgtgttccgtagaggcagagatggtgcgatgataggtagctcggactagtttctattctcctctttccccatattgcgctgcgacggaaagaataagtcatcgatgaaggttggagctaaatcttctaggtttttttttgtgtgtgtgtgtgtgtgtttagagtctaagaactcatgtatatgttttggttgtgtatatcctttgtggatatagaggccggattaatgaaaaatccattatctaaaaaaacctacttcagttgaccttatagcacaatctcatgctgattcctttcaaaaacttcagttgaacttttctcctcttgcagggtacttctccctaaaagctgcggcaactctgaacttgattggcatatgcattgttgcctactcaggctaggcagtgaccttctagaacaatgcagcagataagcaaagaaggctaaaatctcaaaaagaatgtgattaatgtatataaataaaatgcaatataacttgaacaagtaatatgcaagtctctgctgcagcatgtaatgtcatgcatcatgaattttttgccgagacggccgaaggaggtcacccaaattgtattaaggagaaagagagttataagttttacattaatcgactttagacagtcgaggaaaaaaagcggtcaccatagggtgacgcctctaagagctcttacaggcactgattaatctactcgcttaaagatctctgcttcatgaatagaggatatgaaaatatggttgtgccataacttcattgattgattagaccatatgtatatgtcaacatatactgtactagacctgacgaatcctagtttgtgcaccatgcttggtgtatgccctagacaacctatgggggaaaaaatcaggtttctaaaatggaaacgtccaatggaacttctttatcagcttgagaatatacatatcttcgctcgtgaccagtacgataccagcttcgtccatttggcatgttggataatatcatttgagcaactgatggttccaacaaaagtattactgtctctactaattagtaagtgaatggctgacttttgaactaactgttcattgtgttcgatgaggatactaaacccagagatcaagacatgcatgaccacccaaaaacatgctactcatagcatacactgcatgttacagacaccgttttatatgttaatttaacaattcaaaacaaagtaagcttttacctgcattctggaagttaaaatggagaaatgaaggatccaatcataactgattgtatatgaagatattggatgtgctctaacagaagctcatgttcttaaaatagaacttccatgcagacattgtgtccagaactgaagatagtgtcaatttcaactaaactgtttacatggacatgggaacacaatatgagatctgttcagttgatcctagatagaataagggagcacagaaagcagcatcatagtcatgctattgaaaccaaaggaattcactattctacctcggttagttggttggccacttggccttaaacaaaccacaaatcgatgcgtactaaactgcgaactatttttctataagagctaagtgtagatgtagacatgaagaactgattgactgtatgcatagaaaaaaaggtcattgaggcatccagactccagaaaatgctagctttaaaaaaaatccccaaaaagaagagatcctgaaatcccctttctgccattgctgatgctgtaggattacttggacaattgctactgctaataactgctggtactactcccaattaagcgcacacaaatgaacctctcgtaaaatgtgcactacaataagcaataacacatgccgcatcagtaaccaatacagccatgaacagcgaagccaaaccaaaccaaacggaacttacgcttcaaaagcagggtggattctggagttccgcacattgctgccggggacgcggagcgcggattctgcgaagcccgtggaggcgtcccgcctagagccgccggagcgcggcggtggctgaggcgggcgccgcctcaccgcgtcgccgtcgaccgccatccgccgcgagaaggagccacgccgctcgggaggcccgagacggagagattttccgctccgcatctccagcatgcaaatgggccgggctgaaggcccaattaaggcctcactcctttccgacggcccagtatttgggctcaccaacctctcctatattgcactttgtctaccattgctggacagcagtttttgtatgcgaatgactttattagtactggcatatgtcaaagcaattatacgagaagttggatagagaaatgttaatctgcaaccataaaacatctttagtgcactttttttcttataaaaacaatacaaacagttcatatacaagcgcacactcccacatataatgcacacctgtcacgtttgatagcaacaagatgccaacgtttttccctggagcttatggatacataaaaaatagaaagtcacccaagtcttaatacaatgatgcgtaatatttatgcgaattctccggaaaaaaaagtcagagagaatgcgttgccaagttcatgatctgcagccatcatcatctgatatttctttgtgcattgcggtatcgccgtccgtccaggctccaaaacagcccaggaacacatacgcccaaccaagtcatatccagcgtcccagaggcactgaaaattttcagaatcaaaatagatcaacaccccccccccccccccctctcactgtctctgcatccactcacctgatttaatttgaagcttcaatcaagcttcccgtatacatagagtacattcatatgcacagaactggattcaaactagttttttttagataatggattcaaactagtatacatagagtacatgtacatacagcataactgctgttggtacacacaacaggagtgcccgaatggattggctgtgcacttgtttagcagcacttctgattttctttttgattgcaacacttctaacaggatgactaagatcctgaaaaaaaaaacacatacaaaagggcatgtggataaataattggagtgaactcttttgttttgacaccaccaaggtgtaaccacaagacaattcaataagctcgtagacaactgctagtgaaacaacaaactgcacacaattctttagacgacactgaactgcagattttgtaccaggcaaggatagggatgaagattgaagaaactgtaccttgttacgaggtgattgcttgttattgtaggaatgacatgccacagccactgcaggcagcagaagaatcatgttctgaatgtttgaaacaacgtcccagcgaaaaaatgtttgaaacaacgaaacttgtgcgttgtggggaacggcgtgaaggccttgttctgggaggataactggctgcagggagaatccatccgctgcaaggcgccggctctctatgctgctatcccggctcgcattcgcaaaaaaagaacggtcgcagaagctctgtctgataggcggtggatcaaggacatctctggtgcccttggtattcaagccattcttgagtatttatccctgtggcaagacattcgtgcagtgcacctcacggaccagcccgatgtgctttcgtggagatgggaggggtcgggcaattactcttcccgatcggcttatcaagcattgttcctagggataacccggttccagtctaccccgatctggaaatctctcgctccacctcgatgctagtacttcgtctggttagtggcgcttaacaggtgctggacgggtgatcgattgaggaggcgcggactgccacaccccgaccaatgtgtcctatgcgatcaatgcgatgaaagcatcgatcatctcctggtcgcttgcccaaagtcccgctagttgtggtggatggcactgagggccattggacaaacaagttctctgccgacgaacgaagtctccttccacctctagctttgcgatagccgaaagagattgaccaaggcagctcggcgtggtttcgacaccattgcaaccctcgtcgcctggacaatctggaaagagaggaatagcagcgttttcaatcagcagcaaaagacttgggcggaagtggcaagggcaatggccgccgaagcagaactctggagacttgcgcgagcagccattccggagttcttgccacagccaactgtcgagaggtcgcaacatcggataggagaatagatcttttggggcaattgtattcctgcatctccccttcacttcttgtatttcctgtaattaaactttttttccatccttaatacaaatatgcgctccttgcgtattcccaaaaaaaacgaaactttagcagcacctttcacaaaatatatctgaacttaaggagccgagcaaaactaagtcagctgatttatatcatgtgcctgaaaaggttaaaaaaactatggcagagttaagtaccttaccgcttcctgatcaacaagtgatgagttatttgttctaagaggctgagggcaataatgaggcttgcattcaatgataaagaatttttgcctactgtgaaatgttaagaattactccactgtgttaaattgaagaatatgaaagatcaaatgacatgcaaatgacatattgacctgcgttccttgaaacaatacaatctgtcaaactgataacatattgtataagtttcagttcatcagaaactagttattttgtacagcgagtctcagccagtaggcccagagtcggcccagtatcaaatttaacaatagcaagatcgtcgacggacagtgtcaatggcaggaggtgggctccttgcggatggcacaatagcgatgacatagcagagtactggagtagccagggcctgggggtagtttcagtggtcgggatcagtgttttttctgttgcacaggtcccggccttgcctgttgtgattgaaatcactttgtaaccttttctcctccaatctaataaaatttggtcggcgtccttcagccatgcccagcgataaataaattaccatgaaatcccacaattcttttttcgggaatacgcaaggagcgcattttttccattaagagaaataaaagttatttacatttgaaagaaaaaaaaacagcacgggactgatacaggacaataacagacaatcctaagtctatctctcacgctaattttggcgaccaaactccctcctgaattacagcgcaaggatcgccgggtttgctttacgccaaagagaggcttcgtccaccatccctctggccacatccgcccaagatctacactgctgattgaagatccgaccgttccgttccttccatattgtccatgctaccaatgtcaccaccgtgtcgaagcctcaacgatgtgactcacttagcaccattctgctatcgcacatccattggtgaaaagaagcttcattcaccagcaggcagttggggtggccgattgctctcaaagtccaccaccaaagctgccttgattctgggcagccgactaggatatgatcaatgctctcatcctgctgatcacagagaatgcagcggtcgggatgcggcaatccccgactccgcaatcggtcggctgtccagcatctattcaacgcgaccagccagaggaagaaatgacagcgaggtggtgccaacgagttctagatcggtgtggattcaaaggcaattcgtccaaggaacaaagctcggtaggtagattttgaagtgtatttgcttgagctttcccacttccaggagagtgagtcgggctctgcggaagaacaatcaactgactgaatcagcgaccaaagtttgaggtattcgagtattgcctgagtcccaagcgcgccacttatgtccttgatccatctacggttagacagcgcttcagccaccatccggcgcttccggatacgagtagagacatgatcgtagatggagggtgcaatagctcggatggttcctccttgcaaccaattgtcctcccggaaaaggattgtttgctcgttacctagctgacagacggtggaggcggcgacaaggtgaagttctttctgtgtgcaggggattaaatcccacaattctctcactgccaatacctattcagaacagctgaaagattgcaaaaagagaagagtgcgatcagacagataaccaaaaaatgagcatctaaagcatcagatatgaactcgtatgaaatgacagaccagtttttgtacacgtgatggaagcagcacaagttgattatcaactcaatggagatggatgcagagaagattctccaagactagaataaggcacatactaatccaagaaagaatctgcacaggatttcagaacaatcaggtttttcaggtagatgaatcacacagtattaacgttgcgccaaacagaaagtgaaccgggatggctcaaacaagagaatgttcattaccaatcaaatcccagtcgctgtctttgatgattggaatggttcctcttagcttgcggcactgccttttgagctcctcgctgcctccagagacatctagtatttctagtgaacttggaagaccactcttgggcaacgaactgatgaactcactgcacgagatctctaatctcttgaggctaacaagcctgtgtaacacagaggggaggaactgcagccggcaaaaactaaaactgagctcctgaagggaggagaggtgctcaagggccatgttttgctccttggtgaagcgtttcacctcgttattgcaaaaaatggttagcttggtgagtgagggggagaggagtctgcagatgggcacaacaagcactcctgcgatgtcatccgttacaaggtgctgcagtgatgaggggttgatcccgacgaagaatttggggttcttgttgactcgcagccttgtgagttggccttgggcgagcagagaacacaaatcctcgcctcttaaatcaccacattctatgcctaagttggtgagagagctgaggttagagaggagcgacagagtctccatgccacttacacggtcaatagacagatatttcagggaggaaggaaatgggaaagatgaggaagatgatgagtaggaggagaagaaatcagggcaatcgataatagtcaatgatacgagggagcgcaggccttgtaaccctccttctatgcctcttaggcgtccttccatgttttctccaagtgaatcgtggtggaggatcagctttgagcaacaggagatgaacaactcctgtagctgggtaggcaagagcagcagtcctgaagatgccgctgctttctcgtcctctcctcttggctgttgttgctcttgtccgaaacgtgcattctccaacttattaccagaaagtgatggtgaagatgccgatgttgccgttatctgctgctcagccacaccaagcattgctatcttctccaatctatacattgtcaagtcagagagtttggggaaatgggacagcagcagcgtcaattccttcccgctagcaccacactttctgatcacaagtttctttactggaaactggtatctaacagcgctcccaccttcaaccatcaacaaggaactacttgaaccatttatttcaagcttcttcaaacatgataacatctggaggtgttccaacggcaaaaaagggcattttgtcaagatcaaatatttcatctcagttaaattactagatgcaagtacttttgagaatgcacaattcagatggcccttctttcccgcaacccacaagtgtgatttagattggtataaatttgagtacttcaagtgctgaaaatctgatctcacttcttcaatcagagcacggcatggagagtttgtccaaggaacgggaggcaatgatgatagcgttgggcattttacaatctcaagctcctttagtgtagggaattgagtgctgtccatctttgaatatggcaactctataagttctgggcaatctcttactatgaacacttctagctgagagaacacacgggaagcatcatttccggtccatttttctagtcgcggtatgccaactagctctaacctttttaaattccaaaagctttggccttctatacaactcaaggatttttcactgtgctggttaaccaaccataactcccctataggtgggaatttgttccagtctagaccatgcagactaagagattgcaggcctttgattgacaagttaaaacctaaccatgatgggcaagtggcacctccatgcccttcaatttgtagctcctgaagattgttatgtggcttaagactttcaagaatatgttcatcttgggaacaatcctttgttgaccaatgtaatattaacttgtgcaaatgacttttgtttaaaagttttgcttcgtccgccgcctgtgcattttcaagattataaatgcctagtgttccgttcagctccaactgtcctaactgtcttaatgcaaatggctcactttgtcttttcactttaaatctccttagttcttgtaaacattttaacttacccacattagcaacgtcagagtggagattgtcatcggggacaagaaaatggcgtagccttacaagattatctatatctcttggtaaaccaaagtgaccattgcattttcgtacatcaaggatcctcaagtgataaaaccttgaaatggtgttgggtagccttatttctggaaaatatcccctaataatccttaagtagcgcaagtggacgagatttgaaaagttgtgcaacatattctccactgcatatgatggagtagacaacaagatgacgcggagtgattttgcgttacttaacaaatcaccaagaggactgataaagcttccatggaatcgtccaaatagcataaaagagtgtagcttttcaacatccagtctcttacttagtgtgctgaaatccgtcttgatgctttcaaaagtcactctatcatttacatccatgtcatctatcacaatagacaaatggcgtatagatggtggaatttgcacaaaccttacgttagaactactgacagcaagacattcacaggatgaaaccttcaatgctaactcatgtagtagatcatgcatactgtaataaggagacccatcttcattcacattttttttgaaaaatccaaaatcaaccaaatgattcaaacaactcaatgctatatcttcagttcgtttgttttggtcctgatgtgattgtaaaatgtctagtcctatccataggtgaatcaactcatcactgtcaaacttgtaatcttcagggaacaaagcacaatatataaaacattgttgcagatggaaagggagatagtcatagctaagctttaatgctggcataatatcattgtcaccagtttgtaattcccattctttactttctaggacacttgtccaatgattgaaatcaaggtgatttctcaacaatcgacctacagtttttgctgccaaaggggagccctttagttttttggctatcatttctccagtctgttgtaagatagcatgatggtttattaatttctcatcaccaaacacatatgcttggaacaattcccataactcttcaaattccagcccttccaattgtattggacgataagtcttttgtactatttctgcaactgctggaaaacgagtggtgactagaatcacatttccctttgtttgtgcgtttctgaggggtgctaatagccttttccaatcatcctcattactgcaattccacatatcatccaagacaagcaaaatcttctttgacttcaatcttcgctcaatcaagtcatctaggtcacccagttgctcattctcatctaggtcacccagttgctcattctcaactttaggtattgaatcagcaatctcttgtttcaatctgtacgcattgaaattgagagagatacatacccaaacattaacatcaaaaaggttctttactgctttgtaaatttgctgagtgagagctgtcttccctattcctcctggaccagtaattggaatgacggtcaggtccttgacacagcaatcaccatgagttatgtctttaataattctatccttctcacccttcctcccataaaattcaggctctatagtcgctgaagtggtcacaggacgaagcatagcaatgctgcttcgaatggtgcgatttgattccggcaactctagattaagaatggtagagactttggcacagactagcttcagctgctcagagatgtgcttcgttcttgtggacagatccaccctatcgaacttcagctttggtgttttcatagtgtcctccctctgtgatccccactgtttttcttttctaggcatgtgcgttgcagtagagctgtggtcgatatcagtagagccggtgtcgttgtcgtcttcatcggtacagtcgtcatcggcatcatgttcaccagctaaagagaggtcactgccggcaacagctttctcgtcacctccgcccgagcaacaagcagaaaggtacctcttcttaatgtttctggcggtgtggcgggtgttgaggaggaggccatggaggcagcctctggtgtgctcgtcggcggcctcgtcggtgccgtcgagctcgtcctggatgcggaagtagtccagctcgtccagcacgtcctcggcgtcgtaggcgaggccacgcagctgcaggagcagctgcttcagcgcggggctgcgggtctccctgccgcgggcgttgtcgagcatcacctgcgcgtagagcagctccagcttgacggcgccgacattggtgccgagctccgagcaggccagccacgcctcgacgagccctcccgacagcgggctcagcgccttgccgaccatccaccgcgccgcttcaacggccaccgactccatcgatcccaacgtgcgctgcagccggaatcgcgcgagctgcacgggcgtaggagcaaagcaagctgcagcaaactggtggaggagtagtggataagtggagtacacaagtgctagctgaacagctcgtcagttcttgctggcaatctcaacttgtttgttgttactactctgcagtggaggacccagcatggcagcatcaactagtccattggttgctacttgcaagtggaaaggtaatgtatctgggagatctctcagttccttcggtgaattacctggatatggaatttacctctcgtcactgcacaatcttgaaactaccgcctgaggacaccagttccagaatgcaatagcttgtcaggcttgccgacagaagtgtgtcgttccatgcatcatctaactgcaagtctgcaactgatactccctccgtcccaaaataagtgcagttttgcactattcacgttcaacgtttgatcgttcgtcttatttaaatttttttatgattagtatttttattgctattagatgataaaatatgaatagtactttatgtgtgactaaatattttcaattttttcacaaaattttcaaataagacggacggtcaaacgttgggcacggatatccatagttgcacttattttgggacggaggtagtagtttgattggacagctccatccatccagtagaactcttgtttgcacaatcaagaagaacatagcccgatagatccaacagacagttaaccaggctgcagtgtgctctgggtctctgtgcagaataatgttttctaggttgccattgttttctgcagctccagaatgccagtggtcttgatcaagcaggcatgtgcctgttaaaggctgtctaagcaggtgctccccaatgattgctggtgcaccatacggagtaggccttttgcaccagcagcatttggcttcatttgcaatgccttaatatttgagaggagctctgctcttgaccaatagcagctgccatttgcttgatccacagagccctttagggaggctcttatggtaatgatcccacacagtcttcgtataatctccaagaatcagatgtgcatcagtgcatgtccaagtcttcgaagctgatattttggttgccattttctccacctgtttccaaaaccttgatgggcacttctaacctgacaaatcctagttgtgtgccatgcgcccatgcttggcataatggcatatgctagaaatagaaccacacacacacgcacgcacacactcgaaaataggttttcaagaataaaacagtaagaagattgtcattagcttgcaactcactgtctctcctaaatcctagtcagtgcaacccattgcctgacttgtactaaatggttcatgaggattgcctgactcgtactaaatggttcctgaggatactaaaccaagtgtgaaaaagttataagccaaagtttgaaatattgtgaggatcagaagtctatatccttacatgctccagttgatcactaaggcactaaacactcaatagtaagagcatacactgtgtattaattgccgccttctatattctattttaccagtttattttttagaaaacgggtaaaaccgggcctctacatccaacgcggatgtatgcaaccaaatactttaccaattcacatcaaagaaaccttaaaatgcattctgtagtttaaaatgagaaattaaagccatgcagccaatcataactgcatctatataaagatattgggatcgatagacaatggccattgggttcagatagtgcctatttcagctaatatgtttacatgggagaacaatatgagagccattcggtttatcctagactgaattgcggatggcagaaagcagaatcatagtcacggtatggaaaccaaaggaattcgctcttgtacctcatgtattaactatttctctaagctaaaaatgtaatgaatcgtccaattgcagaaatgaaccatcgattttatgcattgaaaaaaaatcactgagacattctagctcctaggacatgttagcttgtggcacctaaaaattccccaaaaggaagagatcccaaaatccaatcccttgattcccttctgcatttgtagatgccaggtttacttgcgctgactactatcaaacatacacgtgaaagtaaatagcaaaatggacatcacaatcaaattcaataagcaataacacatcctccatcactggcgcatgaacagcaacgcggaaccaaacagaaaccgctgccataaatgggggagatcaacatacccttcaaaagcggagtggtctctgcgggcgctcgcagcaacagcctcgcccacacgttgctgccggcggcgccggagcgcggcttccacgaggccgtggaggcaccccggcccggccacccgccggagcgcggcgagacggaggcggaggcagaggcgggcgcccacctctccgcctcgccctcgccggaaggaagccagtaaggctggaggcccgtgaccagagagagattttctctcccgcgtgccaacgggccgaaactaagtggcccacgttgaaggactccaatcatccggcccagtatgtggggcccacaaaccgcccggttgtcagcatgggccaggaaccgccatgcgggccccaccctcctcgaaacccgcgtcgagtggggacacacggcgttggactggcccgcgggtgaaaaggccacgtcgagccaagccggcccacgagggcggcgacgacgcgttggcgttggtgcggcggggaggcaacacgccagctgtcccgtctccttccggccggcggcgaccgtgcatgtgactgacgctgcaatgcccgggctgtgtctgtgtgcaccgccacgccacctgtctctcgcatcaccgtcacgtcaaggggatgcatggctagtggggtccacatggaggtggcacagggaatatcggcctggtctactacgagtaatctcctccaatcatcgctatctgatctgattaagcattagcagatgaaaattgctatgcatattatcccattatttgatggggatttgattcatgtagaatttgatcaatggttataaatgttgtagagcatttggataatctatagttgcgtgtttatgttcgtacatgagcaagatttcgtattcatgcttgcataatggcattgcacatttgcgtgcatcggcgtatgctgcgttttacgggtgccatcgtttggcatatcggtggaataagtcaaacggcatatttacaaacgaaaagtaatttgtgaataaaatttttatatatgtattcttagcgatctaaaagcaaagactgaaaaatatacttcgatgaaaaaaaatcccaaaatcaactcaaaatttaacgttgaaaattcaaattctgactgataagcatatgaatatgctaaacgatggggaccgtagtattgtagtattgttcttacatggtgtttccagtcgttagcggtcagaatccggttaaccttaccaactggaaccaggatgtctctcctctgtgcagcgttgaccgcatgttaattgcagcatgttcctgtgcctggtgccagagaatttccgcagacaaattcaatccatacaggtaacggtctagaccaattcgcaagtactactagtagtagtatagttctagcaaattattttccattttagaattgagattattatacagtacaggaaaatacatagttgagaccaaatcgtacgtgcagggcagattcggccataactttcacacaattggagtacagtacagccgtgcatgcaaatgaagtaggagtaagtcttgtccacatcgtactaatactaaaaatctagctgtacttccactactgggatttccctgctgcttcctttgatggcaagatggaaaccggccggtgcaccgttttccttccagatttgcacgtaccaccacccacttgatcgtcttcataagacagtttttactaataaattaatttttatttcttaataaaccgttttagtattactagaaaatatgggtaatcgatgaggctataacctaatacaaaatgtcttaatacaaaatgtcttaatatttttagcattgcaatgtgttatattttatagattagttttctattattttttctgttttataatatatatatatatatatatatatatatatatatatatatatatatatatatatatatatatatgtaatgctagaaaatattataatatgaaatagggggagtacgcggcagacggggaggagaaaaaaaaatcggtcactaatcagaagtataagacgaggagatcctgctacttcttccccatcaccaccaccaccaccatcgctttcttcctcctcgccttctgcttctgcatccatccatccatccattactcgccgaagacttcgcgcggggagagaggaggcaagcttggtcgcgggaacgcgggaagaaaggtccgagcttggaaggagaagaagaagtagccaagaacgcgagagcttggaaggcgagctgcggtggtgtagctagccaatgccggcggggaactggtagggagggggatggggggagggggcacgctcgtcgacggattccgccgcctcttccaccgccgcacggcgtccggctccaaccagtcgtccaacgccggcgaggaggccgcctcctccgacctcgaggtcgccgacgacccggatctcgtcgccctccgctccatccgcatccgcgtgcccaagcgcaagatgcctctccccgtcgagagccacaagaaggtgaggaggtgcctagtgtgaagtgtgctttgctttgcttcgttttcttttcagtttgggggtgaaatgaaagtttcaggctttctcgtgatccttgattcgtggccacgaggggttcttagactagatcagatcttcgtggcacctgaattacttgcatactgtacaatatcattatttctttttttctatgatctgtgcaaagtgcaatacagctcaagtgcaggtaaagcttgcgtgttctatccaatctttcttctttcgatggttgcttgtagagcgatagttgcttgtaaactgccatccgattcgtcatcctggctgttgacctgtgttattccagtgatctatgaaacgatcgatctcgtaaaacttaagtttctttctttctttctctgtttgcttagttctgaaattacttgctcctgcatgctccatttcttagaggagtgcaattgcagcactactatgcaaaaagcttgtgccctcttttggagctgttctcaacaattggtcccatcatccttgtcatactgatccttaggagctcatatccaagttgtccacttgtggttttggatgatctcatcagaatcggctactaattagtactccaggtttgacttggtctggcctatgtatatctctggtacggactgtttctattgggaacaagtcgcgtcttgcacatggtatggagcaggtgttcctttcatttgcgaataaacctacatgtctatgtactgaaaatgtcaatttttgttaggttggtcatgatattcccagggacaagatcatggttttgtttatagggctattctactactgaagaagttttataaccagccactctgtatttttagttagcttaatattttcttgcaaaattgtgatcttgtagaacacagtggaaatggagttcttcactgagtatggagaagcaagccagtaccagatccaggaagtcattggcaaaggaagttatggagtagttgctgctgcagtagatacccgcacgggtgagcgggttgcaatcaagaagatcaatgatgtgtttgagcatgtatcagacgctacgcgcatattgcgtgagatcaagctccttcgtctgctccgtcacccagacatagttgagatcaaacacattatgcttcccccttctcgaagggagttccaagatatttatgttgtttttgagctcatggaatcagatctccatcaagtcatcagagcgaacgatgacctcaccccggagcactaccagtttttcctgtaccaacttctccgtgctctcaagtacatccatgcaggtaagcttaactactgataatccccaattccccaagaacctacttgaccaccattaaacacatagttctgttgatttatcaattaacatggaattctagcttattctctgataaatcatctatattggcacagctaatgtatttcatcgcgatctaaagcccaagaatatactggcaaactcagactgcaaattgaaaatatgtgatttcggacttgcccgagcatcattcaatgatgccccttcagcaatattttggacggtaaggtgcttatatgagattttacattcctctttaagtctttatgttattaattatgttctactttgtgaaggattatgttgcaacgaggtggtaccgagcacctgaattatgtggctcatttttctccaaagtaaggtcttcaacactagaattctttcaatcaagattaatgcttttgtggcaccatagatgaactggtctagttgtttttagcaatgctttcttttttttttcctttttctttatctatccaacttacagttgtgctaaatgaagtatagaaaattaagttatttttctttttgttgatattttagttgtttgtacatacaattttctatcaaagctgcgccacttgaaactggatgagtaacattcttgtagagaaacaatatactgtgaactcttttgtgcaatgctgatgctctagcgttccatgtgttttatgtgttctaacaatagccaatttgcatacagtacactcctgcaattgatatttggagtattgggtgcatatttgctgaacttctcactgggagaccactatttcctgggaagaatgttgtgcaccaattagatattataacagatcttcttggaactccatcatcagaaaccttatccagggtatgtttactttataccgattctcatatatccttgaacctcctattcagtaacattcaagaagatccaattctctaataagatgaaacaatcaccttactgttttctgcgtctctgcagattcgaaatgagaaggccaggagatacttgagcaccatgcggaaaaaacatgctgtccccttctctcagaagttccgcaatactgaccccttggctcttcgtctgctagagcgtttactggcatttgatcctaaagatcggtcttcagctgaagaagtaagctcaagagaaagcatagcatcctttccaaacctcaaaagtagtttttttttaaaaaaaaaaactttcagaaaacacacattttttatatgttatattctcttccaattttcaggctttggctgatccgtacttcgcaagtcttgctaatgtggaacgtgagccctcaagacatccaatctcaaaacttgagtttgaattcgagagacggaagctgacaaaagatgatgttagagaattaatttatcgagaggtacaaagcaatagctcaagtttcctgctttgtgttaataataaaattttcagcttttcaagattgataattatgaaatgcaaacagattttggagtatcacccacagatgctgcaagagtatatgaaaggtggagagcagattagcttcctctatccaaggtggagtcttgcattaatttttctttctttcatcagttttaaatttgacgtgacaaagatgaatatctggctttgttccagcaagttagcatggtgtacaatatacttctttgcaccaacaaaattgccttcgccaaatactcttgttggcaaagcaaatttactaagtatagtagtaatttgctttgcagtgctatcatgagttaatatctgatctattcttgttgctctcattttggtatatctttatttccaaggctcctttcacccgaaaattgcatggacattgttacaggaaacactagccatgtgtgcatctaatatatatttatcatgtccttgcatggttttctctcctttttttaccgtgaacatagctattctgttaatattgttatcttactgcagtggggttgatcgcttcaaacgacagtttgcacaccttgaggagaactacagcaaaggagaaagaggttctccactgcagaggaagcatgcttctttaccgaggtacataatgtggcaatatcagaaatcaaaagtgcagacctacttactttcatatcaattattgtactaacttctccattgattttgcatataacagggagagagtaggtgtatcaaaggatggttataaccaacaaaacaccaatgaccaagagaggagtgcagattccgttgcccgcactacagtaagccctccaatgtcacaagatgcacaacaacatggatctgctggccaaaatggtgtgacatccacagacttgagttcgaggagctatctgaagagtgcaagcattagtgcttccaagtgtgtcgctgtcaaggacaataaagaaccagaggtactgttactttgctgcctgaaatttgtctatgattcttataagtcggcaaagttgcatagctatgcacgatcgaacaaaagtataagaaatgatgcgtgaaaagaaaaggaattgactggtttgttgcataggtagtaactccatttccctttgcatttcccttttgtttttgctatcctttaggatgattacatctctgaagaaatggaagggtcggtcgatggattgtctgaacaagtctccaggatgcactcctagtgcacaacgatgacgatgatcagtgcaagattctgtgaggcgcaccagatgctgataatttccaagcagaatgctgcactgcaagtttggactttggacaatgcaagtatgcaacagccagcccgagatgattggcatcttcttatgctcatccatgttcacatattcttcttgccattgtgctgtctgtcactacaggacccctgcatggattaatgtattatccctctgatgtaacactagattagtccatctgtccatggaggaatgaatagcaagcagccagcttgtgcatcatgtgggcatgttcattttccagtgagatctagtcatatccatgctttttttgtaatggtatatgaaacagtttatcagtgagactctggtccattcctctttgaagaactgctgagacagtgatccattcctctttgaagaactgttcattttcagtacattaagcctagtaaagttcagatgtttgagttcggtgcttaataatcatgtcacacgaattttccaagatgaatgccaagtaggagtagtatgtatgagtgtacaattgcatcagaaattcaaatgaaattggcgaataccagacgtagcggaggagattcgttcgaagtcacaggttttggcggccgcgagtccgacgacccggaatgcagtttcgtacgttggagctggcagcacactgaagaaattcctgtagctgaatgccttggagagatgtggtatgtgatcacaagctcttacttaaaaaaaaaaggtaaactgcataaaccacatgttttgtgatcaaagttgtagaaaatcacacgtactttgatattcatgatgcgcgttagactactgatcgctagcattagcggtcatttctgagtgatcccatttccatttcatcttctgctactcaggatagtgaaaacatctgaagaaatggaagtctgaactctgaacaggtaaacccaggatgcattccttagtgcgacaatgacagatgacgatgatcggtgcaagatttctgccagacacaccagatggcaataatatggaagcaggacactgcacggcaagtttctttgaactttggacactgcaaacagtcgtccaaagatgttttgccacttcttatgagttatgcccacgcacaatgcacgttcatctactcttaccatcatgttactcaattcagatgcaaatcatgcaacattagatatttagattagatctggtccatggaggaatgaagactggccagcttttccaccatgtgagcatgttcattttccaaccaatggcatgtgaaggttatcatgtgctgttcctctgtaaaaagagctgtgctaatagatcaagaagcatcacctttcgcatgcaatgttttcttgtctaattgatcaataactgagccacacactcttttacaagacacacagacatcttcaagtgcgcagatgaaacgtcttccagaacacccctccattccagtactgcgagcaactctattgggagctgaatttactgactactgaattacagaaaggcaggagacatctcatgacgattttcttcggtcagaacagttgtcttcacaatattcttccaattcacaacaagctctctcctcagattgacccttgtccaaacagagcttcataagatatcaagttatgtgttactaaagcataatgagctagaccttaagatacaatacaacaatgagtcaatgacagacgtctgaggcaagatctgtacatactggcgggtagctactcaacgaaggggtacatttggcatcttaattggaacactacactaactgactagctgctagctaatccgggagcagcagatttctctgggctcaatccttgcattgaatatatacatagctgccatcactggtcgccaacataatcagaaaggactaactcttccagcaagcataagcatgaattcaggaacaaggcggcgtgcaacaggtacagcaagatgctgggcagatgtatctggattgtcattgtgtatcacagtaacaatctcttcgagcagcttatccctaccaccccggagaggatcctacagcacacattaatcagagaaaaagcatcaagtgtaagaactttgtgcattcaaattacactgccaaatacaccagggcgtgatacccatgttggggcaataacaaacatcaagcaatacagtttatacatgatgatcagttgagacagttaattctttgaagggttgaaccttcaggccctttctcttgtaaacaaattacaatcacattgtatactaagccgataacgcctttatattggctgaaggtacttagttatactacccaccataatggttcttaaatcaaagactatgaccatcttgaaatcacaatatagagaagaacaacattacatcgaagaatgaataattttatatctagaagaaagaaaagtaccataaaagccaaaaagaataaaatgtctaaacaaagcaacccatatccaataaccactaatgtaacaatagattacctgaaggaacaagtcagtatgcgtctttccatcatacaagaacagatctgctttagcgccattctgttgtaaagcatcaaagaaagcctcgctgcattttttcaattaagtcaatcaatagaaatagtccaatatggcaatatccataatatagaagtttcgtcagataacacaactacaaaagttactggtgaggaggaaaaataaacaagtgactaaatctcctaaatgaaagctagatggtagcactagaatccctaagaataacacttgtttcttcttaactagtgttaactactcaacaccaacaggaaatggcacaacgacatgatgttgcactagacttatctcttcttcttgactagtgcaaaactacaataagattcaagaagaaacaatttctgactagtctatgtttttcttcagcatgccaaacaacatggaaaattcatttgaaatggatgcagacaagatcagggcactatgaagtataaacaatccaaaagtccttagaatacccaagtccctcagtttggtttagtcatctcattttgtttggtcagtaacagcatgtggaaactttatcataaggcatacttattataaaataatgtcaaaaaggtttaaatgagtttcatttcactttgttcgagagaaaagtttcatttcacttaacctgagacattcatctcctggaagagaaaacaactgaataagtatatagttggtttgtccaatctaatgatttcgaatcaatacgacaagaaaacatgcaccatgtgatcaaccattccagttgaacccacctctcagccgatggtattgaatagtcacttgttccatgaaaaaggaatattcgaggtaatagagatactgcagacctagcagctgggtccttaaccatcaccagtggagaaaatttttgcaacgactcctcgccttccattatgctgtgaaacatattgttgaagtggagttttagtgtatataaagataatcaacatgatatgctcacatagttcaatagttatgtgggagttgttgtggaggacatgaatacaatactatgctacttttaactagctgtaaacaaaaatatacctgagaaagatcgatcggtacaggccacgtttatggaaatgatcgaccaagttaagaagattatagctgtagaaatcataaatcaactgtcaagtccgatacaccagaattcctgtatatgtgaaccattaatgaaactactaaaaatgtaatataatctcatattaacaacaaaggtaccaaaatgatccataaattacaaaggctgaacatgaatcatcaataatatttatagagtgagcccaattgccacgtcacttcttaaaaagggaacttctcatttcttaaatctggagcagcatattacagctctgctcacaaagaagctcagcagactacatgatatattccactgcacactgttgcaaatatttgacgatacaaacaactgaaaactgaaagtagtgtgtacatgcgcattctcatacacattataaaaaatgcaagccttgctgcatgtcacctactgtaagtgtaaagagaataggatattacccgccagaaataccaaaataagcttttagctgtgcaatgctccaagtggaagcatctccttcaccagattctttaatagcttggtgtaagagagtacaagcagcaatatgagcaccagcagattgtccaacaagataaatcctgtaagtatcatttagatagagcagatacggacaagatgcctcaatatatgccataccaaaatcagaacgctgagttgtttcttgtattcataatgcttcagaagttccatatgtaagatctttataccatgcagtgcctattactagaaccctagaatatataaatagccaaaatgaaatatgtctctgacgcaatctaactcacattccactgatggtatcctaattattaatacagtaacaatttgtgcacatcagcgcatgagaagggcatacgttggtaggaaccattttgtaattgcaacagaaaagtttgaaagtttgatatcattgtaagttatgaacctttcaggatcacctccataactagctatattattgcagacaaaggcaatcccttgagatgcatcttctaccatgtcaccaatagtcccttgaggaaagtttctgcaaacaaataattggtatgctccatgaaaatggtatgaaccctcattcttctatatgcatatttggaatttattttgagtacctgtaatcaatgcatgcaactaagatgcccctctctgccaagcgcctgcccaaaagggccccccaccctttgtacctgtggatgtgatatgtataatttgccattatagagtcaacacacaatctaaatcttactggaacttcaggtagtaaaaatacagaaagttggagaccaggatagtacatacttgtacagttttactcaccctatgatccaagctccacccgtgacaaatgccacaactggcttcaacccagttctatcggtaggtatgtataaatccagcctagataacgaattttcagggttcaatatatgaacagcataatagactatgccaagtacaccaagacaaattaaaatacaaatatgagcatagcattatgaaaaagatagcaagaagtacctgtttcttggttgttctccatatacaacacttctacaaacttggctcgagaagaaataataatatacaactgtattaaagaaaaaaaaaagagtcaaggccatctccattctgttaaacactttctgtggtaatgaaatttgtttttccttttgaaaactggctaggagctctagcactaactaaggaagaggatgtgggatggaacccatgctagtcttaaggtttcaaaccagcggatgggacaattgtgatctcaggtatataacacaaaatcctactgaaatactacttatgaagacatggtgaatcaaccaaagaaaaatgtggagatgtgccaagcaagtgcaaatgctttctctccctcaacaaaagagtaatggcaaggctaaccttgaatgaaacctggcatgagcaagaaggtgtaacaacagagggctaggaactgcctgatccatctgtagcctatcctgcataaatcagacagagacaggttattgcaaagaacaaaacacgaaaaggccatactcccatgcacaatcacaaaagcagtttagcatctgatcttagtagaaagcctagaaatgatcatttagctcagtggtaaacatgccatgatacaatttccccaaattacagcattaacacaaacagatcgcaaggttgaagtgatagcagccttgtagtagagtagaactatcagaaatggaattggcgagtacccgaggtagcggaggaggatgagcgtgaggcgcgtgagtaggtaggtctcctcggccgcgcggcggacctcccgccggaaggatccgctgcgctgccggaaccgctcgctcaccaccacccgccgccgcacacccccacctccacctggcaagagcggcgcgtcctccgctgctgctgatgcagcggcggcggcggctggagatgacggcggagcctcccccgtctcgctgggccgggctgccgcgcggtcagcgagctccacctgcatcgcgactgacaaaccagccggcgacgtgcgatattcccccacgtcgtcgtgactcgtagcgctccctgctccgggcaagacgtagcgcggccgcctctcacgcaacggcgaggtcgccggggagagatggcggtcgttctgcggcggcgctccggcggacgacggcgaagaagagaagatcttctcactggagggaggggggggagctgacaggtgggccaccacatggcagcgaggagtatttattcgaagagcccctttaattattttcgtattaccagttaaatccatccacgatcgctaatccaaaactgcacgcgtctgaaccgttcgatctgaggtgcggccagatcgagaaaagagtagttggggagcgcatatttacattttggaccttactcttattcgtatttgtgttgcggccatatcgagaaaagagaagcggggaattagcacatttacattttggtccttcttcttattcgtatttgtgttgacgggtaccgtggattccaccggcggcgcagagccggagaccggagggcggcggaactccggcgagctcggcggtgaccgacggtggaaggaaggtgcattgttcgtcagtacaccaagctctcatcaactcgccgagcgcttcccctccctccgctccatccatccatggcgtcctccccgcctccatcgacggcgtcccccacctcctcctcgccctaccggaagctcctccactccgtacgcctcgccctcgccctcatcttcgcgtgcgattccgagtcctctcccctgatgatacactttgtttggattccttgttcggtttcagttgatttactgggcggtgcagcgctgccggatgtcggagtcgccgtgccggctcacggtctccgtcaagcgctccccggaacccgctggttcctcgcccctgcgtatatctggtagtgcagctgcgcgcttgcgccgttgtgatctgttgccccttccttccgcttacattcgtgaactactgcagtttcagatactggagttgggagcaagctggaggagttcctggagctagatgcattggcgcgtgagacccccgtggagaaatggggtatgcgatcaccttctctcgctcaatttccctgtttgctggttgtcagtagcatcctcagactgcggattgcatgagatgtgtggttctgttgttaacaacaccgctgaatcatctgggaagttggtttgtacggtatagcctgttaggtacggagtagatatggagttcaccaagtcatcagaatttgcttaagatatattatcactacatttgatatgttcatatgtagaattgtagatggtcttgatgggaagatggatatatgtttttccctgacattctcttgggcaacaaccatgtacctgacactgtgccatgtatcttcatttggtttagagtttgtcataactcttggttcatcattcattgtctcacactaattctttccatctgcagatggtaccctcttaatcacaactacaggtatgcttcgtatctaatctatgtgttacatggttccactgctccatttgtgccatactgacataaaccatttcatcttgtctatttaatactttcaccttattctaaaacatatgtttaagttatcatgtgttgtccattgttctccatggtcccatgctgctagtgctcattttattatctctttttggagtggaaatcccacaaagcctgagaattttcccataagagctgcaaaagttgatagcattgtgggcatacttaaatcggtcgaaccacagtagtatgccatgaaattcgctgtttcactttgctaaaacttatatttgaatcttgctgtctccttggttcctttttgttccttttttgcatataatgtagttctgtacatactgtctaatttattcaaaatggctttattggataaaaaggaattctaaagtcaaaggaaatgttaaatatttatgttgcgtatacttatcttgttatgtttcttcagatattttccagaaattctgtgtgtatgtttattctgttttgaatacatgttatgacacctgtggatccctccacaaattagcatttgccatgcaaatacataaatatatatgttgtaaactattgttttattatcttaattctatgtgtttattcaatgctattgaactttttattgcatacttttccaatctgtaggaatcgatgacaaagctatttatcgttatcaatttaatcttcaagaagacacatcttcaagcacaagatttaccaagctagtgaccacgtacaaaagtcgtgctatattcaggcaggtcctcttgtgttactttgatgtgacctatggaaatctggtgtttgttgaatcgtttatgcctttttcaacacagtggaactgaagtatgcctttgcctgccaactgaagctgatgttgatgacttaatattatggttggttggttttgtccgcaaggttgtattaaggaacattcatattttttaaatgttttttcaccataattttacctgcccaaccttagcaacattagtgatcgttgtaatttgttatcctgtcaataatagaatcctcataacaatcctatattacagacttactatagtcatttgtttccaaatatgatagaattagtaacattatgttgctaaccatttctttttgcgcgattgtcccgaatactttctaactagcatgtttctgttgttgacctttgcagatattcgtgctaagagcatctgtaagtatttctgaacttttttctctagttgtaaccagtgtgttcttcctattttctttgttcactatgttttttttccatatttcataatgactgatcatatttatactcaccattaatccctttaatcctgagtccttaatcctcaagtcaaaatgccaaatgctattcgtccatactgaccatacacactggtgctattgtgtgtctatctcttagcagcgggtgatgctgttctctgaggatgtgtttttcttgttagaataactgtgtcatttacaaagccttctagcttatcccgtatcatgtgtggcgtactgctctaacaacagtacattatcccgtatcatgtgtggcgtactgctctaacaacagtacatttcatgccacttatatcatctaaatcgaatgtgcagattgcattatgtgaatactttttcacacactgcaggacatgtttgatgtatttctatatgtgttcccgttttatatggagtctcatacctttgtgcatgatgtgcaaaatgaaaatacatgttcctgtatttatttatttacttctgaaaattcacaaatacaaaagtaacaaaacacggtgttcattggtctatgctacagggcaaaacaactgaaaaccctaatattggagtttcctacagatgcatttgtttgataagttcttaacagccatctgatatcatatcaccaatttgtctgcctgcattttcagaccaacaatattgtgtatcctgagatgtaattaaaggatataaaactgatgatcatgattcatcctcagtacttggttacattccattcctccgaacatgtctaattttactttgtgtttgcatatgtccagttttagttgttgcacagtaaacaggcctagaattagaagcatctatctgcttttactctgttttttcttattgtgacctcttaaatggttgtttgatttcttttgtactactcagaatttagcatgtgagctctttgttgcgcaaacagacagtgctggatcaggagacgtttgtctgtcacaagattctgatgatgtccatatttccattaccacatcaagtattgaccgtctagtttctggccttaaagattatgcactctcacatgctaacacatctgacaggtgtgaagcatgctacatgaacaggtaaacattgcttgctgagtttaactctagacatatttgtttatttctttactttgctattggaaatagatttatgatgtgtgttatcttttggattttgactttcagtggaagcttatcattagcaatttagcatccatatttaatcatttttctggaacttgcacttgaatcgctaaacaacaggtttgaagttaatttatgggtgttttagactttgtgtcacataggaaaagttgtcgctcatgaagcggtaaataaaataattgcagtcactgattctgaatgtagttatgaaaactcacttgtgcacacacgaaggctgggggaataagtcttatcccatcacatctaataaaatctgaaatgtattaatcaaatatgcacaattgagtgtatcaacattatttaatgtgaagatatcagatcctgccgcatttgagctctagaattgtatatatcaaggcctaatagctttcttttgttaaacaaagtaccgatctatcagatgaactgcttcaggtggccaacagtgtctggtgctattcgctagatttgagtaatgtctaattgccccattttcccatcacccaaagtcccaaacccattcagcatttcagttcaacctttttaggcatgcttgtgtatcctacctttcggtagcctggtatgtagtagttgaattcagtcatgtgcatactaatgaataccatatgtgtatcatctatctctgcaattgtacattcctcaaatagctttgattacatagttgatagggcttgtatgttttgctcttctgccgtctcacttcagagatcgcctgaagattggaactggaacagcaaaatatgtagacaaaagaaaagctaaagggcaacttgttgaagtagtgataatgcttgcacctacttcatctgatttgagctgttggatgacaaattgttcatctacacaggtttgcaccataggcctctaagttacataaactaattatgcaattacattagcatacttgttcttgtgatgtctaactggttatgggtgtagtatacaagcaagagggcctcttgtgtggtatattcttgcttgtatttagtaagcttataaaagttataacagcatggcgtccaatgtttatgctgaaggtgtggttcaagtatgctcactgcttccactcaatggtgaattgtctattgtaggttttgcattttgtagagttcataccatgtccaatctcacaatcctccctcagtgcgctgatgagcatagactggcaaagctacggtttcaagtttaaagggggtttcattgatgacgatggaaatgctgagcttcaatgggataacatggcattttctcatgtcgatattgccattcacacttaccacgaaggatatccagcttttgttttgtgcatgctttcttttttctagtgatggtgtcgcctgtctatttggctgtggatatctctgttggatttcccatcactgtatttggctatccttgacctgctgtagctactgctgttgatgaatggaagagctctcaacctgaaaggcatcttctaagaaaggcacttaagtctgcattgtttggattgaaagcagaccatgcagaagactttctcagctgccatggccagaaggtttgtgccttctacactttgctgttaaccacgtaactggtgtgtttgttatttccattccttacttgtatgtattttctgcctgttataatttataactcaagaaaaactattgttagacataaggtagtactgaaccgacacctgttagatttagtgcaacctcaatgcaacacttcttaatctgtgccacctgccaacctcgcaaagtgaccactttctgtatagttgctcttttggtcacacaaattagattgacgtcataataagcttcatattataatttctgtaacttatcatcagaaataatcactctgttggttcctacctcaatgtgaatatcatcttcactttccttgatacttctttcccttgaaatatcaagtgtgtgtcggctttatactacgaggggaaaactgtatagggaagaactggtgtgcctactgcctagtacaccctagcaaaattaccactccccttaaataccgaacaaagactagacggcaatattgttcagcttgggaatgggctttgtaagtctgtatgccctcaactattcttgctagttttcatcaggacacacattgaatcttagtttggtggcaagccacaaatgacatggcctaacatttgcgtactgtcagttcaattactacaaacttgaaaaatggattaatctgatattctagaacaactttcatatagaaagttttcacacgaaacgcaccgttttacggtttgaaaagcgtgccatgagtatccaaaagttaatccaacctaaggtaacttgatgtaacttgttattgcctacaatttgatgtaacttgttctttccataattcaggttcgcgagtatgtccctgatctcgcagaatcgatagctggcttaatcttatcatccaatgatcaagagttccaagatgagtgcatcgctcttctcggcctaggctcagatcaagatctcacagaaggggcggttagatcctgcatcggtgagaagatgaaccgtatcgtagagatgaatgacaccaaggagaacgtagagcacaacgcaccttatctgttcgagtgcgagaggttcgatgaagattatagcctactggatgaagacgacccagatgaggatatgattttcgatttctagcatttccaattgtctcgtagcactcctaatccagagatctcctatgctgtgagagagctttactttgaccagagaactttataaacactaacaaagactgctctctgagactgtttcctgcctcgtgtaaacaaaattcagacattgttacgtcaaaaattcagaaactgcaagtaattgcccatgtgctgagcatctctttctgttcgttctcgttcatgataatatctgcgttcaataactccatgaagattgtgtatactataagcatttttaaaatagtgccaagtcaaatatttttaattgtgactattaatagaaaaaaataaaaaaaaatcatgtaaaattaatattagtagatttatcattaaacaaactatcgtactatacaattatttgtatttaaaacatattacttttatagatattgttggttaaagtagcatctcgaaaaccgtgtcgaagtccaaaaatacttatattttagaaaggatggatagagtataacattacagacaaattacattatttttgtagaaaattccacaaaatttgagttgaatccttgccttcttgatatcagaaagacgcgtgagggcgtgaggctggatgcgtgtggcctcctgacctcgcgtcagactcagagccccatttgcttttacagaatgtgaagcgtcctcgtctcgtctagtcctctcctcctcctcctcctccctcctcctcctctccgctttcgctttgaccaaacccaaaccacgcgcagcgctcccatcgcccagggcaacgccacgaaacctagccccaccgactcgcctcgcctcgcctcggaatcccccaacaccagagcgcggcggcgaccatggagccctcccccgtcggcggcgggtccgcctccgggtcggtggagcggtggcgcgcggaggcgtcgcgggcgttccagcactacctggatcgggcggcgccgcacacggcggggcggtgggccggcacgctcgtggccgcggcggtgtacgcgctgcgggtctactacgtgcaggggttctacgtcgtcacctacggcctcggcatctacctcctcaacctcctcatcgggttcctctcccccatggtcgacccggagctcgaggcgctcgacgccggcccggccctccccacccgcggctccgacgagttcaagcccttcatccgccgcctccccgagttcaagttctggtatacgatttttcctgattcgcttctgatcctaggcagcaaactggtgtaggtagttggtgatgcgaccgtacaaatgtgatttcttaatgtgaggttttgatcgaaccagctgagatggtttggatcatcaatattcaattcaccgaccaacacatgtgttccactgattaatcggatgatgaggtagtagatggataggcaaaggcttcactatgaatgctaacctacggcttatgcagattccattgggagttactacttaatagggctatagataattttgatatggtaattgcttaggttgtgcatagctggaaagtccgcgatgaatttttctagtggagctattgcattttttgcgtgctcttatcctgtttagttgttggcttgtgatgtactagtacagtaacttttacctgtttgtttttaagttcagatattatattacgtaacatcttcgtcaagcttacaattttttatggaacttagttcatgagctgcttttacacgttgctttattgacacttgttcacaaaacaagaggcacttgctgttttatagcatcgaattttatttcttaaaaagatcaggaatagtaattgcattagtttgtcatgggcacatcatgccactgtaattaaacacttccctatttcgtgttctactgccaatgggtttggtttctttgtgtgcttgtgttggcgtgtctagcaaggcctatttgcgatgcaaatgcaaaatgtcagctatgctaactaatttattttttttcaggtatgccatcacaaaagccttttgtgttgcttttctgatgacattcttctctgtattcgacgttcctgtcttctggccaatacttctctgctattgggttgtgctttttgtcctgacaatgaagcggcaaattgtgcatatgataaagtacaagtatgtcccattcagcataggaaagcaggtgagatcattatgatatgtatgcatagttgatagtgttttcttctgccatttggaagttcagtagttcatactgcaccatatgttaatcttccaagtggccattactttgtgtatttggtcctagtcatgatagctgtcttgggggcagtaaaaattagaaaggccctttatttgcaattgcattgggggcttgtcagagttacatccctagtaccttctgattaagtttgtacttactgcactaagattcaagagtaaatcatatgttatgagtaggagctactggccttgtcttgatatgttttctcatagtgtgatatactcccctctgttcatcaatatcggtgtcaaatattagtgatcagaggtagtatcatagccaagcacatgtaagatgatgacagtaggtgtgtcaccatgagaagacatcgctaaccaatttagatcactgacttgttgcgctacacattttcctttttcctgaaggagttgcactatacaattttttaaatgtacaatatattagcttactgaactacattaattccaatgcagaaatatggtggaaagaaaggcccgggagccagtacgtctaaagactgagacctggattgcagatccctgtgttgctcttgaggcaacatgctggcatggtggttttttggtaccagctactgacagtggatgtacacctccattcgctagtcgagaggagcttaaagagactttgcatcggttgatgaccatttgtgttgtatatcagattcttctgtgcaatgactcgttcatttatagttcttgtgctgtgcggctcttgtgtggacgagtaatgaacctattgagtcaggtgcaatgcaaatcaaaactattggggcttgacatggatttgtactggaattcaacatgctcgtttccagacggggcccttaattactcgcatgttagtaacacatttgttattctatttagagtcctatgaaggttgtctgttttgtgtatgcgcatgagccattcggtaattgttactcccttcatcctacattgagcatccaataatgtctgctataatgtttgtgcaccaagaacaagaataatttaaatcacatcgatcaagacgtcatgtataatatgcacacattctctcctaatgcatgagttggttaaaacacaatgcacaattccactctgcctttagcatgcacacattcttacatgatgtattaattgtgctctaataaaatccttatacatgtgatcaatttgaaaaattaattttagtttttattatatgataatcaatttaaaaagaagggagtactatcttaactgcactaatgattggtggccaagtgatttacaacctctgatgcccatcgtaaaatcccaagctgttttagcctgtgctaagtcaaaactgtcagcctaccaggcagtttgtaactaactgcaaatatggtaaccaacccgctggctgataggcggggccgaccgttcgctccggccccacctgtcagccagcgcatgatctctactcttttttatttattaggaggttgctgcgctgcggaggctgcatgcattagcgcggaaattctcaggctcgccgtcgacgaggaggaggaggaatcgggaggagatccgagatggcggcgagggagacgtcgcgccacgcgtcgctctgcctgtggctcgcgctcgtcgccgccaccctctctctcgcccaggtactcgattgatgatgcttgctcattctgtttatatcattcacattgcccggatttttccccttcaattcttagttgccaccctatcattagtttgccactctccctgatctgatctgattactcgtacgtcactcttctccaatgtgttcgattttctatttgttttagaacttttgctctctctgttttctcttttcaggcggtagaatcagaagccgaattgaccaaggtcaccaccaaggtcttcttcgacatcacaatcaatggcaagccggcaggtttgtgcatcctgactccctgatttcttgagttcaccaaaattttgttattgcctgcttctctggtaataatgccatttatgtatgttgaagattgttcattgtttaatgaaatcttccattatctaaaataatgcgtgtttgattgatgatatgctcattgacgtttagattgtttctacttggttgttataggtcggattgtcatggggctttttggaaacactgttcctaaaacagcaggtataacatcaacctaattacttattgttttcaacttaattgtttttgtctgagacacaaattggtaatggtctctgcatctgctctttgcagagaacttccgagcaatttgcacaggtatttcttcccaaccgtcatactacatttcttcaatgtaatgctaccgatttcatacaaattatttgaaattatacaatttggtcagctatcccaattcccaaacgtgaaaggctatatgtccttttagttttcttctctaaaagtgtcaaatgaaaaggcatattgctcgcatcctttttatgttatactatagggttaatacttattggcatattcggtgttacataagttatttcctttatcactctggggcctgttggtacttactgagcatgccccaagtcatgtactccagttgatttggctactatagttcacgagatttggagagagagatgtccctccaaacattttttttaaagaaaaaattgcaagcgtgttggcgattgaacacgggatatcaggattgaaaccacacaccccttgccactgcactatcaagtgcatctcttggctactatagtttcatgtagcaatctcaacttcacatttatacaggtgagaaaggacttggcaagagtggcaaacctctctcctacaaaggaacgccattccacaggatcatcccaggcttcatgatccaaggaggcgacaccgtgagcggcaatggaaccggctgtgattcgatctatggtggaatgttccctgatgagaacttcaagatcaaccactctgcaccaggtgaactgcttttcttgatatcccagttgtatactactatattactgcacagaaatttcattcttttgagcagcaagtcctcatgtttgatttgctggctggtcattggttcagggttgctgtccatggccaactatgcgaaagatacaaacggatcccagttcttcatcaccaccgtaaagctaacccggtaaacttcatcagctcctgagagctgagaattagttttcgtgcaaattttctttttgtttgctagaaatcttccgatcaaattgtaattttgatcatgacctactctttttgtgttgtttgctactgcaggttggatgggaagcatgttgtgtttggcaaggtgctttctggaatggacgtcgtctacaagattgaagctgaaggcagtcagagtggtactccacggtccaaagtcctcatatcagacagcggcgaactgaagtgatcttccattaacagaagcttaataacgagctgtacttacttaccgtgaattcctatcattggagtatgtgtgcacgtcattagtgccatgcattgtttggagcctgtttctgctgattataatgtgacctgctttgtgtaattgttgtaaaatgagagtgttctctcaatattttcccatggcaattcagattggatatgcaatgcaagcttatatacatgcgaacacaatgtcatattcctctttgatttagattattgagcggattattccatgaattatcaatttgattatgactataaattaaataatttataaaaataaacttaataaatagtttaaaacacgcatttttaagccttgtacaagaaaattctttttataaaaaaaatttaaagcgttgagcaaataatccgtttctataattagaataaggtttagtttgattgtgaagtttggatttttaatggcacgtaaaataagactagactaattaagtattaattatttaaaaattatttgttttttaaataaacttctaaacaaaaagtatttggaaaaaaataaacctttaacagtttagaaagctaaactatgctcacagtaaataacacccaaactaactttcaaactaagcctaagttgaaaagaacaactcgatagaatctaaaatttttatgctctcttgatcgatttatctgcatcaccactccctcatttacacaaaacaacccgcaatcgaaagttacaaaaaaaaaaagcacctcaatgagtgtgattaatgtggagttaaacacgaagatctttgcttgagacagaacccgacactgacatgtagggcccacctgtcaggcagcgcatcgctttcaccctcttggctactatttcttcgtggactcttgggcagagtgcggagaccgcagtgtggagcaacagatctatccatccatcccatcctcgatccttcattcctgcccggcggcgagcgagagagaggcggaggagatccgagatggcggggagcgggtggaggaggatcccggcggtgaggaggccgcccatgtcgcgcccggcctcggtctgcctctggatcgtgctcgtcgccgccaccctggcgctcgcccaggtgctcatccacctcgtccgtctccactctccaccacgcctcgctcctcctcctgcttccccgtatctgcgtgtgatgtgatgcgtgtgctctccgatctgattcgattgtttgtgctcgtgcgctgatttcttgatctgtttgatctgtggatccaattggccctggtgtgctgatttgttagaattttgagtggtgcctctatgtgcatctatgcgtactcacctttttttttttgttgctgtttaggcgaagaaatcgaaggcggatttgactgaggtcacccacaaggtctacttcgacgtcgagattgatggcaagcccgcaggtttgtgttggccccctatgtttagctctactaccatatcagcataatatataagtcttcaggcagaaagaagaaaagatatgcatagtttgatgtgtctagcattagcaaatacggagcagtaacaatttaatttgcattaattgtgtcccaccgttgtgtataagtgacttgtgatgggctgatgtcatatgcagtgattattacagttagagttatcagcatttgagattgacctgaagctaactctattatgatgagaatttagcttcttctattgttgtttatgtttaaggagaaacgttgatgtgatatttgtgtatgtactatttataatgtctttcctgttaatgattgccttactgacatttattattttttcttgtattgccataggacgggttgtcatgggacttttcgggaagactgttcctaaaacggcaggtaccatttgcttatcatttagttaggtaacaggaaattcattgtcatatcacaaatgctaatgattcactatatcttttttttttcctacagagaacttccgagcactttgcacaggtatgctccctgatgatttatactgtttttattacattagatgtgttcattcatcttctgctagagtttccagatggttaatcccatggcaagcttggtagtggcagcatgtagaatttccagcattgaataacactttctttgccactttaacctgaaattatttttgaatgcacaacttttgtgtcattatcaagtttggccaatcaaatatactgttacagttgactagttaaaaattgatgcaaaaatacatcagctcagctgttgtcattattcatacgcaagtgtagaatattatgaaaacccataaaagtatttacttcatataatgagagagatcccattctggacagcgaatagcactacaatctgtgtggtagcattccctgatgcctacttgtggttattatacgtaatctaagtttgggtttgatgtagcgctttcaactttgttgttatacaggagagaaaggaactggaaagagtggcaaagcactccacttcaagggaagtgcattccacagaattatacccagctttatgatccaaggaggtgacttcacacttggtgatggaaggggtggtgaatctatctatgggacgaagttcgccgatgaaaacttcaagatcaagcacaccggaccaggtaattttcgttatttcctgaaccatttttttactacactatagacgcattatttgtgtggtagaccatcaaatcatccttgtttgatttgatctcatgtttatgcaggcctcctgtccatggccaatgctgggagagacacaaacgggtcccagtttttcatcaccactgtaaccaccagctggtaatcgtcgtttcctcactagcctttgtaatcatagcagcactatttctaatttgtactgaagacacttcaatctgttgaaactatttatttgattaggttggacgggaagcacgtcgtgttcggtaaggtgctgtctggaatggatgtggtttacaagattgaagctgagggccagcagagtgggtcaccgaagagcaaagttgtcatcgcggacagcggcgaactgccgatgtaatgagctgaaatgatgtttcactgaagctactgctactgcttctcgttgtagaactgttattagctgctctgttttgctatgcttctaccccgaatctggttggagtaaatttctgttagactataacagcgtgcttatatcgcctcttagttgtgggcgatttggagtgaactagcataaaaaggtcgaaactttacttaagtcgtcttcttgttctaagtcgaattatactttgaagtgacttgcttactgttgagcgcttgatctgcgtctagttcagacgaagatattctagattcattgaactgcaacagactaaaaaaaaaaaacctagatcacgatcgattagatttgagtggattaatttacacaaaccaaccacctcgggtagataaataaaatctgtatgtttcatagattctcactgacacatgaaaccgaggtaattagagagagaattaaggccgatgcaaactggagtaatcctcaaaacagcgtgattccgtgtgccaaaagaggacaaggagagagtcctgggagttagaaccagacacacccacagaccgcatctagaccgcgaatctccgatcgggcggtggatagcacagcatccaggggaaagccgtgtcagacacgcatctggaccgcgaatctcagatcggacggtggatagcaccgcatccggggggaatccgtgccagagacgcatctgggccgcgaatctcagatcggacggtggatagcagctggaggaaagccgtgtgctgctccaacgagcctaataattggcggccgagtcagtcagcctcccgacccatcaaacacaaatagggttagcgagaatcggcggcggcggcggcggcggcgagagcggagagagacaggagggggcaaccgcggcggcggcggcgggggggcgcggagatgacggggaaggcgaagccgaagaagcacacggcgaaggagatcgcggcgaagatcgacgcggcgacgacgaacaggggcggcgggaaggccgggcagaaggaccggctggggcaggacaagggcggccacgccaagctcgagtgccctctctgcaagaccaccgcccccgacatcaagtccatgcagatccaccacgaggcgcgccaccccaagctccccttcgagcccgacaagctcaacaacctccacggcggcggcgccggcgccgccgccgccgccggtgaggccgccgcctcctcctccaagcccaagcccggcgtccgcggcagcctcaagaagtaaccgcaatcgaatccatcatcacccgaatctgctactactaccgcccgccgccgctcgctccggtgtgcttacttgctgctgcttgctgttttgaattattactactgtgtcatgatgtgccgtgtgatagatgcgttgattcgcgcacatatacatatgtgaccgtgttccgtcgcgtcttcgtcggcatgttttagctatgatgtttagtttatgtgtcactactctatgatgctgtcaatggtgtcaatggatgataatgtttatgtctgtcactgctcaaacaattgctaaatctgagtaaagaaaaaggtgatggctaaatccgtttgctcactcacttccgtttcgtagcaaggatgaattggaaatttgcaattgtgattagctgattattatctttgcggtgtcaagcggcatcttttttaacttggtgatcataggtatcatgtggggcatgttattctgcgctgaacccatgactgatctgcttttagcattggaagcacagtaattaggagattctacctgtttagaaaacatatgttttttttatttcatagttatgcgcctgaaaaacaactgcctcttcacaattagaggtaattgcaacatggaactgatgaaaaatgggcctgttgccctgtataagggagttagttgcgggttgatgaaatcgtggtacagtgttaaaaagaacacttctttcagttctgaattttagatgcacacctcacacggttcagttttctctgtcaaatttcacagttttcctaatgttaggactagtgaactccttaatctccgatatgatctgttaaacatgcagatggctctatgccaagcccttcacagtgagaagttgcatcatttgtttcatgtgatttccactattcgtaggtagttcattgtggttgtcatttagtcatctgagcatggatttaccaatgcagcggtgtgcagatacaaggcattccaggcttctaacttgtcaaaaaaaaaacaagttttgtctatttgattggtacctaaactaaactaccattgaggcttaacaccataaagtgatgttttgcactaatttatagcagtgagatgcctttctaaagctcatggactttagttagtgcagtgcccactggggaggcattgcaatgatgtgatattatggtgcttgaagcatgggggaggcatattatggtgcttcaagcatgggagaggcctttcacttttctttgtatgacatggaatcaggcagtccttagatgaaagtcatgaagctctgatgaagtttttatgtggaaaattttgactactcgaacttctgctctggcaatttggcattagatgaaaatcatgaaactctggtaaattttgtccagattatttggatttgatcagaaccagatgatatgatgtagtgctgcatcccttgaaggttttgaacagtatagtttactgaaatcgagatgccagaaattcattgtgcaatcagagtgttttatataaactacgccgtgagaccaggttgttgcagaacaagaatatgcactagacagtaaggattttgcatacagtgttttcctttatatactttacactaggtaatacaaaaaagtaacagtgtgtactgacaatttacatcacatatataaaacaaatgaagcaacggaatcattactagacagacacaacgaaagcacaatcctggaattctctcttttccttggacagaaactattgtgctctcaagacataaacttgaacaaagcaaagaatacattgggtcccatcatcagagaagaacagctgtcttgccgcaagtaatcaataactcaactctgtttcagattgagttcccaggcctagagaacaacctgctgaagagaaacacaaaaccaagcctaagatcagtcattttggaaaaatctctgcaccaaaataacaaaaaaaaacacgtttccagttcttttgttaattaagtgtggtacaaatatgaattaaatctttgggtagctttaggtgcataacttttcaatattacaaatggaacatcagatggtaacaatatacatacgatctattatgcgataagtagaatcagtaagtaacaagctatttaaggtctacctttaatcactgaagctgttcctactggtgaccaccagtgggctgtaaaaacaactgttgaagctggaggatcactgaccattgttagccaatggcacctccattgatgaaaaaatggctccttgatatgagctcaaaacaatggctattgttcaaacttattttcagcatagagctcagtattctgatattcctgatgatggagatggaacataaaccaactacaaattctaaaagtgatggaaatcttgacgtaggagtataggcgagaactgtatttatacgtgaagtaattctgcagctactgttcaggacagctcatttaaggatcaatggagccagtgaaagaactttcctgtgtcttgggagttggtggatcctcatcctccacaagaagagggtctaaatatccaattgccagtaccctttgcgcctcattgtaacgggcccaggtaacaaggtatagaccagcaatgataaagactcctccaataatgctgaaaagtagaatggaaacatacaacacgtgattatgacattatgtatactttgaagtttcttgaaattctatagtttagaggaccaaaaaggagtttttctaaaatagtatgggagtgaaatgaacaaagcgatattggcaatgttatctgtaaaaaaaacagtttttatcatattttcaccggtattaacaccaatatgaagattatttgtctggagagtatcagaaacaattaataaacacaatgaagagcgactattgtctggaacgagtatcagaagcaactaatgaacgcaatgcagagcgactacagttgaatgaatcccaaatttcagaaaccgtcaaatggcaaagttcaaagaacacatttcgcattattacatgccagaattttccgttataccttccaagatatattggggtaccaagaaatatagttgacaggatggtagaacatgctggttggagtggattgtagagggcaaccagagaaggaccaaggattttgtttgaccaagtcatgattgcgtaattcaagcaagatgcaacaattccctggtgaagcaaaccaataaattcagttagaacatgctagaggaggatcataaacattagcattgcattggtcatacacaagtctatgtaatataagcccaagggaatataaacatgcttacagcatatagaatagcaatgatctcggtcgttgtcaatgcccattcatggagcccattggttgtaactacccctgtcagcaccatgaatacagtggcaaatgaataagagtaagctgttaaggataagctcgcgggatattttatcagcactggagcctgcacataagaaagcaaccctgtcaatagacattctttttccaacaaaaataaagacattttatcaacatatagatattaatcttcaccaaggataagatgttccaaagtttgcatcacctgtatgaccagataagcgcccatcaggaagcagttcccaatgaggcagatgacaccaagattccatgtttctagaccgtattggagcatggccgatgtcaaccattggggcgtgtaagaattgctgctccatgtgccggccaggacattctcacccacaccattggagcctcctcctcctcctcctcccatgccaatcaaggatggacctctatagaacaccatcagcacggctccggagacgcacacagccgtgccaagaaccttgacgatgccgtccttggtgaagatattgatcacctcaacactgcaacacgcgtaatttcactcaattcagttgaaatttgaagccaatgcaacatcaggagtagataattttccaaatcatgaaccaattttacccgacgattgcggctaggaggaatgtgaacaccggtatggctggctggaaggctgcggcgtaggaggcgttggtgaagctgaggcccagcaggaacaggagctggttcccgaagatcctggagaagaagagatcgatcgataagatgagcagaaggagaagaagaagaagaggaggaatcgatgaatacccggtgaagccgaggagagcgaaggaggcgaggaggtgaggggtgagggggcggcgggtgcggcgctcgcggaagaaggcggcgggggcgaggagggcgagggcgacgaggtcgcggtagacgcagaagacgatctggttcatgccgacgttgaggacggacttggtgaggacgtggtagccgccgtaggcgagctgggtgaacgccatggcggcgtgcgcgcgccacgccttgtccgcccacagcagccgcccgctcccgctcacgctccacaccgacgacgaccaccgctgcagcatcgtcatcccctcgccgccaccccgttccctccccatctccggcgaccccgccgccgcgattcctgcctcctcgccgccggttggtgtctcttgcttttgcttgagcttgtcttggaaggcgtctactgactactgctgctgcttttgatccgtttgtttatttatttatttattttgttgattgatgcgtctgagttttcgcttgcgtggcaagttatatattagtagaaaatgtgttgagcgccacgcacgctaaaaggccgggaagaagtcatgcatttttttcattttttttctaaaagaaaatatgaaaccgggagaaaagtcatcagcgttgcttgtactcccactatgtaattcatagttatagaatacgttatatcgatatgtctacatctatactgagatatttttatattaggatagagggattatgtattaatcttgtgtacggcttgattctaagtaatacggagcactaatcatatggctggagtaatggtcttattttttttcttatacttatgtttattagctatttttttagaaaatttttattagtttaagtttgaaattttaatcttaaatttagagttaattttatgggtttttcatcgaagtttatttttcaccctttactttcagatcgctaacaacacgtatataaaagttttatttataaattatttttcgtttgcaaattatgaggccgtaagtatcaatatgtcatttttcaggagaaggttgtcacctggatatcgacatatcgtgactggttttttctcgaccagattttgtaagattctcgattgaggaaaagaaaaatctcaccatacacagggtgggtgcgccactgcttatcgtatctacagtactcccctggcaattcactgcttttttcagttagtaaagagactaccctataatcttttcgtcccaaaatataaaatattttaggtgaatggaacactttatagttttctgtctaaagagtgtcatattcatttcaaatctgtttatcttttgagacgaagaaagtaattggcataggctaattataaaaccatatgagtaacctaaaatacttatagatatcggattttatccattatttcaaaaaagaaacgatgtaacacatgattataactcattaacgcaaggtgttctcagactctatggtagtttcgtttgtgatttatttttttatgttcgagttgtacggtatcatttttatttttcgggtctctgattccgtttccaagagagaaaaaacgattgcataaacattttgaatattttttttgatcattttcattcacagttattgccatggaggaacatgtgagtgagatagttgaacatttccttcttatccagaacacaacttccctggtggtggtggcccttcttctttcatttcaaaaaaaaaaaaaaaagaaaaaaaacacccaaatcaacacagatcgtaacttggtggcgggcgggtgagaggacagcaggttaaattttacattaattttttttatacattaagatagtattaaattttacactgaaacatgtgatacctttccaaacatggtaaaattaccctacattatataaaatatgttctttttgattgggtaaaccactctgtttttcaataaagttaaaaagatcaaactgaattttcaatttttgataaaaatttatttggatttcatcagttttatcaatggatttcgtgaaatccgatgataccacccctgagccgattttaatcactgtcgggattgtgaacctagaggatagagcgcgtgaatgctgagatgaggcgtgccgcgtgcgtggctggttgagagcacctacatttcgccgtgtttatctccctgatgtatcgtccctttcgccttgtgactcgtaccactcatcagacggttagggtgtgtttagttcacaccaaaattaaaagtttggttgaagttggaacgatgtgatggaaaagttgaaagttcatgtgtatataaaagttttgatgtggtgaaaaatttaaaagtttgaagaaaaaatttataactaaacacagccttaatgaatcgagagcggcagcggcagtgaccgcgacgagaagagaacgattgattgattgatcagccaagatataaaggtagagagcggtgaccacgctgtaatatgatgtgataatcagatgctagcattatgtcctgcacctgcactgcagattccgtttcttcgctgccagctaactgttcaaatctttttattttctttttgggtgatggagtttaaatcattttttgaatgaacagtgttcagatccgtatcatatgccatgaactgtagcgattgcgatggacaccgacgaccaaacacacgccggggaggtagggattcagtgtttattattattggtcgtggagagaaatctgtacagctgtgtattgaacatttttgtgtcatgtctgatgtgagtgattctgtttaatggttgatcgctaatactatgtttacagttacattcctgggctgggatgaagaggccgtatggtcacattcgtggagtatgcaatttactttacttacgccgtgtttagttccaaaataattcttcaaacttccaacttttccatcacatcgaaactttcctacacacataaacttccaacttttccgtcacatcgttccaatttcaatcaaacttttaattttgatgtaaactaaacacagccttataagttattttatgaaattattagtaaagataaacagtagtcaagatttgcggggtgaagtcaatcgtaccaatttatctaaaagaatatatagggggtgtattaatgtattacgtagtactattattcatgtaatattagggtgtggtatttgacacgcctctttagctttgaagttcagcaagaaaaatatggtgtataagcataccacgtcaaacataggaaagtccaatattcttttaaggggacacacataaactcactccatatttacatcacatcacacgcacacaccggtggagtataagaaacacatattatcactccgtagtggctggggaaaattattaggaggaataagagtttaaaaagtgggaactgttaagtctattatttaatcagagaatgtgagagttttagaaggaattgagaaggagagtaagcgaacttccacctcttcaaaatcttggtaagagtaagtaattgaaatggaactctcttctaagtacagcaagataaatatgtgtcgtacatcatcacttaaaattcaattctcatctataatccttatgattcttatttctaccaccaaacaaaagattaggagtaaaataaaactcgcatgatcaatcctttcactaactctctcctctcaacggatccatgtcgtctacagtgtagtagagaagtttgtgagtctgccacagtaaagcagtacatcaaacactcaaacagtgatcaaatattgtatgcaagtactgtataaacagtaattcttttattatttaaatgattagtgttcacattaagctgctgtagcactttgttttggacgatccaacaaaaaaaacagcataccataatgcactgcattgtaagcagggttcgacttaccgtccgtaaccgcgcggttaccgtggttattggccttaccgcggggtacggtaatagaaaaaccacggtaacctccttaaattcaaataaatttaaaaaataatttgaatttttaaaaattttacacgatttcgtacgatttttcacggttaccgcggttaccgcgcggtaaccgtgcttatcaccggggcacggtaaccccggccctggcggtttgggaaaccctatttgtaactccctctgctgactcttcatcactgcagaggatccgaattgcctctaaactctcaatcctcctctcatctctttgtcaaacgggccgacttaatcgggacctaaacgcatgttatgcgtgtatccttttacccacccggactaaccgaagtcagttccggggaaagcctttccggcagcttgcgaatgtcaaggccctccgaaagtcaagaagagaaaatgacggcccacataattcagacggcctgaagctcgcagggaaggagcggcgggctgggcctccgggattgaggaacacttggcccaactcaaatgtcagcgaatgtcaaggcccagccctgagcaagctccatcatgagctaaacgcgtgaattttacaggattttcatatgaatcagtttaattcccgtaaaattattccaaaaatcctagattcggaagaaggccttagaacatatgattcaaccaccataccaccatgattccagtgaaattactgcctgaactctgaacaaactcgtggtagacaaaatatttctgaacgtctctgaataccagcaaacctgttgggactctgaacttggtaagctctaatcaacaaggctccaaatctcaggcagcatatctcaaggcccaaccatgaaacacagttggcaacaaatggagtagctagctagcatacctcgatctcagtttgattcgattgaacatcatggatgaaccaccatgattccagtgaaactgctgccttcaaacaagagttataaatatgacattttctgaatctctgaataccagcaaaccaattggtgagactctgaaaaaatggttcatcacaggatagctctgatcatcagggctccaaatccaaatatccaatcatccaacgagtgatttgcaattccctaatccttacctaccactctgcaggtacattacgtgtgtaattgtgtcaatgcaggagccgcagttaagtcagtgtcaataggttgatccggaccccagataaaaaaaaaaaacggaaatgcagcagaagcagcaacgcagcaaaagttctccacaacaagcaaagaaacagccgttcagacttcagagacgtggcacaacatcaatatgccatgaacccatccttccatagtggagcatatataataaaacctgggcctgacgcagagctgtcaccaccaccacaaagcagagaaaaatttgggactgacgaaaacgactcatgatctaaataatggttaggtggtcatcagtgttggtgtgttaacctgacctcttccttctatcacatgctcacaggtcgattaagcactaacaatttctttttatattgcaggcctctgcccctttggtcagtaaaacataagagctgaagaaactggaattcagatgtgcttcgctaatcaggcgaattcaacaacgaaaatgaagtccttggaaattcattgggaactcgcatgagacaattctgaattgttttttttcctgtcatcagactgaaaggcacaaatatttttgttaagaaacaattggagctaccaggagtttatccatagaatgtctgaagcagtgcagggccccagtagaacagtaaaccccgagtggcaagtactcaccaacacagatccactgattgatttgcaaaatcttcatgcgacttacagatgtcaccatgggaggctcaattcaaagcatgctaatgtaaaacatgtggttttccatgacaaataattagagcacacagatttggaatccctttgctaagtgcctctaataccgctgtcaagaaagctgcataccaaccggatgaacagcacggttgaagagaagatggccacacctaacctcgtcgcaaagaaacaaggtcgctctcacaactaacactctctgccatacttgggacgacaaggactcccaaagttcaaaagccaaggtgatttgggtttgactcttactctacttcaagatcctgagttactaacacacaagccaagttaatttgctcctgaaaaactttcttgtatcacaaatcacaatgccaagcttattcctcaatgttctttttttttttgtatgatgacgagttaatcttcatgacaatgccaaagtttatttcttcatcctcatataatcataattccaagatatctttttcttcccaagaggaaattacttggaatgaagcacaactaacaaggcaaggaacaaagggttcaaagaaccctgtaaagaataatacagatgcagatttgcacattgcaatgcaagtatgagcatcaagaacttaagttgagtaacagagcatttcatgatacagtaccatatggagccatggtggcttggagcgcggaggaggaagacgatgatgcggctacttcctgacgggggtgttgttgggagcgtgcggcgagccctcgaagagctgcttccggagcacgtcgtggaggccatcgaagagcttcttcttgacggaatccatggcccattcgaggcgattgagcagctcggtggagttcttgttgtacatgaagaggccattgtagaggtcgaagctgtcgctgcaggtgttgtcgacgaggcggagcagcgtctcgtaccccttggtgttgatcggcgtggaccggagctccagcatggcgagcatccggccgacggtgtgggtgaggaactgcgtctcggcggcgtgcgcgtcgtgctcggcgcaggtcatctccaccatgcggcacccctcccgctcgaagatgttgaggaaggcctcggcgcgggcgcggcgcgcggggcagtcgccgacgcggaccttgtcgaacacgaaggggaggccgtcccagccgtcgcgcgccgactccgggccgaacatggggtgggtgcagatgacgtcgaagtccggcgggagcgagccgaggaggaggttcctggggaactccttgacggagagcacgtcgacgaagagggtgttgcggcggaggcggtggacggggagcgagcggaggacggcctcggcggagaggatggaggtggcgaggagcaccacatccgggtggcactcgcagaggtcgtgcgggtcctggaagtaggacgcgccgacggatgcggcgagggaggagtagtcggagcgggagtgggcgagcagcgtgtggccctgccgcgcgaaggtgcgggcgaggaactggccgaagttgccgaacccgacgatggcgatcttgagccgctgccgctcctccaggagccccgccgcgcgggactcgtagtcgaacggctgggctgcgtcgatggcgcggatggtggtgccgcccccgcgctgcggccgcgcgcggaggggcgccgccgccggagacggagggcggcggaacgcggcggccgaccggaattggtggctcgccggcggcggcggcggctggtggaggcagtgggtggaggtggaagacgacagcatctcgccgcctctcgcgttggatgcttcgggggttgggcttggctcactttgctgcctaccttgctctggagttgtgggctttgggggaaatcctaaatcccaattactagtaattaagtgagctaaatgatggtgattagtcagtcaattaattaattttgtgggctaactgatgaggtgattagtaaattgatcaactggaggacagaacggtgttattcgttgggatggatcatggctgctaactagtagtagagtagtagtaggagtcagtactctaatgctgatagccagattaaagagagagtaaactaatgcaagagagcagcaggtcagtggtgatagccagattaatagagactaagctacaagagagcaacaggtcagcggttggagaactattcggttgagcattttaaacactgtttgcaggggaaagcaaggtgatttgagcttacttgttgacttgatttgagcaagttgataactttttcaatggacgttggtggaagaataagttcttttttttcctaacaggaataagccttgttcagctttgaggtgaagtggtgtccatgttcgcttagcgtttcatttgacagttgtcaaattgcagagtttcttttttgtttttcagtcgactgcaattttggaaaatgaaacacagagttgaatttattttgctgaaaggctcttttagctcttggaaaacatcaacgatgttagcaaaaaaagggcaaaaacctgaaactcaatgtcttggatatgtctatttggtaattggtacagatactaggcataaaagagtaacaaattcgtaaggacctccattacaaatcatgctcagttgagcattatatttatccaggcataaaagagcaacaaattcgtaaggacctccattacaaatgagggcctttattcagtgaattcaaaagataccatgatgccaaacaagatattttttaaattaataaaagtccctcgggtacaagcctacaacaaaaggcacaacaattcttctacagaagacaaaattcagtcacatacattactatcgcatcacaagtcgattagcagctgcagtcaccaaacaccagcaacccgtggaccctggtggccttaagaaaatgaccaagcatatgtagctaatgacatcatataaacggcagagcgatcttctgtggagacatcatgcagattatacaacactgctcattttcttctacgatggcgatgactatagtgccgttcggagtttgaataatcagaagcacttgaatcagagtagtgccagttcaccttcaatgtccttgaatgcttattgctctcataaggccttgattcagtgtactcccgcttatccctcgatctctttgaatgcctatccctgtcatgcgtgctcaagtcagtataggccctcttctcctttgatctccctgaatgcctattgtgctcaggagaacttgagtcactgtagtacctcttttcccttgaccttcttgaatgccgattgctcctagaagaacttgaatcgctgtagtattgctcatccttatgtcccattgagtgcttctcattgtccgaagtactagtgtcactgtagtggtgcttctccctcgatcggcttgaatgcccattttcagtcatatttcttttctccttcctatgctctctcttcggatgcctccttgtatctctatcaacttcaacttctgaatcagatgaagaatatgactcagtgacatctcttttcttcttcctgtgctccctcttcggatgtttccttgtatctatatcaacttctgaatcagatgaagactctgactcagtgatatttcttttcttcttcctatgctctctcttttgatgtcttcttgtatctctaccaacttcaacttttgaatcagacaaagactctggcaggtgtttcttcttgtgctttgatttttgcttgctttttctagcttccacctcagcaccagaaaatgacgaatcagaacaatattctttctttctcttgctccttgatgtcctgttgctcttctcagcttcagagtgtgaagattcctcatgagcagcaggctcagcctgcctatgcttgcttttactcttggagcgtttctttgatttgctagcagaaaagttggaaagaagagctggaatatcacatccaccaagaaatcctgaaatataagaaaccagtataatcagccaatatactagccataaattaaactcagaaatatgatgaaagtttgtcaatgcacagctgcatgctatccatattctacatgatctacctccatattcatcaaagatgtcctcggctacaatctgctgattaggatcatctgggttgtatccaccacgtggagggctcatgcctggcttttgcctaagttcccacttcaaaggctggcaaagaattccttgtgttaaaacattttgaagtttaaccgaagtacagtgagaaaaggtggcaatggcaaaaatgtgcatcttaattgttgacacgctcaaataaagaaatatatatctttaaaactgctgattcaatattcagtactctatccatagtattccacttgatgacaatttcaagagctatcttcagatattaattacccaagcttcaggaaaaaaaagcaactgtagataagttgctatcagcaatcaaattatatgcagttattaaaagggagacaagcaatacaaatggttgacagagatctactacttgcaagtcttgttacaggaagcttatttgaatgtaaattgcaacagggaaaacattttgacaaaaaaaacctaacctcacttgaatcagtctgtgccattatagctgtaagaggatcatcccttttcagtcggctctcctcgttaggcatgatcacatccttcagtgggcattctcggtcaccactctgatgaccatagtttccacaccttaaacatctaacgttacgaacttcaactccaaatggtttaaccctcgcaggagcacctgtctccaacctgagagtacaacaaaaacatattaaatcataaaatgctacttaagagttatctcaaggcagcacaatgatgctctaagcctactcccatctaagtcacaaaagttcccagatcgatggatcgaggaacgtgggacgtcatctttaaaaaagatggaacaagaggggtatacctcttctaaaactatggaacgatagatggaacatgttcctagtttttccggaacgataatccggaacggtgtacccaatttaaggaacatgttcggtgttcctagtttgactccctggattgtgctcttcttttttcatacaaagtcgatagcgcgatggcagatggctcgaagcgacggcaagatcagcgcgatggcttggcactgcgctgccgcggacagcgatggaggagaaaagcgggtgcgacacgcagcgcgcctcaatttctccatcctccccttcacgatggcggcagcagtgcagcgcacgctcatatatgcacctaggcgcgatggcagcgagctgcaaagagcaaaagcagcggtcgtcccatggagcgatgaattctgttcggaaattttggattgcctttcccatattttgctcatcgtagctcgttcctccctcatatcatcctgctaagttcctccattgttcctaccgtgtactggaacgacaacccacccattttcggaacgaagttccgcctagttccagttcctcgatccggagcgaggaacttagctaagttccacgttccctgtgacttagactcccataactcacaaaaatgtaatgaaaatgaatgtcatgtttgatcatttgagattggaaaaaggtgaaaatgaaaataaagtgaaaagggtaattgtttgggtttggaaaaagaaactctgtatgtcatactgtcatgtagtgattgtttcaagattttaacacaaaacaaggtgaaggaagtaaagtaccttggagcatttttcagcacttcaaattcttgttctgttggcaatggccggccaaaaacatcttttggcctgtttttcttatctggacctgcgtgggtcttgtcaagttccttatcaggcctgtattttttttttaaaaaaaaagttaaagaaaatatagagaagtgatatgagcagaagtaatagggttggtagaagcttgataaatgtgaaataattcatgaatcacggcagggaaaaaaatgctacattacattgaagaggtgcttgcagcagcagcactttgggttgcatcaccttcaccagacctcctcttctcatcttcaatttcagctgcttttgcactctctgcgttgtagccaggtgggcggacatacatgaaactcacagctttcattatctccatctgaacttgagaaacagattggatatcgacaaccgtgaatttttcatgggtgacaaaagaagcatgaagacttagataaaagcatacttgttcatcacagcttaacataaaagctcctataaaggatatatgcaacaaacatataaacctcttgtatgcaactagcaatcatcataactagatttctcagtattaaataggtttgaggtccatggtccaagtgcagataaatctttcctcatttctactgtaacttactgacttatgtcccatgctgatacatgtaacaaacatatatttgactttgagggcacaaaagtggggctgcacagtcactggcacgtattatcatcatccatggagcaaatatgacaatgaatagaaagaaatcctacagaaacccatgtcaaacatttaggtaatgtctataagcaatgctaagttgctaacactacttgtcaatggccatatcggatcaaaagcacaagcagattaagctatgatcaaagcagatgatttaggagacacatatacagcaacatagttagctaagaaggtaattagcatatacatagggttccggttccattataccttctccttgtccttcttggagaagagggcggtctggcggaagaactcctgctcctgcgcgaactcacgctgcacctcctcctggcggcgcgcgcggttggcgtggatctgctcggcgatccacttccgccgctggttcgggtaggagagcgggtgccatggcttctggttcaggtacgagtggctccacgccgtccccgccttctccttcagctccacctcccccgccgccatcttcttccctccccccaacccccctcgactccccgtcacctcctcctccatctccggccgcctcccccaatctcgccgctcccgattcgccgccgctcgaactcgattccaccctcctcgctgctcgcaaagcggattctgattctcctcccagccgaggagatgggtttcatgggcttcgtttgatgggccgattcggcggtatgggtcggcccatttaagaggcccgcttcatttccgcgagacctagaaggctagaacactaccagttgagttgactggttcactctctccccatttgtaggctggcggcgcgagacaccgccgcgttggcgcgccgctcacctcgacgccgagatggcgatgtcgtgctcttcctcctcctcctccgtgcgcctccgattgaatctagcgccctcccgccgccgaatcgccgctcccgccaacctccaggtgctccggcgcgtgggagtggcggcggcttcaatccggcttcgtgccgcccgcgccacgggaggtgatgcacggcaaccgttcgaccatgtgcctcgcggcgttgaggaggttggtgagatggaggaggacgaggagcggcggaggcggaggggtctcaagatcgccgtcgtggggtttgggaactatgggcagttcctgaccaggacgctggtgcggcaggggcacaccgtcctggcgcactcgcgctcagactactccgccgtggcggccgagctcggcgcgacgtacttcaccgacgcgcacgatctcgtcgagtgccacccggatgtggtgctcctcgtcacctccatcctctccgccgaggccgtcctccgctcgctccccgtccaccgcctccgccgcgacaccctcttcgccgacgtgctctccgtcaaggagttccccaggaacctcctcctcggcacgctcccggaggagttcgacatcatctgcacccaccctatgttcggcccggagtccgcgggcgacgggtggggcggcctccccttcgtgttcgacaaggtccgcgtcggcgactgcccggcgcgccgcgcccgcgccgaggccttcctcgacatcttcgcgcgcgagggctgccgcatggtggagatgagctgcgccgagcacgacgcgcacgccgccgagacgcagttcctcacccacaccgtcggacgaacactcgccatgctggagctccaaacaactccgatcaacaccaaggggtacgagacgctgctccgcctcgtcgacaacacctgcagcgacagcttcgacctctacaatggcctcttcatgtacaacaacaactccaccgagctcctcaaccgcctcgaatgggccatggattccgtcaagaagaggctcttcgacggcctccacgacgtgctccggcggcagctcttcgagggctcgccgccgttggactccgtctccgccgccgcagccgggtcgccgccggatgacgcaccaatcgatggcgatcttgacagcgacaacgaggaggagcaatcggagtaaatcggtgatcgtggtgtcacgctaactctgacgtcgatctcctgtgaagtcgtggccatggtcccttctcgggtcatttgcaagattcagaagttgctccccactatgaacatcaaatcgcaaatttggcttccttttcacctttcctcgcttcaatttactaccctgttcattcaaactccatgctaaatactccatacaataaaatacttgtattacatcgcgggtcgaatctatacatttttatcttaattttgcgaaatttcgtcgatttgaatacgaatttgtttgattctgaaatgatgaatggagtaataaagaaagtgggttgtatagggggcctaatcgcgttgggcctaattaatcgaagtgatcgcgtaaagtggccgacaggatgaggtagctgggccgtcggtgagattcggcccatgacgtcgtggtctggagcgacacgtatcctccaaccaaccgcaccaatatctctcccattagggtaaggggaggagcggcgatctcgtcggcgacgacgacgtcgaggtcgaggcggtggcggaggagcatggccgacggtcaggaggacgccgcgggtctggacgatgaccttgttctcgaggatgagctgcgaggtcgagaagagggcgaagacggcggcggcggcggcggcgaggaagaggaggaggacgacgtcgacggcctcgccagcttcctcgaatcggagatcctctctggatctagcggcgacgaccctaccggtgtaagttgttctcgatcgatctctcgcgtgattggcttgtgcgaatctggttgtgatttgggggtaattggttgcagcgggaggaaggggatgagaaggagaagcagttaggagatgatgcgaagaacaataagaggaagcaggagtctgaatctgatggggatagcggcagcggggaggagcagaacaagagggtgaggagagcaaaggggaaagagaaggacgtggcgtcggtggcgcctcagatcgatagcggcatgttctgcaatatcccgccggagttgttcttgcagatattcaagttcctctcatcggaggatctcatctcctgcgccctcgtctgccgcttcatgaacgtggttgcgtccgacgagaccctctggcgccgcctgtaagctttacctgaaacttcatttgctccaattttgcatttgttgtaataaaaagaattcactcacatgtttgatccatgtccaataatttcaaggtattgtatgcggtggggcctgtcatgcaataccaaactcagggagtgcgcttggaagaaactctacatccaggtaatccatccgaaacctaccttttcaagctacagttcagatgttgtagtgctgcagttttatggtgaaactaagaatggctacgcaatttcagtaccaattcaagaataaacccaaacagttcaatgtacaaactaaaagttgatatttgttttccttgtgaccttgttgcactcactgaacagaagttcagttacatgttgcaactcaatcattttcgcttgctgctagttgtctgcatcagtttgttgatgttattttcattattcgtaaattccagcaagatagagaggatatggttgagtttgtgagaaatacacctacagaattcaaggagtattatatccagatgcaggcttcaaaaaggagtcaagctccccttccctctgaagtaatcactaattcttatctccattatagtttcccacatagctatggaatcgtattatattgacaagacttaaatgtgactattgtgaattttgaaggtcaacgatgacaaggttattcttgataaaacaatagccgatcaggtgtctagctggaaaagcagcagaggcctcactgatgatgcggtcaaggggcattcttgttctgggaatacatgctcttacacccagattggtgatgcttatatttgtgagaagacaggccgtgttcatggtatgtttgtttttctcagtgtctagtcacatgtgcgcatgtaaatgtagatttgtatacatgtgaaatggttggtttcttctatttttcagtttgcgatgacgcttgtcgtgaatttgtcttggaccagtctagtgggctgctgctttgtacaatatctgggcactgctttgaaaggtggttgtgtcctgatgatgagtgggatgctgatgatgatactgtaagtctattacacatagccttctttttgtatccttcaaataatttggctgtcaacttgttttatcttgactggcatattgttctccatatctgcaaccacttcctccaacattgctaaaattttatgtgtgttattgggggtcaggttatgtacttgttcataaccctttctacttcacaatttgtaggatctacaacaagctggtatgaccgatgaagcagagccatttatgggttctggacgatttggtaatatctttgaacttttctactgtgaaaatttcttcttccaccatatctgaaattatgaagaaattaggcttttggtatcacgatttgaactttaggccatgttgggaaaggtggtggaactactaggcattgttcaataataatataaaaaaatcgtccttgcacaacagcatggccctgtttagatttcaacttttttcttcaaacttccaatttttccgtcacatcgaactttcctacacacacaaacttccaacttttccatcacatcgttccaatttcttcaaacttccaattttggcgtggaactaaacacagcctttgtatcatatttaacctacagagcaaatagccttttgtatgcacatcttccgttttgtttgtacttttatattattggattccaatagtagtgtgtggtgccactgtaccaatcggtgattgtaggctgtgtttagaatgcataagtcgtttgtttcattacattgaattactgacttgtgctctgattctgaacagcacgcgcatatcagttgggttacagctgtgctgatgagaaggaacttgaatatgccttgaggttttgctgataattgggattgcctaatcatactggcaacatgaaaccaagtttttggtttgcaagggaaattatggtcagaaggcttggtgctatgttttttttttttttacctagtttaggtttctggtatgttcctatgtgtacaactcacgcacaaatatgagacggctaaaattctgatctgttttgatcagttgaggaagctgtatattgttgtaatcttcctaaattacaaggtgcatgctagtaataaaagaaaccttctgtaatgctcactgtatttgtttttgcgctgtatttgtatcgttatgttctaattgatgtccagcttgcaaagcatcaagtttttagtgtttcagtaatgaacccatgtgtatgtttctgtgctctgttttgtgcgtgtaatgagcgtgcgcctttgtgttctgttttgtgagatcatcatattacctgattgctggtcgacaccagtattacaagaatcaccaccccgatctgtgtggttcatcaaccatgtaagaaaatgctaatggctgtaattaattcttgcggtgaaactagatagatgtcgaagatgccttggttgaattgaggaatttttttcggttttagatttttttaaaaaaatatttacagaaataatctatcggccaaaaaaattacaaaaatagaccctgccgcccacctctggggcggcaagctgacgtggcaaacgggggaggaacgggcggtgacggagggagggttttttgcaggaaaacccttccgccctctggtggggcggcaaggggcccgaatacaaaaaagccagtcggggccggctattttgcaggcggccccttgccgccctctggccgggcggcaggcctcgctgcctataaaagggctgctgcccagcccccagccctcattcttctctcctcaattccagtgaaaaaaaagaagagaggggaggagaagagaagaaggggcgaagccctgccggattcagacgccaatttcaggtaatattcatagatcctatatgtgattattgagttaaatagtgtgtattctttaaaaatttgtttgaataaatgcattatatttttagggttttagttgtactaatctagaagtgcgtattgtagatatcggtaactacgtagatctgctagtttggaatcaatacattaccgttgcattggcttatacaagaagatattacgttgtagatgtttattgcatgaaagagtaatatgatctagttatttcgttgacagatatgtcgaacaaacaaatatttcaagtttaccatggaccaggaaacgtccgttacgggccaactggggtagatctgtcagattttattgtatcagaaaggggaattgatagatcggctgagaggagtgtaccttctataaaaggatggttaatgaagggcttgagagttgatccacagacaagtgacataacaatcaatgttatagtaagttgggcaactgagggtttttattgggaactaatgccagttcaaaactctcgagtgtggagatggtatttggaaaatgcattgcaacgcgggtggcctctagctttggttccgtttgttcacccgaaggatccaggtgtgcaaatgaacatggatgatggcgagggaccaagtgctgaagtaaacgagacttctgtggaggaggtcaacgcacgagaggacgggggcgtagtagctccagttggcattcaaccaggtggagtggccgacgagggggagactgtcggtgccattgtggatgaaatggagagggaggattctgacaatgagcgtgtagaggaaggtgattcgtcagatgatgagacggatattaatccagcagaatgggctagtgaggattttttctgggctgatcgtctctgaagaggatagtgtgagatgggagtacaaagaaaatgaggttattcagggagcgatttatagtagagcagaagatatgaaggaggcggtaaaacattttgcagtgtcacttcatagagagttttgggttgccaagtccaaccggtcgcaatatgaagttcggtgtgttaaggaaaaagatggttgtccctagagagtgcacgcgtataaggggaaatggaaggattattggacagtgtcagttgttaccaagcatacatgttttctacctggtgttcagaaataccacagaaacattacttgtgcatttgttgcatctgagatgtatgcgcatgtcatcgataatctcacatatgaaccaaggtcaataatccgacacatcgaagagacatacaagtatactattagctatgccaaggcctggagggccaaacagaaaataatagagatgagatttggaacttacgaagcctcgtatgacaatttgccacgcctgcttggtgttatcgaggaaagaaaccctgggagctcttacgaagtgaagaaatttccctcaattgaacatcctagcaagagtgtgctgcaaagggcgttcttagctctacatgcatgcaagatggcattcgtgaactgtcgtcctgttctctgcattgatgggacattcttgacaggaaagtatcggggccagatactaacagcaataggggtagatgggaacaatcaggtattgcctttggcatttgcttttgttgagagtgagaataccgacagctggtactggttcctgaaattggttaaaacaaaagttgttggtatgaggccaaatgtgtgcctgatacatgataggcacgctggcattctgcgagcgatagaagagttgcagtttgggagtatggaacgaggataccccggtgtttgggaagatgtacagagtaggtggtgcatgcgtcatatgggagctaatttcttcaagcaattcaagaacaaagagctcatgaacaagttcaagaggctgtgcaatcagaaccaggagaaaaaaattcaatgagctttggaagagattagatgaattgacagccaaatgcagtgatcagcgtgcagcggctccatcgaccgccgttgctgaccctcctcaagctcttggacctctcccaacggatagtccaacattggttagaaaaactggattggagattcggaaattttctcagtggattctgcatgaaccaaaagagaaatgggccaaggcgtatgacacaggtggtgctagatatggaattatgacaacaaatttggcagaagtttacaactgggtgatgcgcggtgtccgtggactgccactagttggcatagtggagttcattttacatgggacatgcaggtattttagggatcggttccaggcagttcttccctctatgccgaacaacagcattttgtttggagctttcatgcagaaaaagctagaggagttgcgtaaaaaggccatgaaacatcgagctgtagtgcaaggtacccaacagcacaggtttgagatactatgtcaagataaggcaggcaggggtatctaccgcaagagagtgaagcaggagtgtgttctcaaagccgacggcacatgtcattgctcttgtgcaaagccgaagctgctccacaggccatgcacccatgtcattgctgccgcagcggagtgtggcataccagatgcagtatatgtgtcacagtacttcagtaagcaagtaatatatcatacatggagcggcgagatttatgggttcggcatagctggggagttcacagagactaacgatgaagtactcaatattcctgacccatcgaagctccgaggcaaggctggaaggaggaggactcgtcgcatccgcaacgatatggacgagtcggaggctggcagggtgaagcgttgcagcaaatgcgatgaacatgggcacacctacaagcattgtcctaaagacaaggagaaaccaagtgcggcggaggcaggactatcagaatcagcagcagatggagctcgccttacgggtgaaggcactacctccactcgaccacgtcctaggcgtcgtcgtgccacgtctggctacgtggtgtagttcttatgttctatgtcggcatgtggatttgcttgtaattcgtttcgaacttatcgatgtgtttatgtttcgtcgtgtaatgtcagacttcggcatgtcatgtctttaggtctcgtgatgtaacgtcggactaaggcgcctaacgtctttaggtatgctgatgtatgtcggacttcgacacgtaatgttatgttatattattgaactctacatatatgttaaattgcacgtcatcgttatgtaccattagtaacgtttgctatatttaaatagcctgtactcttgttgtacataattaatctcatgattttattactatttcataattttgcaagttatcttttgttttacattactattttttgaattgttctaacacgaaacactatatttttcagagatggcacgtcaggatacacctcagttgttggacccggcgatagatcaccgacaccggtctcaccttactgcggtgcagggggctcagcttgggacgttccgggcacggacgtgcggtgagctactcacggttcacgactcctttgtcgagaggtacgaacagtgttttactataagttagttgcactgtaatattttttataatgacatattaatttgttattgcaggctacgtgaggccggcctcctaccgatgtgtcggctggtggaggctgcggccggcgacgcggacccggccagacgatggactgtggacaggtccctcctagcagctttggtcgatcgatggaggccagagatgcacacttttcacttgccgtgcggtgaggtagcccctaccctacaggacgtatcgtacttgttggggctaccgctcgcttgagacgctgttgggccagtgaccacggctgtggactggcaggacgatctgacggcacgtttcgcactagtacagcgtgcaccgcacctcccgctcgagccgttggcacaccaccgcaacaccggacctacgaagaggtggctgcttcagttcaccgtgagtgtttttgtaccgaaatgacaatcgtattacatatttagtccgcagttaaggtgcctaacattttatcgacggcttgcaggttgagcagctacaggaggaggccgacgagtactcctacagccgatgtttggaggcgtacttgctctggctttttggctgggtgatgttctgtggcggtcacgggcacgccgtcgacaagggactcgtgcactacgccaggagcatcgccgacgccgcggtaggcgaggtgcctcagtggagctggggttccgcgttgttggcggctctgtaccgtgcactttgtgagtcttgcacgaagacggatcccagcgcgacctttggtgggtgccctctctttctttctatctgggcagctgagaggattgcgatcggccgccctgaggtggaccagcacgcgtacgaggagtcactgtacgaggagcgaccagaggtcgactaccctacgatgggtactctgtggtgccgtcgtcaggtacgttgcatcgatcttatcgtattgttaagttaattgctaagttcattgtacatcacatcgatcgtctcgtattgcagcgccgatgggctcacgtccaggttaggcggtcgtatcctgagtttgttatggagttcgaccgccttctgccgactgacgtcgtgtgggagccctacagtgcagcggctacccaggctcgtgcgccgttgggtctgtccacactctgcaccagggaccaggcgtactggatgactacggttccgatggtcttcgacatctgcgttaagcctcacgcccctttccgcgtgatgcggcagttcggcttccgtcagccctttccagtaccgtttccgaccaccgtcccagctgctgttcaccggtaagatcttgcactacgctttccgttgttgcattaaaatctgcctgttcacaataatttgtaacatctgtcgtttcacactaatattacacattaattcgcaggtactcgcgcaagggtcagcactcagctagcgactggcccgccaagttggcgacttttgttgaggactggttgctcgcaaccgaggaggtcgtggaccacgagggagagccacacactgaggagtcgtaccaggcctacctatgctggtaccagccacgcacccgtactagggtcaccttcgctcccttggagcagcagccccatgttgcgagcactagagacctctatgccaggcaccgcgaccaggacttcgctcgtgctgtgagtaccctgcattgcaccattcctttatgttttcatgtctttctcttcgtcaaattttacgaatatttacgaacaaattaaccatgcaggtcgacgacatcaaccgggtcgtcattgacggttcaacgacgatccaacgtttaggcgcggggattccggtacccgtagaggagcacctgacgacgtacacgcggatggtggagtcgatgcgctcgattctccgagtgctcacctgtcgtgcagacgacgttgctcgggcagacgcagctgtacagcggccacccgtaccgactggtccccgtccagctgcgcacgttcctaggccgactccccctccgcacggaggtaagtatttttattactatttctgtacatgcctcgcacatataagtgagccgtttcacttgctgattgcttcagggtttcgtgcaccgttcagcaccccgccttcctcggctaggccttctgttgtgccccccacaggtacttaaaaaaacaacattacttcgacaatcaatttacatacattttatgtcttagcttacaagggtcccgtgtcgatgtgtaggtttcgcccagttcgctatgacgcaggccgcccacttttcccaggctgcagggtcagcgtctcaggcagctgtgtcgacctcgcactcagcgcagttctggcagtacaccgggacttcgtcacaggcagccggcacgtcgagtcagggtccaccactggaccatgctgggacctcgtcggaccgcttgctgccttccaccttgctcttcgacatcactgacttcgacttcgcttcaggctcgacagaggacgtcattggcccctcacagctgggaggcgcaccgccggtgcagacgcaggaccaggcgcaggccactcctccgcaggacactcgtgctacccgtgctgtgccaccggatcgtttcacctactcccaggaccacgtgcgagcacaggcccggaggaccaagcgtggtcgcggcgcggggcagggccagtagagcagtcttctctttgtttacttgcttcactttccagtactgtatgcttgtgtaatgactacgttgttgttatatgtgcacgatacctttcggcgcatgcacgataccttttggcgcatgcacgactactttctgccgcaccgatgcagcctcctttattcgcgtgtgatacgagtatttgcccgccatttggcgcatacgaccaatgtaactttcggcgccgatcatgcatgtatctttcggcgccaatcaggcatacccaccataccccaccacgttcacatgtcaggggtatcactcgattttttgcgcctatataagtcgccttaatgagtgaggcctcacaatctttcagaactcagtcacattcagtactctcttccccacttgcttcattacaaatccgaccggctttcgtcaatggctagacgccggggtgttgaggatccaaactggcgtagcgatccttgtgtatacctactaccaccttggtgccagcgtcctctctgcctatgcggtgatcgatgccaactaatggcttcgaggaatcctgatattcgaggaaggcgcttttttaggtgccctaactatgaccatgaggtattttattatttgcatatgcttattcattccgtatgggcaatcgctttattctttgtaatactactctattcggcagacccgcactacggcttgcgcatacatcgagtgggtcgatacagaaaatcccgttctcgacctaaccacttgtttacaagaaggtcgctggtatttcgcatccgaaagtactgagcaatacttacagagaaaagcggcttatgaacgacaatgtcgtgaacaacagagcgactggcgggtgctaactacggcactccctccatgggaagcccgtccaagatgcaggtgtggtgatcgttgtcaggttcttctttccataaatcctacaacattgggtcgaaggttctttgtttgtccaaatattcttgacgacgatttcatggtaagaatattttgattacatgaatccttattttctcacaacatttactaactttgcttgctttacatctattctttcctccccggaaccaccaaggagatgtcaatacagagaatggatagacaccagaagggttctaactccacctagccgtgttgtgcagcttgaactaccagagcaatacagggttactaaagcgcggtttgagagaggaaagggatcctcacataggggttagctattatcggacaacttggcatattgaaatttctattgtcatgcttccttgtcccattactacatcgtcgttgtgttcaactattgcactacctccctcctagttcgaatctaatatcatctatgtaaccgcaatgcaaatagtcgtatcatgttcaaattgtactactatttcttcatgttacataattctccttgttaagtccatataatgtttctacgacccagactgcgataggcctatataaattatccgagtactaatacgtcgaataaggtacaaaataatacctcacttaacatatgaaattgcgcaacaaccaacttcaatacatttttataacaatattaacaagttttaccaataaatacttctttaccaataacataacatagaaaatcttttggccgtacttttttcatctgg

SEQ ID NO: 10363 - DNA, 1241 bp, Oryza sativa
taagcaagttttaagaattaaaacactaacttgggtacattgctcggcttgcccataaccgagggcgcggctattcgaatagattatactctgatcagaggtgtacatctttacccacaagacacatcttcctcacgtgtaaccacgtgccacataccaccacggtatacgaacggaagacgtgacatagtttccaacccatcctagccatagacaagagtaccgacccaaccccacctacggccggaacccccgggacaggcaggcaggattgagccccctagcagcaggacacccgccctgtgccatgacatctcgactaccgggccgcagctcgtgtagccttcatttgtcctagagatgtccatcgaacccccgacttcgtccatctccatccgtgtacttttgtttataaccagactgagccacaaactaagccttacccactagacatgtggaagtacggtagtgctttgcaacagaggcccgaagaccggtccttatatggccgaggtgctactatcaaaaccatgcaccccgagcccagcctaaaaccattttgaggattttgaatagagggggaggtgtgaatccaattccacaacaatccaaccattccatagtgtccaagtgatatgaatattaccacagtctagagttataaaaccacctaatgttgcctaattaatcagcgaagcatctacctaaaatcatactagtgataccacgagtagagtgtccactagttggggtttcgtttattctagggtgagcaaagaaataataacaataacaataataaggtcataacaaaggtaaataggcatggctaattaaaacaatgataacgcgggaatttaaataaagcgataatgcattaatttaaatcaaattaattttataaactgggattcaatatgctcaaggatgatgtgacttgccttgctcgctttcccaaacaccggcttcaacttccacgaagagcggatcttccgaagctgcaacgtctacacgaccaacggaaaagaaaaggcttttactctaacaaactccatataacaagcaggaacaaagcacaaaaatgggttcttgacttcttaaggaaaaattagagacttgaacggtccaattccgagttcaaatggccaagttatggccatttgaagtttatatgctctttaattgaatatttgcgaatttcttcatttaaattttaatttaaaattggatttattgcgtca

SEQ ID NO: 10364 - DNA, 12075 bp, Oryza sativa
cccaaagtctttccctcatccctcctttttccccttctctctcgggcctcctctcccctcggcccagctccctccccctcccttcctttctcaggccgcccctccctcctctccttcccggcccactcccttcctctcccctcccacctgggccgtgtcccggcccagccgagcctccccaggccgcgccgcacgcgcccgtaacgcgcgcgcccacgcgcgctgaccacgcgccccgcgtgggtcccaccgcccggtcgtcgtcctcctcccgcccagcttctctctctctctcccgtgaaccctagtttcttcctccctcaaatccacgcgaatcaatgccattctttccaaattgattggggggaattaatccccattccttcctttttgatttcccccgttttcccccttgaatggcgcccccaatcgtcgggaacggccgcgcctttcccggccaccttccatggccgccggccgccttttccgccgccgttcccaccactcccgtgcccggctccctctcctcccctataaaatggaaccccctccatgcgttctctcgttttggccccttcccgagctcccccgtggccgcatcacctctccccgccttctccttctctctctccggcgccggccagcatccagccgcctttcctcctcgcccgagcaccatccggtcgcgccgtcgccgcctcggcctcgcagccgcctcctctcccccggtcagccctccgtttcgcggggaaatcaccggagacgtgtcctcgccggcaaaacagtggcgttgccgccactgtactgcctccagccacctctgccgcgtcccctgtgcgccggccgacgtcgccaccacctctcccggcaccggaacgccatcctcttccccggccaagccacggcgtcgcccgtatttcgccggaacgccgtcgcccgcgccgtctctccctcggcctcgtcggcacccactccggccgccccttccgccgtgccagtgcgccggccgacgtcgccatctccacctccggcctcgcagcggcaaggttgccctcggcctcgcctccccttcgaccgaaccccgccggtgttcgtcgtcgtcgtcatcgttcctcctcgccggctcgtcgtctcgcggcgccgcctccgtcgtcggcatcgcagcggcgtgttccacgccgtcctcgtctccgtgcagccattgccggctgccctcgttgcctcctcgccggccccggtcgtcatcgttgtcgtcctctcgtcgttcccggtcgtcgtggcattcgtccctccgtcaagccgttctcgtccgtcgtccgcgtctgtcaagtgtgccgctgcagccccgtcgtcgtcttcgtcctcgcctccgcgtcgtcaagccctgcgccggccgtgtctcgccttcgtccaaggatcgccgccgaagtcgtcccctcgccgttcgtctccgtcgttcccgaccgcctccgccgcgcccgttcgtcgttgtcgttcccacgcctcgtcgcgtggtggtaaggatccctctccctcgctgccccgtcctcgtcctttcggtgtcgcctgtgcctgttgtgcggttgtcggccccggtacccgtgtatcggtgtcggtagtcgttcgcttgtgcgtgtggtgaccgtgttagtgtgcccgctcggtagccgcgtggtttccacgtgagcagcccgggtggtgtctagtggagtccgtttgtcggccactcgcctcggttgacacacgggatccgcttccgtcgacccgtggaccgtctctgtgtactcggtccaccgtggtcccttaggttgacatgtggggtccgcatgtcaacagtgcagccttcctgtcttttccaggctagcgcttacacatgttttatagttgcaaaacctaattacaataatccgcaaatctccatataacagcattaaacttcggatgatcatatcttggtcatacgaactctgaatcgacccgttcaagtctcctaatgtttgttataacctaaagaaccgtgtgctttctttttatgtattgttattgcttctttataggcttgtagctttgcttgtgtgcttcgcgtagcttctgtcgttccggaggatctcgaagcgtggtttgcggtcgtcgccgaaggttcggaaggccgttctctctgagcaaggcaagtcacatcatccttgagcatattgaatcccagtttataaaattattttgatttaaattaatgcattatcgctttatttaaattcccgcgttatcactgttttatttagccatgcctatttacctttgttatgaccttattattattgctattgtttattattaccttgttcaccctaggaaaataaaaccccaactagtgggtactctattcatggttccactagtatgaatttaggtagatgcttcgctgaataattaggcaacattaggtggttttataactttagactttggggatgctcatatcatttggacactgtggaatggttggcttgtgatggaattgaacacacacctccccccccctctattcaaaactcccaaaatggttttaggctgggctcgaggtacagggttttgctagtagcacctcggccactgtaaggaccggtcttcgggcctctgttgcaaagcactaccgtactaaccacatgtctaatgggtaaggcttaactcggtgctcagtttagtcctgaacaaaaggacacggatagagatggatgaagtcgttgcgacgatggatatctctgaggcaaatgaaggctacacgagctgcggctcggtaatcgagatgtctaggcaaatgaagactacacgggtcggtgcccgttagtcgagatgccatggcactggactagtacacgggtggtctcacccctttgtgtgtggcgcacccggtctagatcttgttgcttggggctcaatcctggcctgcctgtcccgggataccggccgtaggcagggttgggtcggtacttctgttcacggctaggatgggtgaagggttatgtcatatgtttacgacgggttccaaggccatggaatgcggagtaaggatgtgtcttgtgggtaaagatgtacacctctgatcagagtaaatctattcgaatagccgagccctcggatatgggcaagcctagcaatgtacccaagttagtggtttaattcttaaaatttgcttaacaactaaaatatggaatggttggcctgggttggcttgggacgagctgggacccaggtcgggttgccagttcggtctgaatcatcgtaggccttgggttaaggcaggttcgtgtgggtccacggccttgattaataatattgtgtagctctaggatcgtctttataaaatagctttgggcaactaagtgacttttaaatgctgtttacggcaaaacctaacccctattattatccccttgtacccccttgcattaatcatgcatcttccggtgtggcttgctgagtactgtggttgtactcattcttgctctatctttcccccccccagtaagagaagctttggagaagatgtcttaggtggagtcctggcttataccccagttgagcgcctgtgaagatggagccgtaggcccgctagtccgctgctgtttatttttgattgtcaggccttaagtgcctttgtaataatgtaaatattatcgatataataaagatgtgtcttttatatcatgtttgtgtggtgtaccccggcttttcctgggacggggattaatacactagagttcgggaaaaggcaattttctcggtcgcgacaccgcctcccgccggccgcgccgccgtggccgccttcgggcgcaccgagcggctgccgcgtggggcccggccgtcagccgcccgcgccctcgggtgcggctgacgcgtggggcccacggcgccggtcggtgtgagccgcgtgcacccggtccaccgtggaccatgaggctgccgcgtgggccccactcccatggacccggtccgcgcgcccctcccctcggctgacgcaataaattcaattttaaattaaaatttaaatgaagaaattcgcaaatattcatttaaagagcatataaacttcaaatggctataacttggccatttgaactcggaattggaccgttcaagtctctaatttttccttaagaagtcaagaacccatttttgtgctttgttcctacttgttatatggagtttattagagtaaaagccttttcttttccgttggtcgtgtagacactgcagcttcggaggatccgctcttcgtggaagttgaagccggcgtttaggaaagcgagcaaggcaagtcacatcattctttgaacatattggatcccattttgtgaaattactttgatttaaattattgcattatcgctttatttaaattcccgcgttatcactgttttatttagccgtgcctatttacctttgttatgaccttattattgttattgttattatttctttgttcaccctagaataaacaaaaccccaactagtggacactctacctgtggtatcactagtatgattttaggtagatgcttcgctgattaattaggcaacattaggtggttttataactctagactgtggtaatattcatatcacttggatactatggaattgttggattgttgcggaattggattcacacctccccctctattcaaaatcctcaaaatggttttaggctgggctcggggtgcatggttttgatagtagcacctcggccatataaggaccggtcttcgggcctctgttgcaaagcactaccgtacttccacatgtctagtgggtaaggcttagtttgtggctcagtctggttataaacaaaagtacacggatggaggtggacgaagtcgggggttcgatggacatctctaggacaaatgaaggctactcgagctgcggcccggtagtcgagatgtcatggcacagggcgggtgtcctgctgctaggggctcagtcctgcctacctgtcccaagggttccggccgtaggtggggttgggtcggtactcttgtctatggctaggatgggttggaaactatgtcacgtcttccgttcgtataccgtggtggtatatggcacgtggttacacgtgaggaagatgtgtcttgtgggtaaagatgtacacctctgatcagagtataatctattcgaatagccgcgccctcggttatgggcaagccgagcaatgtacccaagttagtgttttaattcttaaaacctgcttaacaactaaaatgtggaatggttggcctgggttggcttgggacgagctgggacccagggtcgggttgccagttcggtctgaatcatcataggccttgggttaaggcaggctcgtgtgggttcacggccttgattaataatattgtatagctctaggatcgtgttcacaaaatagctttgagcaactaagtgtcttttaatgctatttactgcaactcctaacccctatactataactccgttgtactcctttacatttatgctgcacttgtgggtgtgtcttgttgagtacggtggttgtactcagtcttgctcaattttttcccaaacccagaagaggagcccctcgaagatgaaggctttggtgtctagctcgtgcctgccgtcaagcgcctgtggtcgtcgccatagtcttccgctgtttttcgttgtcttcgtgtgtgctgggccttcgttgcccatgtaataattaactatttacgcttccgcttgttaaactctgagttgtatcaacttttggtgtaccttgcctcctgggacaaggaataatacacgcacgtaaggaacgcccgttgggttatttccggtcgtgacaagttggtatcagagcccccttgaccctaggacgagccgtagatcccaagccttagtgatattttcgaaataaaaatcctttcttacttgtgaaaatcctctagtctttctctgtcctgctgcttcatttatcgccaaaatctaatcttgaaaatgttgcttttctattttgtttttgtttgtagatggccggcagcatcaaccgtcgtggtctggacttgactggcttcgttttggagctgcggggcatgtgcgttgtcttggggtatccacatggagtggactaccagggcaagccgctcccggagcaggagggtgacgatgcagagccccacgctgcttgggaggtcactgcagtgatcctctctggctcacccgagaggacttcgttggcagtcaccgcgggtggagattccttctccgccgcttgccagaatgccgcactcctcgccatcggcactcttcagcagcgctacccggacgagttgcagcactcgccctaccgctaccaccctcgccgcggaggagcccgcgactacgccaccttcggggatgctagctcggaggatgacgctaccatcatgcacctggcgcgcatggtggaggcgtacgacgcggcccgtatcgacttccaccagatggtgcgccgtgggatggtcgagaacaacatgaagatcctggagctgcgtcaggagaatctgcagctgaaaaaggatctggacgcgctggaggcgcagctctgtcagctcaggatcgcccagggagaggtctgccgtcccaagcgccgccgcgtctgccgtagccagaagatcaccgcccgcaagagtacctccaggcccgagcttattcgtcagtccctagcgtggacctgcttcgtggagacccctcgtgccgagcccgtgctcgtggttcctcaggagggggaagcctccggcgttggcagcacggaggatgcgctgctgctcaccttccgccctggcccgtcgcagaagtagacgagcagttagtaggcttgcgcgtgtgttctttctcgtttgtcttcctgttggagtcgttcggggcatggttatgccggtgtgtggtataactatgtcggagcctgtctttattttatttgtttaagcaacttgaaccttaatgaaccaatttaatagcagtattaaattcaagaattatggtagtcgtgggtggttagttttaattgtcagctctctctgtttgctggttccgtgtggggttttcagatggtgacaaccaggagaaccgctgctaccggtgaaggcagccaacccgaaggcagcaacctcaacgaccatggcagcccacctccacctcctcctccgcctccaccaccaccaccagacaccaacgccatcctcacccaaatcctcgtccagcaagccaacatgatggctgctttcctctaccacatccaaaatccaccacagcataatgctccacctccaccaccacccccacaacactctaagctcgccgagttcctccgcatccgcccacctaccttctctagcaccaacaaccccgtggatgcgttggattggttgcacgccgtggggaagaagttagacactgtgcagtgcaatgatgaggagaaagtcatctttgccacccaccagctgcaggggcccgcatctctatggtgggaccacttccaggctacgcagcccgaggggcagcctatcacctgggcccgcttcaccgccgctttccagagaacccatgtgcccgccggagtcatggctcttaagaagagggaattccgggaattgaagcaaggcaaccgctccgtgatggagtatttgcatgagtttaacaacctggcccggtacgccccggaggatgttcgggaagatgaggagaagcaagagaagttcttggtgggaatggaccctgagctgtccgtacgtctggtctccggggactatccggatttccaacgcctggtggacaagagcatccgcttggaagccaagcacaaggaactggagtcgcacaagcgtcacttggcgaatttccgcaaccaacagagggctaaccaaagggtccgctacaccaacccctatccagggggatcgtcctcgcagcagcaacagcagcagcaacctcgctccgcgccccgacctcaattcgtggtgcgcgtcccacagccgcagcaacagcagagtcagcaagggactcgtgcgccccgtcctcctacgccagccgtgtagcctggtcaaggccgcagggacgttcaaggtcagcagcgtctgtgcttcaactgcttcgagcctgggcactttgcggataaatgcccaaagccgaggcgccagcaaggccaagcgccgccccgctccaacaacggtagtaaggacgtcattcggggtcgtgtgaaccacgtgactgccgaggatgtgctgacaactccagacgtcatcgttggtacgttcctcatccattccatccctgctaccattttgttcgactctggagcttcccactcgtttatatctgtgccattcgtggggagaaatcagttgggggtagaaaggcttaggaaccctatgctcatcaccacccctggaggggttatgacagcgaagttttatagccctgccgttcctatagaaattcagggaattccgtttccctcggatctgattcttctagacaccaagaacttggatgtgatccttgggatgaattggttggctcaattccaaggagtagtggattgtgcaagacgcactgtcactctgtaccgagggccggaacaaccggttgttttctttgcaccctcaatcactgtcggcaattcagaacttcatcagataggactgtcgggaacccctatcgtcagtgagttcggagatgtgtttccggaagaactacccggtatgccgcccaagcgagagattgagttccggatagatcttgctccaggaacaactcctctgtacaaacgacactaccgtatggcagcaaatgaactggtcgaagtcaagaaacagttggaagagttaaaagagaaggggtacatacggccgagcacttccccctggggtgctcccgtaatttttgtggagaataaagacaagacaaagaggatgtgtgttgactaccgagctctcaatgaagttactatcaaaaacaagtaccctcttcctcggatcgatgatctgtttgaccagcttaaaggtgccgcggtattctccaagattgatcttcgttccggttatcactagttgcgcatccgtgaagaagatatcccgaagactgcattcaccacgcgatacggactgtatgaattcacggtgatgtcgttcggtcttacgaatgctcctgctttcttcatgaacttaatgaacaaagtgttcatggaatacttggataagtttgttgtggtcttcatctacgacattctggtgtactcacaatcaaaggaagaccatcagcaccatctccgtccggtgttgggaaagttgcgggaacatcaattgtatgccaagcttagcaagtgtgagttctggttgtccgaagtcaaattcttagggcacgtgatatctgctaaaggagttgctgtggaccccgaaacagtgaccgctgtcactgattggaagcaacccaagacagttactcaggttcgcagctttctgggtttggcaggatactaccggaggttcatcgagaacttctccaaaatcgctcgacccatgacacagttgttgaagaaggaagaaaaatttgtatggagtccgcagtgtgagaaagcgttccagacgctcaaggaaaagctggtttcctcgccagttttaaccttaccggatactcgcaaagacttcatggtgtactgtgacgcttcgcgccaaggattggggtgcgtgctcatgcaggaaggtcatgtggtagcctatgcctcacgccagttacggccccatgaaggcaactaccctacccatgatttggagttagccgctgtagttcatgctctaaagatctggcgacactatctcattgggaatcgctgcgaaatatataccgatcataaaagtttgaaatacatcttcacccagtcggatctgaatctttggcagagaagatggttagaactcatcaaggattatgatgtgggaattcactatcatcctggtaaggccaatgtggttgccgacgctctaagtcgaaaaagccattgcaacactcttggcgtccgtggcattccaccggaacttaatcaacagatggaagccctgaacctaagcatagttggtcgtggattcttggctacgctggaagccaagcctaccttgctcgatcaaatccgcgaggctcagaagaatgatccggatatgcgtggactcctcaagaatatgaaacagggtaaagccgctggtttcacagaagatgaacacggaaccctatggaacggaaatcgggtatgcgttcccaacgatagagaacttaaacagttgatacttcaggaagctcacgaaagtccttattccatccaccctagcagtacgaagatgtacctggacttgaaagagaaatactgataggttagtatgaagcgggagattgcagagttcgtagccctttgtgatgtgtgccagcgtgtcaaggcagagcaccaacgaccggccggacttctccaacctctccaagtaccagaatggaaatgggatgaaattgggatggatttcatcactggacttccaaaaacccaaggcggatatgattctatatgggtagttgtggaccgactaaccaaggtagctcggtttattcctgtgaagaccacctatggagggaacaaactagctgaactctatttcgccaggatcgtaagtctgcatggcgtctccaagaaaattgtatctgatcggggaagccagttcacctctcacttctggaagaagctccaataagagttgggtacccgattaaatttcagcaccgcgtatcacccgcaagcagatggtcaaaccgagcgtctaaatcagatcctagaagatatgcttcgcgcatgtgtcctagatttcgggaagacctgggataagagtctcccctatgccgagttttcctacaataacagctaccaagccagcatacaaatggcaccctatgaagcgttgtatggacgcaaatgtcggacaccgctattgtgggaccaagttggggaaagccaagtgttcgggacagatatcctgagagaagctgaagctaaagtcagaaccattcgggataatcttaaggtggcacagtctcggcagaagagttatgcagataaccgacgccgtaacctggaattcgcagtggacgattttgtgtaccttcgggtcacgccattgcgaggtgtacacaggtttcagacgaaagggaagcttgcacctcggtatgtgggtcctttccgtatcattgctcgacgcggggaagtcgcttaccaattggagctgcccgcctccttgggcaacgtgcatgatgtgttccatgtgtcacaactcaagaaatgtcttcgagtgccatccgagcaggccgattcagagcaaattgaagtccgcgaagacttgacctacgtagaaagaccagtgaaaatcctggacaccatggagcgcaggaccaggaatcgggtaatccgtttttgcaaggtccaatggagcaaccacaccgaagaagaagctacttgggagcgtgaagacgagctgaaggcagcccatcccgatctcttcgccagttcttccgaatctcggggtcgagattccgtttaaggggggtaggtttgtcgcgtcccaaaacgactctaaaatacatcctctaaattatgcctagaataattaaaatccatgtgaaagccttcaaaaattaaaatgtgcaaagttaaaagtcaaatagggcttggaggatttttgtatatttcctaaaagcctaaaatgcgtaaataaattttagtggaattttcagagcacaaataataattaagaagaaataaacaaagttaaaaaggttttataaaaagaaaaaccctaaaaagttccctttccctccccctctccctcttgggccggcccggcccagctccctccccctctctctcctctccccgcggcccatccggcctctccccgcgcgcgcgccgctgacgggcgggcccgcccgccaccctcgctgacgggtggggcccacccgtcatccccttcctcccgccgttcccgccggcccgcccgcgccaag

SEQ ID NO: 10365 - DNA, 2381 bp, Oryza sativa
tgtccctttacgccgtcttgacaaagcctctgaggaacctaagggaacttcggctggggacgcccagagcggataaggctttgtcagatccttcagagacgaaagaccatgtaagatctggtcatgtaagagatctcgccgtgcgtattaaccaagtcgtgtaatcggaaatggattttccaacttcacagctgggggctaggatcagtgcttattcaactaaagcaagtcaaaggtccaagagccttatcctccgagaacgattctccgacgacaaggttgggggatagggagagtgtataactcaacaaactgactgatcgaagtcggtaaaagagtagatgctcatatacaaaacattggtctgtaagtttaattcattttcggttttccatacatattataacatgtcaccctttgagcattcgctcgggggctatttttatctaatattcttttttgagtactgattttaggaaaattctattcgacattatcgaaggctccatgtctctatggttctacaccaagatcgactaagacgagtacgataaatgtcgacaaggctccgtcgcagactctacgccagctcgattactcgagaacggttggtggatctcgacaaggaatacggaatgaaaagatggtgtacccgccgagataaaatttcttgacttcaatccaaattcttgattacagcaagacgggagacttagtcgtatgctctgtactttcttggttgacatcggagattgactcagacaaaccctttaggtgtccgcacgaggctgataaaggaagtctaacgttatctctgaattcaccgagaatggtcatatgagcacaataacagttactccaaggtctgtgcgcggttgagaatatgaattcgttcatttgcatcgaagtcgggggctactgtcagggttatggataccacatacctaatagtagtcgactaaatctcggcaggacccaccacataccatgtcctatacggaaacaacctgcggatataggaggagttccgataaggaaagacaaccagagttctacatggaaacgacaaggactactcggattgtatccatattggttttcctagttctacttgtacaaggggacacctatgggtataaatacaagaccccctaggaggaccagagggagaaccaacacaatcaacatacacccaccagaagccacaacatacaagcctacatacgccaagacaagccgccggatatcgacatcagagatatgcctggattggccctatccggtacctacagaagtcggccgtaggaatctagcgctatcgctgatttcgacgggcgcgagctcgaggaggaaggctaccctgttgtcgactacgagtcagaccttcagaccgccatgtcgacaacagttagataggctaccccacatattgtactggtgtgattatggtgaataagagcaataccggctccggccaacaggatgtagggttattacctaacaattcaggggcccgaacctgtataaaaatcctcgtctccatctcttttacctcagtctcgcgtgtattctagcaccgacgatccccatactatacaaataccagaattgcgacatcaaacgtctactgaaagaaaattattgatccatgatcgatcatgatctagttgtcgatgctaaaccatctaaccatagtacaataccatacccttcgtcgtccatatcatcttttcgtattagctagctgaagaacgccgatagatgtgtgtttcaaaagcacaagtcgatcatttgacttcaaaaaaacgaatcaccactaacaagtacaattaatagtctcaccgtacaccatccaacatattcagatatgcttgcagcttgcgaaagtacaaagttattaccaactgacacagtgacacacgtacccccacaagttctgcagcctctggaggtggtttgttgcacgggtgcaccgcacgggtgaagaacactttggcctgtttggacggttaacattctaataagcagctggttggtagccaaattctgaaaatctgaaaaaactgacttctagttaatttttttattctataactacagcttctcagaatttagactaaaagctagactgtttgacggagcttctaattatagaagaagctgcagctgcaggaacctccccagacagcctctatacaccgtccgttgaattaacggcagagacccaccccagtgttgctttcttaagcgtgctctcaaaagagatcgtgttgagacttgagagtcaaaaggaagagcagtaaacttgattttcaccgccaaaacgagaaaatccgtcctcctgatcttttgatctgtacctgacgattttgccttttgta

SEQ ID NO: 10366 - DNA, 8006 bp, Oryza sativa
tagatagttgacatcgtcggactttttctgaatcaaacttttataaatttgatgtcaagaaagacttgataatagggcaccctaagttcgacccatataacgcacttctcaaacaggaattaggagtggcctgctatgtatgcatgctgtagtaagatgtatttaacttctccatgtataagtgcttccttatattttatgatgatgatgccccccacctctctctctctctctctctaagaatattgagattggcaaaatagaatgtgctgtacgactacagaagtaattaagtagtactccctccgtttcgaaatgtttgacaccgttgacttttttaaacatgtttgaccgttcgtcttattaaaaaaatttaagtaattattaatttttttcctatcatttgattcattgttaaatatatttttatataggcatataattttacatatttcacaaaagtttttgaataagacgaacggtcaaacatgtgctaaaaagtcaacagagtcaaacatttcgtaacggagggagtagtatacatatatgattgccaagatacacatgcaccacgtatagctagctagctgcacaacatatatggagtatttctcataacgtacgtacacactacacgtacagtagtgaggaaccatgattgaattaagaaggtacaaattaatagtacaataggatattatatagatgatgaatgcatggtcacacaagcatttttgccgagcgggccacactaaggttgccggccggccaaattgttgttaagatagaaattaaagagtgagattacataacataggggtggtaccccatcaaattcattaatcaaagttaaggtactgcatgcgatgaagaaagatcgaaaataggaaaaagatcgagatacagctgatccaatcatgcaccaacgagacttcactgcaggggctagcatgagatgcaacttatataattaaggagctagctagcaatataagcagtatagcagtaatagatgatgcatatatggatcgatggaggggagctagtagagaccaggcttgtagttgagagcgttgggcagccactgggtgccgtggatgaagcggtcgacggtgtactcctcagctttgctagcgtcgaccacggagaagccctcccagttgacgcggcggctggtgtccgatccgggtcccgtattgttgaacttcatgtacgacacggtcttggtcgtctccaagacgtgcttgctcttgtcccactccacccagcccttcgggtgcacgatgccgtcgaggaacgactgcatgaagatgacgtgcgagtggttcttccacgggcggccgaggaatgtctcgacgcccgtcaggttctcgttgggcttggccatgatgctgcagttctggaagctgaagccggtgtcgtcgccgggcttgtcgcggccctgcgccgtgatgatgttgtgcgcaccttcccttccgcggcgcacgaggagatggcatctctggaacaccgccttggcgttgccgaagacgaagtccaccgtgcctgaaatcacgctgtcgaggtacaactgcagtccgttctcagcgtacaaggtgtcctgaaagctctccagctcgcaccggtacagtacagtgtggttggaactagagcgaagagccaacgactggttcccctccggtcccgccgtgttctgtatcgtcaggtctcgggccatgaaaccgcggcctgaggcagctgcatacagtatatatacgtacatacactgatcaaaataaaatttcatatatatatatatatatatatatatatgtcattccttcctatacaatacaatatataaacatcagcacataacatattataatgtcatactataattcaaaataacatatttcttttagaagtattggaatatagttaatatgagtctttaactgcaaattagttataaataatccaatgtcgtaagcttataaaaattagctatttattttaaaagattatcataaactatggtttataatctaaataatatagcatgaaaacaatgaaaattgtggcaagtggatagacatattgtaagcatcatatgcatgattacataatctcggtgtacttaatttatgctccagtgcagtctagctaaacaaattatttgtagagaggttggcttcgagtacataattcctaatattaattattccaaaaaaaatgatgccttcgtacgtagttatattttaccatccaatcgtgttcttgctaggctatgtgaagctttgcacacttgcaaaaaataatcctatataggttgtctcctatatactgcgcaatagatttggactctacaagcttgtgtatttaacatagtctcgaaccatcctaatccatcaattaataaataatgagaacatactttagtcttagatgtttatacaaaaatcgattcatttttttcgaaaatggttggcatataaggtgtaacacgctgtcactattttgtcatctcacaaaatctgaacttaaagtaagatttcataaagaaaatagaaaatacaatagggagcaaagtgaactaattatagaaaaacatagaaaattcttagaaaaaagctctttgcttccacttaaactagaacacccattaccataaccattacatatttttcgagtgctccgatgcttacatgtaaatatacacgaaccaattagagggcgatgattgtataaaataacacgtctattaaacactaatagtttttaagatttgtttaaaaaataaagcccataaacaatcaattctaaaaacgaaaacacattacttttaatttacactttatttgtgaaacgagactaagccaatcttctttaaactgattaagcaaattaatggaggtaaattaaatattatataatataaagacaacaaatagtttgtaaaaaaatatttaagaaatactggtgaagaatgtttttgggcaatcatacttttccactgcagcacgaataatccagtagatatgtttttcttatagtttctaacacaacttaatatgtatgcccgcgcattccttgctagttaataaaaaatattcaagctagctaaggtacgactaattaactaattaaattaagcaaggcatatgcatgcaaattaattaaacacagttacatattctttaggtagccataagagaataatactaggactacttactaacggtagccgatgaaggcatgtcgccatgcttgagggagccacggttgccggtgatcaccgtcttgcccactccgtcgccgaacaaagtcacatcacgcctcgtgatgttgagctgctcgatgtacgtcccctccccgatacggatagtgtaggacgaccgtaccttcttcgtgctcttgggcgctgccgccaaggcagcagcgatcgtcctgtaatcgccgctgccgttcttcgccacggtcacctcgaccaccggagaacgcctgccgtgcgccgccgctgatctggcgccgccgcgcaggagacgctgcagccgcggctttgcccaaccagggagttctgcgccactagttgggaggcagcaaacaagagcagccacgacgagaagaagaggcagctgcagactagtgttcttcatgcttgctcttggctcactctaactggactgaacgagttgatgtgccagcctctggttaatttccttcatatatatatctatacacacacatgcccggccggctgatagatcatgagctggagctagggcgaagctagcagtacaactccgagcctatatatagctagctagggattgaaggctcagcccaagtatttaacctaacctaattgctagatccctcctacgtactattaccctacttcccctataccttggtcggccacttgtgagttagtatatactccctccatctacttttgatagtcatatttccaaatctgaaaattttatttttgatagtcatatttcaatcaacaacccatcatcttaatgactttctcgaatttaatgcgtgactctccattctaccacacatgattggctacatgggtattgagaaatgtaaatattaatgaatcgcttgtttacgaggaataactagtagcatatttaaatgaatgataagtagaattacttatccttggtctgtgtgtcaaggtgaaatatgactatcaaaagtagatagagggagtactagtgtatcaattatcatagcgtacaatattatattataaaccagctataaacacgtatcgaaaagataaaagaagagagataagcagcgggctacaaatttatagccagctgcagtattgactccaacacacaatgtgtgtataacgagtgggaccatatattaatactgtagtatatatatatttatagataactattatatgaattgactattaaattgactatatatgatttggagctgttagttggctatactattaaacaacttgctctcagttgtgtatccgaccaaaaaatgttaaaattaagataagtggcctgtcataattgttagcctagctactgctgctgtatatcctccactatatattactctactatagctattgtatagtagtacttaattagtactagtatatataggtctcctcccaacgttcatctcgatcgatccgcatcggtcaattaatatatgtttgtgctgtagttgcatgcatgcatgcatgtacgtagggcgggtctctagctgaagtaattcttttcgccattgatccccttgatgcttggtcggtcctgcatcgatcgatcatttccatcaatatcgatcacaagcaagctaggttccattttttagtatcgatcgtctctgtcttaatagtactgaacgatcgcgagagaagaagatcgataattatggggagcaccagtcttggatgcatattatttgtacctgtattatttcgccggtgcaatgttaatttcccgctccatattatcactaccacaaaaatactcattggtgccagttataaaggcctcataggtgccggttttgggcccggctccaattggtcggtgctagatctggaaccggcacctatagctttcaacaaataaaaaaaaagaaaaataatcccggcaacccatcgccggccgtcggccacctcgcctggcgtacgcaccagccatctccaccttcgccgccatcaccagatctggaggaaaagggggtagggcggacgaagaggatgagggagggcccccagggagagagagacctgcatcgatccatcatttccatccatatcgatcacaagcaattaaggtcagattgtccatttttgagtatcgatcgtctctgtgtcttaacagtgatcgatcgagagaagaagatcgataagggagcagcagtcttggatggatattatttgtacctgtatatatatatgctgctagtacgtatacaagctagcaatagagtctgtaatgcaacacagttaatgcttgtgctatatatcagattaattaatggccatactattgtcatatatatctgcaaattaaggagcttctttttaatttcactctcaagttctcaatttgttcagtagtacgtggtctgcctatgaatatatgttcagaccggagaccatgatcacatggtgggcgctggctctgtatctaacaatatatgcaagcatgcatgcatgttctatgttccatcgtatcctcataaaccaactcgatagatctaccagagatgactcaaactcaatgctggagatcgagaccatgatagggagtgtttaatttgtatattcggtttattagtcaaacactaatttaacccaaataaaatattagtctgttggtaattttgctgattatcttataatagtttcagtgaatatttaaaaagatgaagcatatggttgaccaacgttaatcacacttgaatttatcgtttagtcactggtaaaaatatttaaaagatgaagcatggctgcatcctgtcggtcactacttcaaaaattatttttgttgacggccaaaataaaaatttatatataacgtatatagaaatcgcagtgtagttacactgtagttacaatacaactatagtgtaattacattatacttgcgctacaactatactatagcacatccacacaagtaatatacatcacaaattgacacaactttgagtaataaactacaaatccacataagcaaccgtgagtataacctaatctgaaatttggcaatgaaaatttgcagaacctacaagagttggaaatggcggcggcgctagcgggtgaaggagacggtggacgatgccggcggtcgagggtagaggccgccggatccaacggttggcggtgcggtggaggcggctgccgccggatctggcaagcggcagtggggtggcggaggaggaggcgactggcggtcggtggagaggcgccggatccgcgtcccccaaacgtgtcaaggcttgcggtcgttaggcgtgtgaggcagcggcgtccggcggtcggcaggcggaggaggaagtggccggcggtggggcgggggagaggccgtggtggtcggatccgcgctctgtagcccagatccagtggccgatggtcggaaggtggggggaggcgacggtgtctggtgatcgggaggcggaggaggaagcggccggcggtggggagagaggccgtggtggctggatccacaccctgtaggctagatccggcggccggcggtcgaaaggtgggggaggcggtgctggccggcggtcgggagacggaggaggaagcgaccggtggtggggggagaggctgcgatggccggatccgcgccccgttggccagattcggcggccggcggtcgggaggcggaggaggaagcggccggcggtggccgctactcgcgcgtggagtcggaggccgccgccggacttggtgctcggcgcgtggatgctcattgacgggagaaagaaagaaaaatgagagagagagagagggatggataaggtaaaagaaaaaacgagagatgagtggtctcggaccgtcggtgggagatagataaggattgggttgggtggtttctacctgtgaagaacaaaaaaaggacctgttagagatggattgggttggatctgtgtaacacactgaaaattcgaccaacaaaatcaaaaaactctaaaaatacggaccttcaaaaactttttaaataaattacatcatgccggttttattcgcctttttcattggattttgatttcgtagtttattaatcgcgaataaagaataagtaattaggaataaaccctaaaattcatttggctaaataaataattgaaaaacaatttaaaataaagattaggtgaggaaagaaataaataaaatattatcgcgaccatattggtaacaatcaaatttaagtgcgatggaataagaattagccctaattaaaaattcaaataaattatataaaaataaaatatgggtaatattaatctagggtgaatacattggttagaataacagagtaaacttcatttatgcaaaaataaggatttatagaataaaatatatataggaaataggctaaaatagggttaaatgggacctggcactattcattgcacgctaggtgttcgagagcgtccctagccctggcccctcctctgccgcgcgcgcctcgcgccccgagccgccgcgcgcccatcgccatcgccacatcgcgccccgcgcccttgccctgccgcgcgcctgtcacgccgccgtcgctgcgcgccgctcgcccgtcgccgtcccgcgcgccgagccccgtgccgagccgcaccaagccccgcgctgcgccgcccgcccgtcgcgtcaccgcctcgagccccgtgccgccgcgccgtcgcgtcgccactcgtcgccgtcaccctgagccccgtgggccgccgtcgcgtcgccattaagccggccacccccctctccttctatcccctcttccttataaatacct

SEQ ID NO: 10367 - DNA, 28633 bp, Oryza sativa
tgccgcgccaagacgccaggccgcgccacgacgccgtgacgccaagacgctgcgacgccatgacgccgccgtggcacgccaccgccgcgcaatgtcgccgccgcgccgcgcgccacgccgaagccacgccgcggctccgctgccgccacatgaatgaacgatcgatcgtgaacgaacgaaacgtgacttaggcgagaacttaacgacaacgtgaacgttaacgaacgaccatgaacgaacgtgaacttaacgtgaatgtgaacgaatgaacgtacgtgaacgtgaacgcgaacgtgaacgaacgtgaacttaacgtgaacatgaacgaacgtgaacgaaacgtgaacttaacgtacgttaacgtgaacgaacgaacgtacgtgaacgatacgtgaacttaacgtacgttaacgtgaacgaacgtaaacgaacgaatgtgcgtgaacgaaacgtgaacttaacgagaacgcgaacatgaacttaatgtacgttaacgtaaacgaacgaacgtaggtgaacgaaacgtaaacttcacgagaacgcgaacgtaaaatacagtatatgttactttgcgtttagcctaatacatttttttgtatgttgcagaaaagaagttgttgtcgtcgtccctcaagccggagtggtagctagcccttgaaggaattcgcgcaggcaagtgatgtaaatatatgattgttagacttagcatatatgattatctagggttgtaatgtacgacacttagacttagcatatatgattatctagggttgtaatgtacgacacttagacttagcatatatgattatctagggtcctaatatacgacacttagacttagcatagttgactattagagttttaatacaagattatttgagttttaatataagattattagagttttaatacaagattattagagttttaatataagattatttgatttataattagacttagcatatatgattatctatggttctaatatacgacacttaggcttagcatatatgactgttagagttttaatataagattcttagagttttaatacaagattatttgagttttaatataagattattagatttgtaattagacttagcatatatgattgtctagggttctaatatacgacagttagacttagcatatatgactattagatttttaatataagattattagagttttaatacaagattatttgagttttaatgtaagattattagatttgtaattagatttttaatatatgattgttagagttttaatacaagattagtacagttttaatgattatctagggttctaatatacgacacttagacttagcatatatgattgttagcatataagattgttaaagcaaatatgacctatagacctaacaaatattttttgtatgcacagatggctgatcgcgacgaggaacagatactatacaatacaatcgcagagggaagcaaccagtactggaacgaagaagaggggaacgaggatccaagccagtacttgatcgaggaggggaacgtggagagggatgcggagacgaacgaggaggggaacgaggaggaggaggctagtggaagtcatccctccgctggacagaagagggcacgcggacaacaaggtgccgcgaagaaaatagagggtcggcacatcataactgaggtggacgaagacggccgacctagtgccccggcagaagcagccaagaattttgtacgccacaacggttgggttgtgagggacaacgtgcctgtcagcacggtgtactggcacagaacaagggcacgcagggataatgacagctttgtcccggaatcagagaaagagatgctgtggaccacaatgctcgagacgttcacgctacccacgggtacggagaacacagtgaaacagttgactcagaagaaaatggcagaacaattccagagcttcaagggagatctctacaagaaatacatcctgaagggactaacaccgaacttcgacgtattcccaaagctaagggatcattgggacgagttcgttgcttacaagataggccaacaagggcaagcgatgatggccagaaacaaagaaaatgccgccaagaagaagtaccatcaccacttggggtcaggcggatatagcgtcgcaatgccgaagtgggaggagatggaagcaggattaattgagaggggtatcgaaccggccaccgctaaatggtcggatcgatcaaagttctggtactatctgcacggtggaacacttaacctagttgatggctcccttgtcttcagcgatcagatacgcgagggtgccagttgactaacggacgcagtggaagcctcttctcagggcacattccgacccgacagagagaaggacgagctgtcactcaccctacagactcccgagcatccaggacgaacacgagggaaaggcatgattccctggaagattggattcaaggaggacatccacacgtacaggagtcggatgaggagcaagaaagataccgaggcgaagattgcagatcttgagtacagggtatcgagctacgagctcagcatgcaagaggaggtggcaagaaaggtggatgaacacatggctgcacatcggtcccaggatccccaaccgtacattcctcctgcaatggtcaggccatcaggcaatcgtagcagctgcgcctcaacggggcaggtaggatcacagagcatggacgccatgcaaacccaggacgaaaccacctgccccgttgatgagatcacgcaacggacaccatgtgagctgcatattcccttcaagaacttatcaatcaaggtatgctcgtagttttatgattttttgacttgtacattccgcaagttgctgcttaggttgattactaatagatgacctctcatcacgtgaaggtggcgtcgggaatgaccatcccaacggacatttcagggacttaccactgcaggccaatttcagcaggatacttgagggtcgaagttgagctggtggaagccgcgtacgaggacctcgagttggactacccaggaggagacggtgagactcatctacgagacacaagccacgccattatactatagcgcaagcggtacatcatcctccctgggcgacaagcggcgtctcgtgcaccatctcctccggctccgccatctcctactgcaccatatcctccggttcctccgccacgtcctcctgcaccatctcctctggctcctccgccacctcctcctgcaccatctcctccggctcctccgcctcctccacctccaccgtgtccgcctgcacctcccaagacaaggtctcaccaagctccaccgcctacccgcacaagggcaacgaagaaggcgaaagttgacgccaccaaaaacaaggagccgccgtacgattgcagtcaagaggagcttgacgcttatgtggcaagagaagtgaagaggcaactcaagcctcggagtcctgaaaagaagatacctattgacccgagcatgaagaacttttcaagggaatgtccacagcaaacaagcagaagatgaagctatcggactatgaccgaacacttaagaaagcctattacaagaagtccaaactagtccctcagcttggagaacaaccaaaccaagaggtcgagccgttggtgaccggcgaagaatttggcataacggaattcatttcggacaccggtctaactatggatcagttgattggaagcgcatcaatcccgaaggcggaagtggcatacaagtttgaactcggtaaaccgcttgtcacgcctgagcagctgcagtccctaccgacacagatgtacaaattcaatgaacggtacatggaaatgagcgccgagggtagagagatgttcggagcgaggatcagaaacctcgactttttgcaaggagaagatgttctctggctccatttcaaggatgtcttcgatctgtaccatctggatgccctcgatgtctctcttttgagcgcatggattttgtaagtatctttgagttcgatttgtttcgttcaataactagctcctgtcatatatgtaaacaataataatttcattttatcgttgtagaatggagattcaaaaggcccgacggcagggggtttacgatactgggttcatcgaccctcggaaaatcaacacccaaatgattgacaagtacgagaaagacacagaggacaatctcgtccatctctaatgcagcagcatttcaagacgttcatactactgccatacaacacagagtgagtttttattgtcgttcgaacaaatttcgtatatatacatatagcatgtacattttcatatatatatctcatctcacgcatattccagcttccactgggtcctgttattctttgacttggacgcatagagagtcactgtgtacgactcaatgaataaagaggagaagatttttgacaaggtcttccgactgatagacaggtgatataatgtcatctattccaaagtcgcgggaattttattgctattatgttgatctcgggtaataattaattaatcatagcttgcaactgcacatgtagggcttgggatcggttccgtcaattggtccgcgggacttggaaagaaaaacttggatggaggtttcattttccggtgaatatatgcatgatccaaaattgtattgaattaaatctctaattacagttaaatataaagattatattaaatctctcatcgtttctcatgtagtatgcaaagcaggaccagggaactaacttatgcgactactacgtatgcgagtatgcccactgcctatcaaaccaaatatacaccacacgagagctcgatgtacgtatacataaaccattcaaaatttcattgcgtatcgatttgttaagttgtttattaatttcatatattgatatgtcattatttttcgaatgatagcgtattcacatgagggataatctcccacacaaggattttatcacggttgttcaagaacaactgatgggattcatcaatgaagaagtctttaatcccgatggtaaattctactacgacggatcgacaattcataacgtcggtccttccttttctgacataacgccggcgtcgaagtcgtagctatagctagcaagaaaatgaattgtactatacatgtatatatatatatatatatatttatatatgtgcgtacatttactttagtgttaatatatattttggtaacatatatatgcacataagatgttaagtgctttatattataaatatgtgtgtatatatatgtatatatacatatacacatatgcacatatatatatatatatatatatatatatatatatatatatatatatatatatatatatatatatatatatatatatatatatatatatatgcacatatatatttctccaccagtgattcggcacctccttctgcggacaggctttaatttggctgtcttggcatggtcgacgcaacggtggagtagatgcatggcaccggtgacaaccgccgcggcggaggccccggccggccgtgaaggagttaaggacgaggcggcagcttccttggtccggagaggagaggcgattatgtcgacgttggtggcgctgggcagcgatctccggccttgtcgaagatgggcttgctaatgtgcttggggaaactcttttccggcatgcatgatgacttccgatgaggtggacgcgatgtggggacctttcccgacgattccccgagccggcgagacgtactcctccattctaaaatattcgccgttgacctttttaaaaatgtttaaccgttcgtcttattaaaaaaaattatagttttacaaattttataaaagttttgaaataaaacaaacggtcaaatatgtttaaaaaaattaacagcgttaaatatttaattagggaaggagggagtacatgggaaggagatgagcttggcgaagcgacacgtacggcaagttgccgtgagagatgtcgtcgagttggtcctcgttgttcgcttgcatgctgtcgaaatccgcagaggctgtgctctcgtggtatggtttcttccctgttaccttccatgcatacgacatgtatgagttacttggtttttgcgcatggtcttgtagcatgcagatgacgtggcctcgtctcattggtcggccgggttgccttgcatggtactgttgctccttgcttgtagatgtttgttgcatgcatgtcatttctctttagacgatcgacgcgtcttcaatggaaaatacttcgtgtcgtgcgttcgatcggaagacaaatatcggatatcaactttctcatctgtactaatctaaagttgattcaccttttccatgactctgactttacatatgcacaattcattttctctctccacgtctcatctttgtatgtagttagcatttatttagcttcatgtagtctatgagtatatacatgcaagaggttctagttgtaagctttaaaggaatttttcttgtaaactatttatccaatttactatccgattgcacaattgtattcgttgcaattaaatctctataacaagatatcatatgattctattccgattaaaaaaaatacataagtttcaaccgatgagtttggatgtttcacgtgtaagaaataaatgattcaatcagagtttggctatattgcacattttaagttttatgttgccatggatcttataaaatgttccatggcattatttcgatgtttcgataaacatttttctgatgtttcactagtttatttgtgaatgttgcatgtggtattattggatgtttcagtaagtattttctaatgtttcactaattcatttttaaatgttgcacgtgttgtttgggatgttgcaatgaatattttctaatgtttcaataattataactcgttgtttcacgtataatatataaatgttccaattagcaatataatcacatttataaattttatcagaaatataaccaagtgagatattgtaaagatttaattataacgaacacaatggtgaaatcggatggtagatcggataagtaatttagaagaaaaattagtttaaaggtttattggtagagaatatgaagagagagatttcatgcatgtatacacgagagtagggtataggcttgcatcatagcagcttaactacgatggttttttttgcatccaatcagacaggtgggtgagcaacgtccgaactgtagcagtcgctttttttgcatgcagttagacaggtgggtgagcaatgtccgatcttttgctaaatatcggacgtccgatctgtagcagtctccggcttcaattcatcgttgctgattcttgatgctgctgtagtgaacggcctgaaaggagcggatatatagcgaggccgtcgtcgaggtggtcaccagtgtagtcgcggccgcgtcgagcgtggtgaagatgtcggcgtcgaggctgtcttcgtcgctaacgcggcattcgttgctggatatatggcggcttgtgtgtgtgccttggacgtagatgcgtgcggatgtccttcttcatgctctcgtcgcagccgttgctgctatcctctgtggccttgccgtaattgttgttgctatcgtcacggctgcagatgagcacggtggtgtcgaggcctcccggtcggcctcgccgaggtggcaggctgtacagagcttgtcgtgttggcaacgtcacctctttcttcggtgtcgtcagtgacgaggtggcgatgaagacggcacggcacgatggtgtagaaggcatcccggccggatttgccgatgtcgcgggcagcatgggggtcgtgtagcatatatggccgcctggttctttgatgtcgtcggtgccggcgaggtggcaaagtagataagttcggtgattgctgcggtggtggagtaggcggtgttagaaaggttgttcctgttacatgtgttgttacatgtgataatgcatgagataataggataaggttggttcggttagtttgtttcagagtttgtttctttcttctatccgaatcaactgagattgatctcatctattgtaagccacgttgggggctgttcccaactcatattaacacacgtacgcggcctcgagagaggtgacaacgcttccgtattttctacatggtatcagagcgaaaatcgcatcgactggattgcatctagcgatggcatcctctagctccacctccagcaacccccctatccggccaatccacccctgacaagctcacccgcagcaatttcttgctatggaaagcgcaagttctcgccgtgatccggggggcgcgcatggaaggctatctcaccggtgcaaccaaagctccttcggagacaatcacggttgtgccggagaaggaaggtggcagacccacctaaaccgtgaaccccgcgtatgaggcatggctcgccgcggaccaacaggttctcggctatctcctctcctccttttcgaaggaaattctgacgcaagtcgtcaccatggagatggcggcgcaggtatggaaggggatcacagagatgatctccactcggtcgcggtcgcagtgtctcaacacacgactcgcgctctccatgacgcgcaaaggtgacttgagcgtgtccgactacatcaacaagatgaagatgctggcggacgagatgaccgccgccggcaagcccatggacgacgaggaactgatgggctacgtgcttgccggcctcgacgacaactatgaaccggttgtctccagtttggtaggcaaaagtgagccggtttcaatctctgaagtctactcacagcttctgagttttgagtccaggggaaaacttcgccagatgacggctaatcacggatactcctctgcaaatgccgccaagcgcggcggcaaaggcggcgacttcagtcgcggtggaggcggcgggggtcgcggtggccccaggaacaacaatggccgtggcgaacgcggcggcttcagtggacgcggacgcgatggcaacaacaccggcggctgctacaactccaaaccccgtccggtgtgccaactctgtggcaagattggacacgtcgtcaccgattgcaggcacaggttcgacgactcgttcgtccctgatccaaagatggcagcagcagcctcctaccatgttgatccgaactggtatattgataccggtgcaacggatcacatcacgggtgaactagagaagttagcaacccgtgagaagtacaatggcaaagatcagatctacacggcaagtgatgaaggtatggaaatcaaacatataggccattccattattcgcacacccacacgcaatttgcatctcaataattttctccatgtaccacatgcacagaaaaatcttgtatctgctcatcgtcttgcccttgataaccatgccttcattgaagttcattctcgtttctttgccattaaggatcaggtcacgaagaatcttcttcttagagggcctcgccgaaacgggttgtatttgctgccacggtcgtcgctcccttcatccaagcaagcacttggagttatcaagcctagtctcaaacagtggcatagtaggctaggtcatccttctttttcaattgttcagaaagttattaataataataatctcccttgtttaggagatcttcatgagtctggattctgtgatgcctgttagaaagccaaaagtcatcaactcccctatcctaagtctattagtgtgtcaagtgtgcctcttgaacttatgttttcagatgtgtggggacctgctcctgattttgtaggaggcaggaaatattatgtgagttttatagatgattttagcaagtttacttgggtatatttgcttaagaaaaaatctgaagtttttaagaaatttcttgatttgcaacaacttgttgaaaggctctttgacctcaaaataatctccatgcaaaccgactggggaggggagtatgaaaaattacatagcttttttttttaccaaaattggcattagtcatcatgtgtgatgcccgcatgctcatcaacaaaatggatccgctgaacacaaacatagacatattgttgaggttggcctatctcttcttgctcatgcttctatgcctttgaaattctaggatgaagccttcttagctgccacttatctcattaatcgcaccccatccaaggttattcaatttgctacgccattagagcgactcttaaatcagaaacctaattattcatccttgagaacctttggatgtgcatgttggccaaaccttcgaccttttaacactcgaaaactccaatttcgctccaaacagtgtgtttctcttggatatagtaatattcataagggattcaagtgtcttgatgtgtccactggtagggtttacatttcgcgggatgttgtgtttgatgaacaaattttcccgttttccaagttgcattctaatgccagtgctcgtctacgggctgaaattaatctcctaccacacactcttttgaatccgacttttaccactatgggtgcgaatataaatggtcatatgtttgattctcctgagcgtactgatacttctggtgaaattgcagtacaaatttggaagaaaatgatgtaggttgttggtatttcttaacgtcattactagaaatataattcccagcaatacccagcaatgacgcagaaatactcctggtatattatggttacagagttcatccacaagcgcacggatataccattgtagcatttcacctgagagtattccaagggtatcgtatgtattttatcccgtggaaagattatgtagagagagattgactaatagtttatatattacttgtgataatcatattctaagaaggggttaagataatccaagggtagagtgacagacaagcattaacaactcattctcataataaatgatctaagctaggtggaaagaaaagagaaaggaaatatattcctatacttctaatatacatagtatacatacattctagttaactgatatactagctaataccctctatccgatgccctcctggtattttgagaagccacccctgactgccgagttccttacgacagcccgtcatgaccatacaaccggggctaaatacggaggaataccctccccaggaaattaacttaggattatataccggcgcggaggaatacccgtactaagctgtgaccatcagcggcccatctctcatccgcaatatataacccaaataatgatatcccgcaatctagacaccacgtctaaactaccagatactactctaataccatcgtcatgacatagagtaatagcataagtaaacattatacccgcaccaaagcatctcccagataagctagccgtatattcagtataacatgaacataatgtagagtaggtactcatatactcggaaagtattccaataccaaaattgtacatagaagagtgtcacgaccggaattaacccaacgggcgttccttacgtgcgtgtattattccttgtcccaggaggcaaggtacaccaaaagttgatacatttcagagtttatcaagcggaagcgtaaatagttaatttattacatgggcggcgaaggcccagcacacacaaagacaaacgagaaacagcggaagactagggcgacgaccacaggtgcttgacggcaggcacgagctagacaccaaagccttcatcttccaggaactcctcttctgggtttgggaaaaattgagcaagactgagtacaaccaccgtactcaacaagacacacccacaagtgcagaataaatgcaagggagtacaagggagccataatatagggggttagggtttgcagtaaacagcattaaaagacacttagttgttcaaagctattttgtaaacacggtcctagagctatacaataatcaaggccgtgaacccacacgaacatgccttaacccaaggcctacgatgattcagaccgaactggcaacccgaccctgggtcccagctcgtcccaagccaacccaggccaaccattccatattttagttgttaagcaggttttaataattaaaacactaacttgggtacattgctcggcttgcccataaccgagggcgcggctattcgaatagattatactctgatcagagatgtacatctttacccacaagacacatcttcctcacgtgtaaccacgtgccacataccaccacggtatacggacggaagacgtgacatagtttccaacccatcctagccatagacaagagtaccgacccaaccccacctacggccggaacccccgggacaggtaggcaggactgagcccctagcagcaggacaccggccctgtgccatgacatctcgactaccgggccgcagctcgtgtagccttcatttgtcctagagatgtccatcgacccccgacttcgtccatctccatccgtgtacttttgtttataaccagactgagccacaaactaagccttacccactagacatgtggaagtacggtagtgctttgcaacagaggcccgaagaccggtccttatatggctgaggtgctactatcaaaaccatgcaccccgagcccagcctaaaaccattttgaggattttgaatagagggggaggtgtgaatccaattccacaataatccaaccattccatagtgtccaggtgatatgaatattcccaaagtctagagttgtaaaaccacctaatgttgcctaattaaccagcgaagcatcttcctaaaatcatactagtggtaccatgagtagagtgtccactagttggggttttgtttattctagggtgaacaaggaaataataacgataacaataataaggtcataagaaagatacataggcatggctagataaaacagtgataacgcgggaatttaaataaagcgataatgcaataatttaaatcaaaataattttataaactgggattcaatatgttcaaggatgatgtgacttgccttgcttgctttcccaaacgttggcttcaacttccacgaagagcggatcttccgaagctgcagcgtctacacgaccaacggaaaagaaaaggattttactctaataaactccatataacaaggtggaacaaagcacaaaaatgggttcttgacttcttaaggaaaaattagagacttgaacggtccaattccgagttcaaatggccaagttatggccatttgaagtttatatgctctttaaatgaatatttgcgaatttcttcatttaaattttaattttaaaagggtttattgcgtcagccgaggggagggggcgcgcggaccgggtccacgggagtggggcccacgcggcagcctcatggtccacggtggaccgggtgcacccggctcgcaccggccggcgccgtgggtcccacgcgtcagtcgcacccgagagcgcgggcggctgacggccgggccccacacggtagccgcttggtgcgcccgaaggcagccacggcggcgcggccggcgggaggcggcgtgcccgtgcccctatggtcgccggcggcggccataggcacggcggagcggcggccgagagaagggaaggaaagggggaaacgaggcgacggtccacggctcaccctaggtcgacggcgatgacgaaaaggcagccggagcggaggaaggcggcggcgcggctcgggtcgacggggtcgacggcgttccggcggtcgggagcgaaacggaggggtggacgaggtcggcgaggatgcggcgaagcctaaggaggtggcgccgaggtgggaagtggtccggggcgacgacggcggcggaccggagctcggcggcgacggcgaagagagatagtgacgacgcgggctcgattccggcgaggaggaagggcggcgagaggcggaaacggacggaggaggtgcgggaagggtttaaatagagccggggcgagagagggcggccggggaagggaggaaaccggcgcgggaggtcggctgccatcaatggcgccggcgagatttgcgggggcaaatccgcctgtttgaacgcgagagagagagggaaaaatagggggaaagggagaggggatcacagggagtgatttccccctctttattgcacgcggggacggcgggaggcggcaggattcacggcggcggcggcgctagggcgcggcgaggcggcgggagcagcgggaggaaggggatgacgggtgggccccactcgtcagcgagggtggcgggcgggcccgcccgtcagcggcgcgcgcgcggggagaggccgggtgggccgcggggagaggagagagagggggagggagatgggccgagccggcccaagagggagaggaagggaaaggggactttttagagtttttctttttataaaatcattttaactttgtttatttcttaataattattatttgtgctctgaaaattccactaaaatttatttacgcattttaggcttttaggaaatatacaaaaatcctccaagccttatttgacttttaactttgcacattttaattgttggaggctttcacacggattttaattattctaggcataatttagaggatgtattttagagtcattttgggacgcgacaaagagtattctaataaaagtacaaagcttacaaaagagaagaggaaagctgctaaagccatacccgaactcttccgaaggtttctagactcctgactcctattctatttctattccaccagctagatactactaaactaaacttaagagaaatgagagagctattgcttgaggtgtgtgttgaagtgaagagagtgagctccttatatagaggtagttatgacggttgtggaaggggaattgtccgaagtaccccgcaaccgccatcaggagaagatctggagcgtccctgccaaaccccacatccaacaatggagagatgggttcggccgaacctggggccggcccaaccagcccacaatttggctgctggcatcctggacttctcttctccgcagacttgtgaaatttggcccaattcatcgtgtcaattctgagttcttggtctattcatacataagtctggttctcgacatcgtccgattgatttatcgtctaagttgatgtcgattctcctccactttattgtcattctctataaaaggttagtatacctaatactagtgaaatattattattctaacaaacatatgcattgcaagcatcactagttctcctctattttagtaatattgacggtcgaaactgattgataacgaccgtcaacacaggttcagcacaaaataatgaaatacagtctcccggagtgagcacagaagatccggatgatgccgtcctttctcccgctccctcggcgtcctcgggatcgccacatccatctggcgctggtgcagacgctggctctgcctctgacgcctcctctgcaagcgctgccagccattcaggaggtgacagcagcccggtgcagcctggtgcagccgacagcacatcgcagggggacagcatgcagggggacagcatggcagccgatgtgcaacggcagcagtcgcaacaacagtctcgccctgtcactagtgcccagaggcattcgcaaggagaaagtttacactgatgatacactcagatataatttccttactaccagtggagaaccacatgatttagatgaagctctctctaatcataactggaaaaatgcaatggatttagaatataatgccctgatgaataataaaacttggcatttagtaccgccttgtaaaggtcacaatataattggctgtaagtgggtctatgagataaagcgtaaatctgatggaactttggatcggtataaggctcgcttagtggcaaagggatttaagcaaagatatggtattgactatgtagatacttttagtcctgttgttaaggcagctattattaggactattctatctattgctgtatctagagggtggtcctttcgccaacttgatgttcagaatgcttttcttcatggccatcttgaggaagaggtctatatggcacaacctccaggttatgaagataaacgaaaacccaaccatgtttgcaagcttgataaagcattgttgtatggtttgaaacaagcacctagagcatggtactccaggcttagtagtaagctttgtgatattggttttaagttatccaaggctgatacttcgttgttcttctatagtaaaggaggagttactgtatttgttttgatatatgttgatgatattattgtggctagttctacacagaatgctactgatgctctattaagtgatctgaagcaagactttgctctcaaggatttgggagatttgcattattttcttggtgttgacgtaaataagatacgtgatggcatattgctaacacaagaaaagtatgcttcagatttactaaaaagagcaggaatggaaaattgtaagtcttctactactcctctttctacagttgaaaaactctcagcctataatggttctgtgttaggagtaaatgatgcaacaaaatacaaaagtatagtgggtgcactttagtatttgaccttgagtaggcctgatatatcttatgctgtgaataaagtctgtcagtttttgcatactcctacagttcaacattggtggatggcagtaaaaaggattctgagatacattaagtcctctatagatcttgggttgaggattactaaatcctcttctacacttgtaagtgccttttcagatgcagattgggctggctcaatggatgacagaaggtcaactggaggattctgtcacatcctgatttttgttttaggatttataaattatttaataaattattattagaatttatattaaatgttcattaatttacaagtgaagttaaatgtgggaaataaaatttcctaaatataaagcatggatggatttaattttttattaaattctccatggttaattatactctctggaatattctcggatttttcggagctcaattattaattttaatcatacaaagagcatttcagtaattattcacatattaaattaattattaaatggtctaattataattttgttaagtacttttagtgtccaagtattttcaggatttttcttgaaattatttgagcattggaagtatttttaacaattcaaagatcatttcagtgattaatttaattggaaaagtaattaaaattcaccttttccttttcgggccgaattaggaaaagtcctctcactctcggcccagtctcctctcagcctgcagcccttttcctctctttcccgaagtcttctttgcgtccctcctttaatcagtccttggtagtagaagcccagccgaaagtctagtttgcttccctgctacagtggcatcttcaatctccagccggctggagacagagcccgagccagccgcacagtacctgtatagccgcggttttcccctccaaatccaaccttttctcttgtgttttcctaaaattagttgaggggaaatattcctcttatcctcctctatcctctcccccaagaatcggagcaaaccgttgagtatcttatccgaatcgaactcgttttcgagtttatctccaaaaccgagtttttatttcccggatcgatttcttgcgggaggagtccgatctcttcaatccaaggctataaataggaccccctagtcctcctctttcgtttgccccctctcccgtggtctcccgtgtcccgtagccttgccgccaccaccgcctagctcaccggtcgccgccggccatctccggcgaggtagcgccgccgtctccatcgtcgtcgccggtcgccgtcaccaccgttgggtgcgctgtggtgagaggaagctcggccacccttccttttccgtcgccggtcaccggagctccgccgccccgtgcaagccgagtcgccgccgccgccccttcgtcgccggccgtcgtcggtggtcgtccggtgtgttggtaagtaccgtcgcgttcgtctcgtcgttctctacgtgtagatgccctccaaaatcccggccgaccaccctagctccggcgaggttgccatccgagccggccaccattgatgacgtcatcatgacatcatcatcttctccttttccagtttttctaatagattgaatcttctgaaattcatagtaactcagtttaatatggttcaagttgcaaaagttgtataaaataaagatctacatattaaaattgtccataaattgaattaaatttatttaattttttttaaatgggctttaattagatttaatcttgtaaaattcataataaattcatttgaagtcagaatgaggccgttcaagtctcataattcatctaaaattatgatctacgtgtttgtttactttttatgtactgtttatttggtttttattagtctttttcctcgttttgtgtgttagcttgtcgtttccgtcgttgcgaaggttcgcgagtgcgccggaagtattcaggaagattaattgaagaccgattattgcaaggcaagtcacacagatcctaaacacaatcctttgagcatgttgattctatatttaaattctctatttatttcaactgtgcatttattttcgaatgtcaccgggtggtgtgaaccttttcctttgttatggccaatttgcattgaatgccctattccttgataccttgggtaataaattgattagcttgaaccttatgtattggtttggttcagctaaatgttatatatataattgcttagcaatgcttagaaacattagctcactaatgtgatgaatcatatatactacattattatttatggttatatttaatggtagctcacgatggttaatcgtgttatgataattaattgataattaaaacttgattaaaggtgggttgtgagcaaatggttttgaaagtcgtgctcatggcaattaaggaccggttcgcgagctactgttgtgagacatttaccgtaccaaccacaagccagcatgggcaacggctttaccttttgtatagcatgattcattgcggggcaccagactgtgaagcggcgagaagtccgtgggggtcgctggggagtccattgcctctggttttgagggggagattatgatccaggaacggtgcactgttttgagttgtgttgtgcaaagggtactgtcacgatttccccctttgcaatgccgtggtggtatttcggggcatggcaacatgtgtggaatcgtgtcttgtgggtacagtggtacacctctggccagagtaaaactattcgaatagccgtgcccgcggttatgggcgggttaagcaatgtttttcgtgattagtcccacacctctcacaataattatggatgttataactggtaataatttgcttagctcctggtttggagttagatctgtacagccggggttggttgttcaggtttggttgggcctgagcagcatgggtgtgctgttcagtgttgattaaaattgatgattaattactctactgttttatttatcttaaatctttgctaaatgctgcttttgcaaatgagcctatattatgccatcctttggtatccttgtgcacttgcatacttgctgtgtggcttgttgagtatgtcatatgctcattcttgcaataatcatcaaacctcctttgaagataaaggatccagaaggagaagacgtttggcttataccccagttgagctgcctgtgggagtggagctgaagccatcgctagaccgttaattccgctgctgttttctttcctttgtaagtatgtaacgttattattaagatggatttgtatattaaattgtcagtttgtgtacctcggctgattcctggacgaggattttatgcacaaattagttcggaaattactagtgaatttccgggcgtgacagattcactgtgtttttaggatcaaatctaatatcctggagtgctagaaagcaagccacagtatccaggtctagtacataagcagagtataaagcagttgctaatgctacagctgaggtaatgtggatacagactttgttaaaagaaattgggattcattcgcctcagtctgcctgtttgtggtgtgataatctaggtgctactttgtcagtaaatcctgtttttcatgctcgtactaaacatatagaggtggactatcattttgtcagagaaagagttgctagaaaacagttagaaattaagttcatttcatctggtgatcaagtagctgatgggtttactaagcctcttcttatacaacagtttcagaagtttagatacaatcttaacttagataaattatgattgagggggagtgttagaaaggttgttcctgttacatgcgtttgcgggtggacaaaaagctcaaaactcgtggctcggatcggcttgtagcaagctcggcttggatcgactcgaactcgtagtcttaatgagtcgagtcgagctagccttttagctcgtgagcttaacgagctaactcgtgagctgctcgtttagctcgttactataaaatatcaccaaatctttatgaacttagtgtttattgactagtgcttagtcttttatttacatcaaaactattcatatttagtaagtactatattagttagtgtttattattatgttaatacataataaaatgttaaatttgaaattattaatatgatactaataagatatagctcgttaacgagcctaacgagccagctcgcgagccgagccgagctagccttttagctcgttaacattaacgagccgagcagagctggctcattaagataacgagctcaaacgagccgagccttaacgagccgagctggctcgttatcctgcgttgttacatgtgataatgcatgagataataggatatggttggttcggttagtttgtttcagagtttgtttctttcttctatccgaatcaactgagattgatctcatctattgtaagccacgttgggggctgttcccaactcatattaacacacgtacgcggcctcgagagaggtgacaacgcttccgtattttctacaggcggagccggcgacgatcatggcgatgaagatcttggcatccgcagaggcggaggcgaggatgaagcgtcgaaggcccccgtaggtctccgatgcacgcttgcagatcggttttttttggcatgtctcatgcctgtagatcgatctgtttgcggacgtgcatgcatgcatgcatgccatcgtggtgggcgcgaggccggccggtcgcccggcccctgcatacgggccggcccgtgcgcatggcttacgcgatcagcggcatggccgaagcccgccgttctgcggcgaatcgcttgatctcgatcccccatccatacatgcccgcgtgcggcaacatcggcggcggcagcggttgcctgcgatcggcaaggcgacgcgacgacgatgttgatcatcagacctcatcgaccggcacaaacatgcaagccaaacaaccaacagattagattcataatttgtaatccaaaatcaatctagctaattaattagcaaggacaaaaagtgattctctgtagatgtgatgcatgtgttgacgatatgattcaatcagtggcgtagccaggggtagtcccggtgggctcgggactacccccgaatttggcccacgaaccctcacccccaatattttagcctagactcaagcctaaagaagcaagcccaataagaaactagaagcacaggggcatgactcatcacttcatcagtgtgcagccgtcaccatcgtcgctccgcgattcataggaatttttttcgtataaaaggattgataggattcaatccttttgtctcaaaagctttcataggatttctacttttttctccaaatcatagggtctaagtaaaagagacttaattagtaaaagccaagtgtttttatgaggctttgatgagggttcgcaaagtctccctcgtcacttagctccagtcctgctcagtgcgaggacagtgcggtgaaatactctggctagcgtaaaaatgggaaggatgcgtgttttacatgcatatgtaaaatatatttcaaacaattttggtaagtctaaaaatatatgtagtattattgttcctatatggtctttaacattatattttgattgttgatttctttcataatattataaaggacaaagaaatccacatcatgagaaaatattttaggatcaaaatataataatactacatgcataagactaagcacggatatttttagttcatttattggtcaagttttcaagtagtgctgatttttatgaacgtattatttccttcatcgtataataatttactatcgtttgtcatagatagttgacatcgtcggactttttctgaatcaaacttttataaatttgatgtcaagaaagacttgataatagggcaccctaagttcgacccatataacgcacttctcaaacaggaattaggagtggcctgctatgtatgcatgctgtagtaagatgtatttaacttctccatgtataagtgcttccttatattttatgatgatgatgccccccacctctctctctctctctctctaagaatattgagattggcaaaatagaatgtgctgtacgactacagaagtaattaagtagtactccctccgtttcgaaatgtttgacaccgttgacttttttaaacatgtttgaccgttcgtcttattaaaaaaatttaagtaattattaatttttttcctatcatttgattcattgttaaatatatttttatataggcatataattttacatatttcacaaaagtttttgaataagacgaacggtcaaacatgtgctaaaaagtcaacagagtcaaacatttcgtaacggagggagtagtatacatatatgattgccaagatacacatgcaccacgtatagctagctagctgcacaacatatatggagtatttctcataacgtacgtacacactacacgtacagtagtgaggaaccatgattgaattaagaaggtacaaattaatagtacaataggatattatatagatgatgaatgcatggtcacacaagcatttttgccgagcgggccacactaaggttgccggccggccaaattgttgttaagatagaaattaaagagtgagattacataacataggggtggtaccccatcaaattcattaatcaaagttaaggtactgcatgcgatgaagaaagatcgaaaataggaaaaagatcgagatacagctgatccaatcatgcaccaacgagacttcactgcaggggctagcatgagatgcaacttatataattaaggagctagctagcaatataagcagtatagcagtaatagatgatgcatatatggatcgatggaggggagctagtagagaccaggcttgtagttgagagcgttgggcagccactgggtgccgtggatgaagcggtcgacggtgtactcctcagctttgctagcgtcgaccacggagaagccctcccagttgacgcggcggctggtgtccgatccgggtcccgtattgttgaacttcatgtacgacacggtcttggtcgtctccaagacgtgcttgctcttgtcccactccacccagcccttcgggtgcacgatgccgtcgaggaacgactgcatgaagatgacgtgcgagtggttcttccacgggcggccgaggaatgtctcgacgcccgtcaggttctcgttgggcttggccatgatgctgcagttctggaagctgaagccggtgtcgtcgccgggcttgtcgcggccctgcgccgtgatgatgttgtgcgcaccttcccttccgcggcgcacgaggagatggcatctctggaacaccgccttggcgttgccgaagacgaagtccaccgtgcctgaaatcacgctgtcgaggtacaactgcagtccgttctcagcgtacaaggtgtcctgaaagctctccagctcgcaccggtacagtacagtgtggttggaactagagcgaagagccaacgactggttcccctccggtcccgccgtgttctgtatcgtcaggtctcgggccatgaaaccgcggcctgaggcagctgcatacagtatatatacgtacatacactgatcaaaataaaatttcatatatatatatatatatatatatatatatatatatatatatatatatatatatatatatatatatatatatatatatgtcattccttcctatacaatacaatatataaacatcagcacataacatattataatgtcatactataattcaaaataacatatttcttttagaagtattggaatatagttaatatgagtctttaactgcaaattagttataaataatccaatgtcgtaagcttataaaaattagctatttattttaaaagattatcataaactatggtttataatctaaataatatagcatgaaaacaatgaaaattgtggcaagtggatagacatattgtaagcatcatatgcatgattacataatctcggtgtacttaatttatgctccagtgcagtctagctaaacaaattatttgtagagaggttggcttcgagtacataattcctaatattaattattccaaaaaaaatgatgccttcgtacgtagttatattttaccatccaatcgtgttcttgctaggctatgtgaagctttgcacacttgcaaaaaataatcctatataggttgtctcctatatactgcgcaatagatttggactctacaagcttgtgtatttaacatagtctcgaaccatcctaatccatcaattaataaataatgagaacatactttagtcttagatgtttatacaaaaatcgattcatttttttcgaaaatggttggcatataaggtgtaacacgctgtcactattttgtcatctcacaaaatctgaacttaaagtaagatttcataaagaaaatagaaaatacaatagggagcaaagtgaactaattatagaaaaacatagaaaattcttagaaaaaagctctttgcttccacttaaactagaacacccattaccataaccattacatatttttcgagtgctccgatgcttacatgtaaatatacacgaaccaattagagggcgatgattgtataaaataacacgtctattaaacactaatagtttttaagatttgtttaaaaaataaagcccataaacaatcaattctaaaaacgaaaacacattacttttaatttacactttatttgtgaaacgagactaagccaatcttctttaaactgattaagcaaattaatggaggtaaattaaatattatataatataaagacaacaaatagtttgtaaaaaaatatttaagaaatactggtgaagaatgtttttgggcaatcatacttttccactgcagcacgaataatccagtagatatgtttttcttatagtttctaacacaacttaatatgtatgcccgcgcattccttgctagttaataaaaaatattcaagctagctaaggtacgactaattaactaattaaattaagcaaggcatatgcatgcaaattaattaaacacagttacatattctttaggtagccataagagaataatactaggactacttactaacggtagccgatgaaggcatgtcgccatgcttgagggagccacggttgccggtgatcaccgtcttgcccactccgtcgccgaacaaagtcacatcacgcctcgtgatgttgagctgctcgatgtacgtcccctccccgatacggatagtgtaggacgaccgtaccttcttcgtgctcttgggcgctgccgccaaggcagcagcgatcgtcctgtaatcgccgctgccgttcttcgccacggtcacctcgaccaccggagaacgcctgccgtgcgccgccgctgatctggcgccgccgcgcaggagacgctgcagccgcggctttgcccaaccagggagttctgcgccactagttgggaggcagcaaacaagagcagccacgacgagaagaagagccagctgcagactagtgttcttcatgcttgctcttggctcactctaactggactgaacgagttgatgtgccagcctctggttaatttccttcatatatatatctatacacacacatgcccggccggctgatagatcatgagctggagctagggcgaagctagcagtacaactccgagcctatatatagctagctagggattgaaggctcagcccaagtatttaacctaacctaattgctagatccctcctacgtactattaccctacttcccctataccttggtcggccacttgtgagttagtatatactccctccatctacttttgatagtcatatttccaaatctgaaaattttatttttgatagtcatatttcaatcaacaacccatcatcttaatgactttctcgaatttaatgcgtgactctccattctaccacacatgattggctacatgggtattgagaaatgtaaatattaatgaatcgcttgtttacgaggaataactagtagcatatttaaatgaatgataagtagaattacttatccttggtctgtgtgtcaaggtgaaatatgactatcaaaagtagatagagggagtactagtgtatcaattatcatagcgtacaatattatattataaaccagctataaacacgtatcgaaaagataaaagaagagagataagcagcgggctacaaatttatagccagctgcagtattgactccaacacacaatgtgtgtataacgagtgggaccatatattaatactgtagtatatatatatttatagataactattatatgaattgactattaaattgactatatatgatttggagctgttagttggctatactattaaacaacttgctctcagttgtgtatccgaccaaaaaatgttaaaattaagataagtggcctgtcataattgttagcctagctactgctgctgtatatcctccactatatattactctactatagctattgtatagtagtacttaattagtactagtatatataggtctcctcccaacgttcatctcgatcgatccgcatcggtcaattaatatatgtttgtgctgtagttgcatgcatgcatgcatgtacgtagggcgggtctctagctgaagtaattcttttcgccattgatccccttgatgcttggtcggtcctgcatcgatcgatcatttccatcaatatcgatcacaagcaagctaggttccattttttagtatcgatcgtctctgtcttaatagtactgaacgatcgcgagagaagaagatcgataattatggggagcaccagtcttggatgcatattatttgtacctgtattatttcgccggtgcaatgttaatttcccgctccatattatcactaccacaaaaatactcattggtgccagttataaaggcctcataggtgccggttttgggcccggctccaattggtcggtgctagatctggaaccggcacctatagctttcaacaaataaaaaaaaagaaaaataatcccggcaacccatcgccggccgtcggccacctcgcctggcgtacgcaccagccatctccaccttcgccgccatcaccagatctggaggaaaagggggtagggcggacgaagaggatgagggagggcccccagggagagagagacctgcatcgatccatcatttccatccatatcgatcacaagcaattaaggtcagattgtccatttttgagtatcgatcgtctctgtgtcttaacagtgatcgatcgagagaagaagatcgataagggagcagcagtcttggatggatattatttgtacctgtatatatatatgctgctagtacgtatacaagctagcaatagagtctgtaatgcaacacagttaatgcttgtgctatatatcagattaattaatggccatactattgtcatatatatctgcaaattaaggagcttctttttaatttcactctcaagttctcaatttgttcagtagtacgtggtctgcctatgaatatatgttcagaccggagaccatgatcacatggtgggcgctggctctgtatctaacaatatatgcaagcatgcatgcatgttctatgttccatcgtatcctcataaaccaactcgatagatctaccagagatgactcaaactcaatgctggagatcgagaccatgatagggagtgtttaatttgtatattcggtttattagtcaaacactaatttaacccaaataaaatattagtctgttggtaattttgctgattatcttataatagtttcagtgaatatttaaaaagatgaagcatatggttgaccaacgttaatcacacttgaatttatcgtttagtcactggtaaaaatatttaaaagatgaagcatggctgcatcctgtcggtcactacttcaaaaattatttttgttgacggccaaaataaaaatttatatataacgtatatagaaatcgcagtgtagttacactgtagttacaatacaactatagtgtaattacattatacttgcgctacaactatactatagcacatccacacaagtaatatacatcacaaattgacacaactttgagtaataaactacaaatccacataagcaaccgtgagtataacctaatctgaaatttggcaatgaaaatttgcagaacctacaagagttggaaatggc

SEQ ID NO: 10368 - DNA, 28213 bp, Oryza sativa
tataaactttggatgtataaactttagatgtatagaaatactatatatagaaaatatttgaattcaaattcaaattcaaattcaaatttgaatcggatataattcaaattcaaatttgaaacgggtatataaacttttgacttataaactttaggtgtatagaaatcctatatatagaaaatatttaaatttaaatttgaatcggatataattcaaattcaaatttgaaacgggtatataaactttaggtctataaactttaggtgtataaactttagatgtatagaaatactatatataaaaaaatatttgaattcaaattcaaatttgaatcggatatataaacttttgacttataaacttttagtatctaaactttagatgtgtaaacttgaggtgtataaactttaggtgtataaatttactaaaataggaaagtaatacggtgccaaaaaaggaaaccaggtagagggagggaggggggagggtcgctacccccattggcagggcgatcgatcgcccattagggctgcccgtataacgcgccctataaaaatttgaaataaatcagaaccacaagttttccctcccactttatcactgcaaaactacctccattaatcaatcatagatttagatctaaatatgccactattgtctcaatgattagcttggaggtgaagataaatctcagtgttcctattgtacttgaaagagataattcaagaaataccattaacaagtgtttagatccaagaaataccatcgacaagtatgagttctaagaaatgtcattgtacaaacgactttgtcccaaaaataccatcgatgttagggttccgtccattccgcgccgttaagtactataggatgaacggtgtatttaatggcgcggaatggacgaaacctaacggcgatggcatttttgggacaaaattgtttgtacgatagcattttttagaactcacacttgtcggtgtcttttcttggatttggacgattgtcattggtatttctcgaattatctcttcttgaaattagcaaccgtaaacatactatccaagcagacttatcaattattatatactaaagtttattaaatttcctacaaacgctctcaaacgctctcaagccgccacacgggactcctaaaaacactcgtatgctgccacgtggcattttaatatatgaaaaacatctagccatcgatttttacttaaaccagtgggtctattattttagacgattagattagtattagattagaaaacgttagttccccctctcatctacccgcatgtacgtacgtacgcctccctcatcttgttagttcgcaagttacgtgcatacccatctttttatacttcctactttttccttttatatttatatatttccatctgtaataccctagcacggtagatataagttgctaatagcacgccgcagaagcaagcaagcaggaaacgcgcgcaaaccatggccaaatacaaaggggctcacgttggagaagaaaggtagcagctatgactttctccccatagtattcgatatataagctacaaagggagtagtgtgtagttggtttaaaatttatatctgtattagtaaaaaaaattatgcaattataatatgctattagcacataattaattaagttttaattattacaaatttgacaaattgaaatatttgatattttaaagcaagttttatatagaaggtttttacacggaatacaccgtttagtagtttgaaaaatgtgctaacgaaaaccaaggtaaaatttgtatcttcgtgagaaagaacagggccgagtgaaaagtttgctccaataaaaaacattccaaggaactcatatagaaagtttttttttcaaaaattgtactccatccatcccaaaacataacattttttggtggttggaacatattcttaatactatgaagctgcacaggttttctgtccagattcatagtactaacatatatcacaacctacctaaaattattatattttgggacagagatactactgtttaggagatcaggaatcgtccccatgaaaatccataatttgtaagaggaaaaaaaagggcagcgaaagttaaggaaaaaattgtagtaaaaattatgaatatgtgataaaaccttacttgttatagcatctccaaactatacaaaaccatcttaggaggtatataaacggtattctagagttagagggtgctagatagaattttatccaaagtttaaaactttagggtgctagatagaattttatccaaagtttaattggttacttggacttttttcttaaaaaaatatggaaaaaggttgaattgtgagatgctcttttcgtcctagaatatatgacatagtactgaattggacatacatattcagatccgtagaactacaatttattccatatgatcatagttattgtattttgggacacaaatagcattaagtactccatctgttttaaaatatagtaatctagtattagattgtgtctaatccagtattaagttgctataatttacaagagggagtagtacgatgagtaaatgtaatggtttttctttgaccgaaatactatgggtattgttagaaaggattacaccgtgaaataaattttaatgctataaatccttgacgaagggagagtatcctataaatctataaagttcatctccactaagtacaattaatgctaattctctcttctctcatgaagtcacatcacctcaattttttttagcccttggatgattcatcaagggtgtaaattatatctcttcacatcaccttaattttttttagcctttggatgattcatcaagcatatattgcatctcttccctctcaaaagacacaccatacaacccaatcatttataacctttgaataaactgataaaggtaaaaaaaatatgaacacatgaaaaaaatcgtatagtaggtaagaaagaaaattttagaactcatatctactatattatcctacaattctcccatagcaatgtgcggggtacccatctagtttaacagacgacgcaatacgagcgattaaataagcaaaaattgcaaaaaccaccccaaatgccactttgagtttgagatgcccccataagaagatttgatgcaaatccctacctcctaattcactttggtttgatttaggcaccttctctccacacgtgcatgattcctgaagaatctcgtggcgaaatcaactgagtcccactcgacgggagcaagagattatgttgtttgttctgtataagacgatcatttcgttgtgttatcatgggcatttcactgtgtttttcatggtatagtagctatatattccaaactgatatcatgtgtactgaacaacatattcctttttttaagggacgtaatgagcatataaaaacatttgaacatgaagcagtaatcatatagctatattagaactgcatgacttcatccgttgcaattggtcagatgacccaaaatagcaggtttcaatacagtttaatcagaaattaaaaccacttaatcaaatgcaaaagggacctattgacaaatcatcacgatgagcggaactcggctaatttcgcacgagatgctccaggaatcaagtatgtgtagagagaagtggctaaatcaaaccaaggtgaattaggaggtaggaatttgcaacaaatcttcttaaggggacatttcaaatttagagtgatatttggggtgctttttggaattttcccattaaataatggaaggacgtgtgcattgtatcgctgaattgtgggacccgtttgtcagttggccatctcttatcgttttgcgtttgcattttcctgtttctttcattctttctttccccgtcgctttcatcggattcctcgtgagtgagatgcccctggcgccggcgcgccgccggtgtaggccggtggtgggggaggcaggctcaccggagcatttaccaccaccatagaagcggggcccccgccgcggaggaggagcgcaggaggcgaggcggccgccgacgcagagttgggcggggcaaccggcaacgtcctgacggacgctgtccggcgagagcgcggcgccctgaacctgaagtgaaatctccaatgctatgggctccgaagaaatcctaggtgcgttcttgagaccgatctagaagccccaaacatttcaactgcaacaatttgtccttttcatttgtcttgcagttcttgcggctgggctcaaagttttagacctgtatagaaatttatattttgttttctttcgattgcctttgcaaatcgcaattcttggctactcagaaagtcttaccacgcaaaagattaatcatatagtagtatattgtgtgctgagttttaggtgatcttggtagtaataggaggagaggctgcatgaaatccgggcacagccgtgtggaattggtgaagaacctagtcagtagtcaccatcgattattgtctgattgtctggagataggcttgctggtcatggtaagtagggatgcaagcgggacgggcaagcgggcttgtttatcccgcttatcccacttctaattcattttttcttttaaattttgtactaccatgcgaaaaatagactagcaagcaggtttttatgtgggtagcgggactacccacttgcatccctaatggtaaggtgtatgatgtatccgtgtatgcaacttgcaaggcatgtccatattctggatggatggaccctgataaaggtactagtttgtgcgaaagagtgcagctggattccatgtgccaagatgaacatttcttttccatgtggaacgaacctctcagctaccaccatgtgcattcccacccccaaattcttagaaattagcttgcatataagttggaacggtatgaagaatgaactttccatctagccacagtcgtcatggcgcgggcaatgatgttgttgctcttctgttcctatgctctggccttggtctctgctgggagcagcagcagcagcaatgccacagccgatgagctcgccctcctgtccttcaagtccatgctatcaagcccatccttgggtttgatggcatcatggaactcatccagccacttctgcagctggacaggagttagttgcagccgtcagcaacctgagaaggtcattgcgctgcaaatgaactcttgcggcctgtctgggcgcatatcgccgttcttgggcaacctatcctttctcaagacactggaccttggcaacaaccagcttgtcgggcagataccttcggagcttggtcacctcagcaagcttcggatgctgaatctgagcacaaatttgctccgaggaagcattcctgtggagatgagaggatgcaccaagctcatgacccttcacctaggcaataaccagcttcaaggtgagatcccagctgagataggttccagcttgaaaaatctcatcaatttatatcttaccagaaatcttttgtcgggagagatccctcaatctctggccgagttaccatcgctggaactgttatctttgtcgcacaataaattatctggagaggtaccatctgctttgagcaatctcacaaacctcttgaatattcgtttctccaataacatgctttcaggagtcatcccttcatctttaggcatgttgcccaatttatatgagctcagcttaggttttaacaatttatctggaccaatcccaacttctatttggaacatttcatctttgagggcgctttctgtccaaggaaatatgctaagtggaaccatacctgctaatgcatttgaaactcttccacatctcgaggaattatacatggaccacaaccacctccatggtaagattcctgtctcgctgggtaattcttccaatctgtcaatgattatccttggcgctaaccttttcaacggcattgttccccaagagattggaagactaagaaagttagaacaacttgtactgacacaaactttagttggagcgaaagaacaaaaagattgggagttcataacagcattagctaattgctcccagttacaggttttggtattgggtatgtgtgagtttggtggggttcttcctaattcactttccagtcttagcacgtcgctaaaatatctctctctttcatataacaatattttgggaagcatacctaaggatattggtaatctcttcaacctacaagtccttgacctcgcttggaactctttcatcggaactcttccttcatcccttggtaggcttaaaaacttgcactattttaacgtatacaacaatgatcttggtggaccaatcccatcgacaataggaaatctcacagagttaattacgttgtatttgatgtcaaacacctttagtggtaggttaacaaactcacttgcaaacctgacaaagttgacagaactggatctttctagtaataacttcataggcccaattcctagtggcttgttcaacatcaccacactttctatagctttggagctatcctataacaaatttgaggggtcaataccacaagaaatagggaatctcgtaaatcttgtaaaatttaatgcagagtcaaataaattatcaggtgagatccctagcacccttggacaatgccagaatctccaggatctcactctccaaaacaacatgttaaatggtaatatcccagaacaattgagtcaactaaaaagtctacaaactcttgatttctccagaaataatttgtcaggtgaaatccccatatttatagagaactttaccatgctctcttatctcaacctttcattcaatatatttaccggagaagtgccaactactggtatatttacaaattctactgcaatctcaatccaacacaatggaagactttgcgggggaataactactctacatttacctccatgttcttcccaattaccaaagaataaacataaacctgtagtaattcctattgttatttctcttgttgcaacactagccgtcctctcattgctatacatactttttgcttggcacaagaagatccaaacagaaatcccttcaactacatccatgcgaggccatcctctggtttcttattcccagttggtaaaagcaacagatgaattttccatagccaatttgttaggttctggttcatttggttctgtgtacaaaggagagctagttgctcaaattggtgaaagcccatattatgttgctgtgaaggtactaaaacttcagacttctggtgcgcttaagagttttgccgctgaatgcaatgcactgcgaaacctacggcaccgaaatctcgtgaagataattacagcctgctcaagcattgataacagcggcaatgacttcaaagcaattgttttcgactttatgcccaatggcagtttagaaggctggttacatcctgacaaagatgaccagattgatcacaaatacttgaatcttcttgagagagttggcatactacttgatgtggctaatgcgctggattatctacattgccatggaccaacacctgttgtacattgtgatctgaaaccaagcaacgtgcttttagatgctgagatggtagcacatcttggagactttggacttgcgaagattcttgttgagggcaactcattgctccaacagtctacaagctcaatgggatttagagggacaatcggctatgctcctccaggttagccttttatttttcctgtcctcctttcttatttagtcctgcctagtgcttttattaataaaatgtacagctagacaaactttttgggaagttgcaaaagaagtttgatttatgtgaagcagctatagttattatgaatctgttacattttggattacaagcgctataaaaatcgtaactttttttttggcaaactttgattaaacagagtatggtgctggaaatacggtatcaactttaggagatatttacagctatggaattcttgtgttagaaatggtaactgggaagaggcccatcgataacaaatccatacaaggattgagcctccgtgagtatgttgagctgggtctacatggtaaaatgatggatgttgttgacacccagctgttcttgggccttgagaatgaatttcaaaccgctgacgattcttcatgcaaaggaaggatcaattgcctggtcgcattactcaggcttggattgtattgctctcaggaaatgccgtcgaatagaatgttaactggagatattattaaggaattgagttcaatcaaacaatccttgtagggaacacataatatatcttcgagctgaatgacagtttggagttcattccttgggtgttcatctcttaccctttcataccttgttggtttatgcatagtacactgaagtatactgttatcacttgggatttggacatctgagcgcaaaaactgattgccatgcagttgtaatcatgcctgtaaacatatccgtgatttatgtcttttttgctaggaaaagcatttttccagtcatgtactttgtccagacataataaattactacgcaactttgtaatttgtgatcgttacaacgagtatactatgtcgtgcatctctctaacaataaatatttagtagtttataattttataatcgtgtttagctgctgtacattcctttgtaaacacggttttgaaacatcatctccgggcaacattgatgcaggcaggcgagcgtatcactgagactgaaccgtgggaccaacgtgtaagtccctccttacacgtagaccggaggcgtccggtgaccagggatgcatttgcccgggtttttttttcgcttattcgacttgtagtttatacttaacccacttttagtttattttttttctaaattttgtacaccatacgagaaataaactagcaagcggtttttatgcggataatgggaccacccacttgcatccgtaggtagtgctgccgtcgtccgccgcctgatcctgacgtcgtatatatttttttaaaaaaattactacagcttgaatgtctgtggatctactggtagaagagtattcggtgggttcataagacctcaacatttttgcttgcaattacaaaattgtgtatcaacgtcagcaacttggataacacacacgtcctgtgcatttctgcagagtacgtggttagaatttggctagatgtaagacgctcattcttggataatatactaccaaaggacctttgtactatatgaatctatgatgaatctaggagagcataactgttcaagttccatgcatatttgaggaccggtaacgtctgatttgcactttgtgtgtcgtcagctgtttttgctggggccatgtttttcacgttgcatcaagggtatcatcatccatgttatgcagctttttttgtctgtatgaagtgtggccaacttaattaattacatggcaggtctgttaacaaacaactactactccctccctccctccctattttaattttaatgtatgacgccattgatttgttgaacaacgtttgatcattcattttgttcaaattttttatacaaatacaaaaatatttatgtcatgcatgtttaaagaacatttaataataaataaagccacaataaaatagatgataatcacataatttctttaataaaatgaatggtcaagcgttgataaaaaagtcaacggcgtcatacattaaaaaacagagggcgtattatttatgtacaacattcatgattatggtatcaatatgacatttttctaattttaattcatgtgtccattttaagcttgacaccgtaccgtcacggaaatcaaagcttgtattattgcatgattaattaagtattagctaatttttttttaaaaaagaattaatataaatttttaaaataactttcatatagaaagtttttgcataaatcacaccgtttagcagtttgaaaagcgtgagcacggaaaacgagaagatgtgttggggaaatggggaaagaacacagcgtaagtgcctattatataatactacctcatgtactaaattttatactagaaagtatcttgaggtaaaaaaaattagtggtaccacgaggtataaaatgttaaacggtaaaattgctcgggataaccgtacgtgcaatgtgtccatatgcgtgtccaacacggtcagataagaaagaattacagggctagtagtcagtcgatcggtctcgcacgcaaagctatcagtcgatctgtctcgcacgcaaagtcatcagtgtcaagcaaaaaaagcatctctcattcaaagtactccgtttgatcgtcgtcagatcgtgtactgcgtgatcgttggtgcagaaccgttctcatctgcaaaaaggaatctgcgaaatttgaagggaacatattgagcaatgtactaaatttttcttactaaacttttactaacaatcatatcaactgtttgatttaagtagatggaagttaaaaaaaaatctagatacactcatagcatgacacatcagtgttagtaagaatttaataagaaaaagttagtacgtatagtattttccgaacatatatacgtttcgagttggcctcttatacttctcctgggaataacccaactgaatggacgtatggattatggattatctgactacaaagtgaaaagtttgctccaagaaaaatattccaagctaaggaactcatatatagaaagattttttttcaaaagttgtacttccaccgtcttaaaatatagcaatttttaggccgatgagatatatcctaagcctgtccagattatagaaataggatatatcgtattcaataaaaaaatattatattttagaacagagataagtattatttaggagacaggtctctttcccatgataattcatattttgtaagaggggaaaaaacagggcagcgaaagttaaggaaaaaataatagtaaaaaatatgaatatgtgataaaccgtacgtgttatagcatttccaaacttttatagtcaaatcaaataatataaaaggaatctcgctcaagaagtcaaggtcgaacatggcttcatcataactaatgagccgtatgacaagcgtatacatcaccatcttcttttcggactatcactatcaacggggatagaaatatcttaccacaaatttgagaaccaaaacttattttttaaaaatggattttagttaaatttgacaaaaattcaaatggcggttccacctctctctatatatgtaaatcacctcaaacttgattgaagttgatgaaaaaatataatttagtttctatggagaggaaaaatagagaaataaagatggccctctgaaatttcattttaagtttggttgcaattcattaaaataattttaaaatgttcccttgtagtttcttgtaaatgaagttttcacattcacaattttggttttacaaggattctgattgttagtggtgacggccggggtgtcatcttgctgctcccactcccagcacatccctcctggtggcaacgcgaactccacctttggagcgaaggagggaagaaccaaagaagatagatgggagggaaagttgaggggtaaattttgatccttgagaggatatccatcgtttgtttagaaacctcatttaaacggttatgaaaaatcctagaaaattttgataacactcatacaacatatctatacaactctataaaattttataggtccaaactcaactcacacgtcgagatataaaaaaggataaattcagcgtatgaatagtagcgtactatttacatctgaatttgtctttatttttgtttctcgatgtgtagatcgaattggagcttgattttttatgaaccgatatatatcactattctagcattgtcaaatttttaaagattttttataactatttatatcgaatttggaagaaaaagatacttgatgggatattcccttaagagattactatccactctcgggtactaaggttatttctcacccagattgctgagttgacagccaagaatggcaaaataaaaacaatccagtcggtccagatcgacctgaaaagaaaatttttggatgtcacatcggacgtttgaccggatgtcggaagagattttcggacacgaataaaaaaactaatttcataactcgcctgaaaaccgcgagacaaatttattaagcctaattaattcatcattagcacatgtgggttactgtagcacttatggctaatcatgaactaattaggctcaaaagattcgtctcgcgatttttatgcaaactgtgcaattagtctttctttttatctatatctaatgtttcatatatgtcttcaaagattcgatgtgacgtttttgggaaaaaattttttggaaagtaccgggcctaagtcacttagtaaaatggtatttgggaatatgctctcgaagaaaagagagtggcaaatagtaaaaaagaaaaatgccggaaagagatggagtgagaacatggcagcacacaggaactttcctcttaaacagatagtctaatttcctatatatcatttctccgatatgtccatgtactcccttgtacaattctgcatatatacatgctccctctatatttatcgacatagtttgatcatttgagagattatacaaagctagccttgcagcacaagctcgatcatggtcgacatggctggagaagtagcattcatctgcctcttgctggtgtgcctctgttcccactctctggctttgtctcctcctcctcctcctccttcttctccggtgagcagcaacgacgcaacaaaggccaccgtcgacgagctcgcgctgctctccattaagtccatgctctcgagcccatccagctcgccgctggcctcatggaatagtactagttccatccatcactgcagctggccgggcgtcgtctgcagccgccgccacccgggccgtgtcgccgcgctgcgcatggcctccttcaacctgtccggcgccatctcgccgttcttggccaacctgtccttcctcagggagctggacctcgccgggaaccagctcgccggcgagataccgccggagattggccgtctagggaggctcgagactgttaacctggccgccaatgctctccaaggcactctccctttgtccctgggtaactgcacgaatctcatggttcttaatctgaccagcaaccagctccaaggtgagatcccttctacaattggcgccagaatggtgaatctttacatattggacctcagacaaaatggcttttctggagagatccctctgtcgctcgccgagttgccatccttggagtttttgtttctgtacagtaacaagttatcaggagagatacccactgctctcagcaacctctccggcctcatgcatcttgatctcgacaccaacatgttgtctggagctatcccttcatctttgggcaagttatccagcttgatatggctgaatctagccaataacaacttgagtggaaccatcccttcatccatttggaacatttcttcatctctttggggccttaatattcagcaaaacaatttggttggagtggtaccaacagatgcattcaccgcacttcctgaactccggacgatatcaatggacaataaccgatttcatggccgtctccctacctctctggttaatgtctcacatgtgagaatgcttcaacttggttttaattttttcagtggcactgtcccttctgagcttggaatgttaaaaaatctggaacagttcctgctctttgccactttgcttgaagctaaagaacctagagactgggaattcatcactgcattaacaaattgctctcggctgaaaatcttggaactgggagctagtaagtttggtggggtccttcctgattcactctccaatctttccacttcattacaaactctctcccttcaatacaacacaatatcaggacgcatacctaaagatattggtaatctcattggcttacaatctcttacactagatgataactctttcataggaaccctaccttcatccttgggtaggcttcaaaatctgaatcttctatcagttcctaagaacaagattagtggatcagtcccactggccattggaaatcttacaaaacttagtagtttagaactccaagcaaacgcctttagcggtgaaataccaagcactgttgcaaaccttacaaagttgtcagcacttaaccttgctaggaataattttacaggtgcaattcctaggagattattcaacatactcagtctctccaaaattttggatatatcccacaacaatttggaggggtcaataccacaggaaattgggaatctaataaatcttgaagaattccacgcacagtcaaacatattatcaggtgaaatccctccttccttaggggaatgccaacttctccagaatgtctacctccaaaataacttcttaaatggtactatttcatcagccctgggccagctaaaaggtctagaaagtcttgacctctcaaataataagctgtcaggtcaaatacccagattcttagggaacatcagcatgcttagttatctgaatctttcattcaacaacttttccggtgaagtgccagatttcggtgttttcgcaaacatcacagcattcttaatccaaggcaatgataaactatgtggtggaatacctactctgcacttgcgtccatgttcttcaggtttaccagagaagaaacataaatttctagtaatttttatagtcaccatttctgctgttgcaatactaggcattcttctgttgctctacaagtatcttaatcggcggaagaaaaataacaccaaaaactcttcagaaacctcaatgcaagcgcatcgttcgatatctttttcgcagttggctaaagcaacagagggattctctgcaaccaatttgttgggttctgggacatttggctctgtgtacaaaggaaaaatagatggtcaaactgatgaaagtgcagaatatattgctgtgaaggtactgaaacttcaaactccaggagcacacaagagcttcgtcgcagaatgcgaagcactcaaaaatctgcgacaccggaacctagtcaaggttattacagcctgctcaagcattgataccagagggtatgacttcaaagcaatcgtttttgacttcatgcctaatggtagtttagaagattggctgcatcctaaaccagttgaccaaactgaaatgaaatacttgggtcttgtccagagagtgactattctactcgatgtggcttatgcactggattatcttcactgtcgtggtcctgctcctgttgtgcactgtgatattaaatcaagtaatgtgctcttggattctgacatggttgcccatgtgggagactttggcctagctaagattcttgctgagggaagctcatctctccaacactcaacaagctcaatgggattcagagggacaattggttatgctgctccaggtaattatctttgctttatgactttacatggagaccatctttgctcagataaagcttggctatagacaaattcatggtgaattttcagaagatatattattttactttcatgtgatttctctcctagtttttttctttatatcacttaattttaaatttcataacaagtagcaggcctgatgttctttcaatgttaaatggaacagagtatggagctggaaacatagtatccacaaatggggatatttatagctatggaatacttgtattagagacagtgactgggaagaggcctactgataacagattcagacaagggttgagccttcgtgaatatgtcgagcaagctctccatggcgagacgatggacattgttgatagccagttaactttggagctggaaaatgaatgcgcattgcaggattcttcatacaagagaaagatcgattgccttatttcacttcttaggcttggagtatcctgctctcatgaattgccattgagcagaatgcggacaacggatattgtcaatgaactgcatgccatgcgagaatctctcttgagagaatacaggattgaagatggaagttatgtcaatgtaacattggaatgatcatgtggagataccatgcagcggtaatttttaaaatattgcagacattgctgtactcccttttaaagtacacaaattttactatggtctctactagactgtaggtaaaagatacgacaaacatcttgttattttttcatctgagatggagggagtatttcagaccgactacatctgaaatactcatttctgactaaagtcctgataaaaataaaaaaaatttgcaccatatatagattaagcaccaaatactttctctgggttttacaagttgtgaaccagtaaaagtattcgaaaaaaaaacactctgttttcagtttcctccaaaattttataggattttcacatgaaaccgttcaataccttaaagttcgtgcgaaattcctccaaaccgaatagcacccttcaaggtttaaaagccaaacaaactctgccagaatgacgtgtctgattgttggcttgtcgtagtccgccaaaatttgaaatttaaacttcatttaataacttcagagtttattttggtttggcttttaaaacctgataacacggcatgaattgtttttcgttgcattatttataaaagtttagctcatgaattgtttttcgttgcattatttatatttatacggcatattggcctacctcaaccaatagaccatagctaattgagacaaacgaaacagagcaggctagagctcaagtattcaccctccatgccatttcagtgcgacaaaaacagcgaaaagaccactgtcaagttggtcccacatttcagtgcgcaatctttttctcttataattaattaaccaacgatgcctccaatctgtcatgaaatggttttgggcaacaagagttcattagtacaagttacaacctccaacagaagtactactacaactacaagtcacaagaaactaaatgataaatatagattggttagtgggtataaatataatttaaggctgaaaatgccataagcaaaaacttcagtctaaaatcatcgaaattatcatgcgaattaaagtatagctttgtttggtagtttggtatcatgcagactgtacccagaaatgaagggaatactcattttgcttagtactcttgtataaaattatcaaaggtatatgccagactgtagaagcatgactgcaactggccacactgtaaacaatttggatttgatccaaattaattgcatcaaaagaaacttaacagaaatatttattcagtggaccatcagtgatccagttatcataggatacaaatggttggaatgaccactacaggactcagctccagatacttaagagggagctcaagaatatccatgacagatttattagaacataaaagtatcccagcagaaaaataaaatgcagtgtcttcacttttctgtaccctctatttccagcaatagagattccttgattccatgcagttccttaatgatctctccagttgataatctactcgatggcatttcctggagcaagaaagtcctaatctaagtaatgaaatcaggcaatcgatcttttgcttgcttgaaaaatcataggtgtctcaggatcatgctgatcaatgcccagacacagtttgttgtcaacaatgtccatcattttaccatctaaacccagccttatagactcaacgccgacaatggggctgtctaagaagacagtgagtgccagcatcactttgctttttagccctaagaagcccgaggaatcaaagattccaattccaaaggaagtgatcgatcatttcataaagtgtgcacaaccttagccacccaagaaacctatatcggacttccgaagaactattacaaaaacaaggatctgcagactcagtctaaggagttgtaacttgcagagaaagcggacgagacagctgcattctgtaagtcaaccagtctaaacagccttgacgatctggataatcttgaggaggccgaattggtactgcagttccaacatggaaaactcatggtgcttgaatcggaacttggataattaggaactcaagcatggtggctgcataattggtatttggaggcggctgctcagggtcaacaaatgattggagcgtactacactgacatcgattttcaccacgcgcccaatacatgttatttggaatttaagcacaggtggagaaacgttttttacttccggttcgtaatccctttagtcccggttttccaaccagaactacgaatccgggactaaagatcactatctctagtcccgggtgaaataaccggaagtaaagatcgatctttagttaccaaccgagactaaagataggttacgaactcttcagcgtgtatgaaagaagagagctcgacatcagcgtcctccaaatgtggtcaatgtaagtccttcatatcctataattaggcttagtgattttgaaccgtgttcttcttttgcaggcattgctcttttgaatgtcaaagcaaaaaccttaagattgcttttctttacccagtggttgtgaacttcgataggcaattgtccaaagaagctgaaatcgagaactatcacttggacgccctcatcaagctcaattcctgtgaccacatcatccttccttaccttgctcaataagtgaatatcattaatttcaaatttgagttgctccccacgcgtataaagttattgatacattgtcctatgtgtagccattattgaaccctgatcgtaatcaatatcgacgatagtaagattttcatatatgacagtataagggcagtcccaaccctccacctaggatggtgtctatggcattaactacattgccatgtaggatttttacttatgtgtcactatattaattaagagagagagtgaagagaggaagaaactgggtctcatgtaagacacagcttcaacacaagaacttatgcactaaacactatcaagtttcgcattgggagagaatagtgtcttcataatagatgaagaataaatatgattggtagagaagagagatgatgtatttattaatggcccactttaagaaaccatgggttgtagagtatagtttctattatgatgtcttattgacatggcaccataaacactacttatggacactatgggttgggactgccctaaggaaggagagagcgcaccaccagtgtcttatcaatttattaaataggacatatatgagataccgttggtccggaagatcatatcgtagatcctaggtggatgcaataacattttggccgggtattcaaacatcaatggatccatagacagccacctgccaccaacctttgcggcttctacgtcatggggtccctgcacggctgcaccctaatgatgaggtatgctatttttcacaggaccatgccaccaacctttgcggcttctacgtcatggggtccctgtacggctgcaccctaataatgaggtatgctatttttcacaggaccaagtcataaagtaaacaatgtttttctaatactaagttttacgccttcctcccctgtgttgcggaaattgggtctcgacacatctttacaggtatcaccaaatgagctctgtgggttcattcataatcatattatagacccagctggcgaggacaacgtcaacaaagaaccaccagtatcacaatcactaggtgaaaccccgcgtgttgctgcaggagtttactataacactaagtaaaactaatgcgtaagatagctagacaatataaacttacataagttgatgtggtttacgataatttaaatttaaataatgtatagaatgataattcaaatgtaaaagtaaggtgatgcggctttaagagagaaaaaggagggagatagtttggaccatagattaatcatcttagacgacttaatgagagaggagagaaaaataacgctaagtgaggataaactatataggaatgtttagatttagtaacctttgacttaggatatactagaaaatgggcgcgtcgttggcacgccaactaatataacccgcggatattataatctatttatttagaatgtatgaataatatcatgttaagttatcatattactttttaagtatatatgaactggaataagaatgaatcaagcgacggtaattgtggtgttatttctcatatttatgttttgagaaatataggaatgtttatttactgataaacatatcacactaagattagcataatttggacaatgattttaatgtttatcttagttgtgcagatcaagcatcaggctagctattggagccgcatcttacatagccaccgcatcaggccatcacctcatgatggaatccactcaacctcatctgtgggcaggtgcgacaagatcaacatcaaacaacggcagaggcgcgccgggccaagagctcttccggcgttgttgcagtgcatcacccacagatatgacactgggttggcgggtagatcgagtgctttctctaggatttttcccttccttttttacatttttctactcacactgatttttttattagttttgatcgattgaagacgacaaatgggaacttcttctttcatgctttgatgtctatttttatttcaatttgaagagattgcaagggatagtaagtttggaatcctctagaatttaaatgaatgtttgcacgggagactacacaaggttctccaccttctctcaatatagacacgtggcagatttaggaggggttcaaacccaaatattagggcgccatgtggcccaatgggatgccagggattggaccttgaaatcggtattaaagatatgcaaattttagatttaggaatggctttggactttgttattttacacctaggaaggtttagacttataattgttgacttaggcatttactcttttttaacatttctatgtgttgatatatatgtgaatgtggatgtcgatgtagatgtggatggggttgtgggatgtaaatttggatatggctataatgtgaatgaatttgtgtgaatgtgaatgaatgtgattcgaggcaaattctgttatcgtatgatttgtatataaaattggaaggtcctgcccttttttttattgtcaacatataggtgccggtttttacatataagccggcacatatactaattgccacatgtccagttcagttaaaaaccagcacctatatgctacttataggtgccggttttggtaaagaaccggcaccaatatggtcagccacatggcaagttattttagaaccggcacctataattatacatatataggtgtcggttcttgggtgaaaaccggcacctatatctaggggtgaaaatggcacgggtattgcctgaccacccatcggacccaagactcacgggaggaatatatatgggagaaaaaaatgagatactcgatactatctgagttcgaatccaaattcgttagaaaatatgggttaggatacgagaagacgtgtatccgccccgtatgtcccatgttataaaacatgtatgaaaatctattataaatcaagctacaaacatgataaaagatagattaatcactattttacgagctcacatgtaatattgtataatttttctctttatgtatctcttttaatactttaattgccttattatatttaatatccatgaattagagatacaagcagatatccattcctgaatccaattcaaaggaaacaatatgggataggatacatgataagtccgtatcaggctccgaatttaaaggaaaatatggtttaggatatgggaatgtcatgattcaaccgtacccgtccgttttcacccctgcttatatctcttaaccgatgaccgaaattatcggccccacctactgggtgtcggttacctaaggggttcctaaccggtaccaatgagttttctgtagtagtaatatttggtaatttccaggagtatcgaagcagaaatcatacatagcaagcaaaagtcgttgagcaacatgacaccaattgttccacttgcaacaacacggtttcatcggttctattttctcctgcatgtacgaacactcttaataagtttaataagtgtccgtagtttctattaaagcaaaggctggattttaagtttgtatggaaatcgcgagacgaatattttgagcctaattagtccatgattagccataagtgctacagtaacccgcatgtgctaatgattgattaattaggcttgataattcgtctcatggtttccagacgagttattaaattagttttttcattcatataaaaaaacccattcatatccaagtgatattccgtcgaacgttcgatgtgacacctataaaaactaaacgcaccctaatttaaagaaccgagttgtgaggtctatactgatagtcaagtcaacgcccaactgcgacaatcgtatgtacgccaacttggacgtgccattcaattcggtgcaatgcatacgacggggcgacgccttcgttatcttatcagtcacacgctagctagggtcatctaattaaaccagccgacgacttggatctttcaaaaaaaaaaaccaaacagctgaccacatccgatcgactttgactatggtcataggttgcgttatttaaaattgatgaatgtaattacatactaaggccctatttggtagggctccaaaatctaactttgagctctaaactctaacttcagtgatagctagctcctattagagatgaaaatttgttgaaaaatgtttggctacgttttagctctagatctggaaaaaaaaaagaaaaaaaacagccgtcggccccaggcgcgccgccaacccgccggccgcttgccgtccccaggcacgccgcccgtcgtctccgcgcgtgctcgcgtcgatccgccggccgcgcgacatccccaggtgcacgccgcccgccgccgccgccacccccgcagctcggttgggatcaggaggaagatggggaggagagagaacaggagaggagtgaagggtagttgagtggtatttttgtgtaaatagacttaaaagattaaagggtagtgggtcttttgggatggagtgaagcaatggagcagcaaaactccaactccacccctgtagttcattttctaggggtagctctgctagatctactccaaaagacgaggatctgtaccgtttggcaattggcacagctctggctcgaagtaagttagagttgggagctcgaaacgggcaacggtggatacagtggtcccgggaccacctgaaaaaagggcgatcgactcactattaaaaaaaatagcgactattgaaaagaaaaaaaagcgatataatcccccttcccgactcccgacgccctaactatggctcacaggtcccacacgtgagtcgcgacgtgcgtgtatcgaatcgatcgacacaactctctctgtctctctcctcatcgccctagcccgtagccccgggccatagcccatagcgaggacgccgcgacgcgagcagccgatcacggaggcagagccacaccgccgccagccgcccagcccatgcgcgacccggagcccgcgcccccacgctcgcgccgccgcaaacggggcctatatgttataaaactaacaactagttcaaacacaagttacctaagaaacgttgatatccaaaatttttaaagaaatcatacttttgaaaacatggcataaataatccgcacaaaaatctacatatgtaatctaaaacgacagtgcttgattatttatatactacttcaaaaaagatagtgatgatgttagtaaatctgtctccccacttactataattgtagtttagaaaattatcccttaatttcttaatattaaaaaattcaaatctaaatagataatgacatataaaatcaaatcaaatcaaatcaaattaaatattccttataacaaaagatggctaacatatttaattaaaagtatatttttgtttatttctggtaatattataataatattttcttttattccaagcaaagtatgtaaggtcattcctaattaagctataaagagttgctaaggtcattctggtcattcgtaagtataaattgagctaagagggttggccgtgcacatacagaccgccgatgctgtcgtccactattagtctattactccacaagtagtatctctacgtgtgccccgatgaacatgaatcccaccagtaagccattgctcctcctcggcagccttctcctcctagctgccagcactttacccctgcaggcaacgaccgcctgcgtgccacgggaatgggatgccctgttggccttcaagcgaggcatcaccagcgaccccttaggcctcctcacctcatggaaggaagacgatcatgactgctgccggtggagaggcgtcacctgtagcaacctcaccggccacgtcctcaggcttcacctcaatggcggatatgaccttgaccgtttcgagttggttggtttggttggagagataagccctcagctgctccacttggaccatattgaacaccttgatctcagcatcaattccctggaagggccaagtggtcaaatccccaagttcttgggctctatgaacagcttgagatatctgaatctctcgagcataccattcaccggtacggtgcctcctcaactcggtaatctttcaaatttgcgatatcttgacctttccgatatgaagggaggtgtgcacttaacagatatatcatggttgccgcgtctaggatcgttaaaattcctcaatttaacttacatagatcttagcgctgcatctgattggccttacgtcatgaacatgatcccatccttaagagtcctcagtttatcattttgccgtctccagagggcaaaccaatcactcacacacttcaacctcacaaaacttgagaagctcgatctgtccatgaattactttgaccacccgtatgcatcttgttggttctggaacttaacaatcctcaagttcctcgatctttcacaaaaccgtttgtatgatcagctaccaattgcactaggagacatgacgtccctcagagtccttagaatttcaaataacgatttgggcagtatggcaccaaacttgctgaggaacctatgtaatttggaagttctagaccttgatgagagtctttcgggagggaacatgacagagttgtttgggagtctaccacaatgttcatcgagtaagttatcggaattgaaaatgtcatacaataacatcaatggatctctaccagcagggttgttccgacagtttcccaaccttgtcactctcgacatgtctatcaacctaatcactggacctctacccgttgagataggtatgctcgatagtttgacttatttgaacctacgtggcaataacctagaaggtgtcatcacagaagaacactttgttagcctaaagagtttaaaatacatagatttatctgacaatcaattattgaagattgtggtggatcctggatggttagcaccatttacattagaagaagcacgttttgcatcttgccagatgggtcctcgatttccctctttggctccagtgtcagttaatatttcgtacattgatatttcaaaagctggtataatcgataaacttccagtctggttttggacaacagtttcaaaagtaaaagacttggtcatgtctaacaaccaaatcagtggtgtctttccagcaaatatggaaaccatggctatggaatatcttgatatacgttcaaacaaactaagtggtcaaatacctctgttgccgagaaacctttcagcattggatattcacaataactccctatctggaccgctaccatcagaatttggagttaatatatacatgctaattctttcccacaaccatttgtcaggccatattccagggtctttctgcaaaatgcaatacctggacaccatagacttagcaaacaatctttttgaaggagacttccctcagcaatgttttagcatgaaaaacataaaagttcttcttttaagtaacaacagattcgctggcacattcccagcttttctagaaggctgcatacagctacaaatcatagatctatcaaggaacaatttctccagcaaattaccgaagtggataggagacaagaaggatttagtgttgttacgactaagctataatgctttttctggggttattccagacaatatcacaaatctccgaatcttcgccagttggacctagcagccaacagtttatcaggtaacttaccgcggagtttcacaaaattagaggggatgaagcgagaggacggctacaatgcttcaggttccgtacctgaagatggcttgtcatcaaactgcttaattggtggaattcccgaacaaatagcttctcttgctgctttgaaaaatctgaatttgtcaaggaataacttgaatggaaaaattccatacaagattggatcattgcagtcactggaatcgctcgagctctcaaggaacaatctttctggagagatcccatctaccctatcaaatttatcatatttgagcaatttggatctgtcgtacaacaatctatcaggaacaataccctccggatcacaacttggcaccctatacatggaacatcctgatatgtataatgggcaccattggtctatgtgggccctcctcttcgaaggaactgctcgggagatattgaaccaaggcaacatggctatggtgatgacaactattgttcaatttggggaatttttctagggttagcttactcagctcaccccttccctcatctattctattagcataacactttacagataggtccttagtacaacacatatttacaccaacactcctcctcaagatgggcaaagatatcaatcatacccatcttgttacatattgattgaatctcactaggacctaacccctttgttagacaatcagctagttgttcacatgacttaatatactccaacctaatcaccccgctatcaatcttctccttaatgaagaacctatcaatctccacatgtttagtgcgatcatgctgaacagggttgtttgcaatgctgatggctgatttattgtcacaatgaagcatcacagtgtcacttcttagcactcgcaattcagtcaacaagctcctcatccacaacatctcactcaagctcaaagccatagctctgtattctgcttctgcggtagaccgagccaccactgcctgcttcttgcttcgccaagaaacaagattaccaccaacaaacacacaataacctgatgtagatcttctatcatccatactactcgcccaatcagcatcacaatatccttccacatttagatgcccattcttcctaaaccacaatccctttccaggagtccctttcagatatctgagaatcttatgaacaacatccaagtgaccagttcgaggatcatgcatatacctactcacaacactaaccgcataggaaatatcaggtcttgtatggcaaagatagatcaagcgtcccaccagtctttggtatgcttccttatcaacgggatcacctgattgagcacacaattggtgattcctatcaataggcgtagtacttgcacgacacccaagcattcctatatctgtcaacagatccaaaacatacttcctctgagagagaacaatcccctttgatgaacgagcaatttcaattccaaggaagtagcgaagaggaccaagatccttcacctcaaatgcctttcccagcctttcctttagacacctgatttcttctacatcatcaccagtgatcactatatcatcaacatacacagccaagatggtgatgtgtgtccccctatgtttgtaaaagatagtgtgatctccattacactgagaataccccatatcacacactgcatgcctgaacctatcaaaccatgcacgtggagactgcttcaacccatacaaggatttcttgagtttacatacttttccaactgtctggctattcccaaatcctggagggatctccatgtagacctcctcatgtaaatcaccatggagaaatgcatttttcacatcaagctgatgaaggggccacccaaagttcaccgcacaagataccaaacctctcactgtacccatttttgccactggtgcaaatatctcatcatagtcaattccatatgtttgactgtagccttttgcaactaaccttgctttatacctat

SEQ ID NO: 10369 - DNA, 21923 bp, Oryza sativa
gataagccttggcaaggtctgaacatcccaatctcacccaaggaacgcagcttcgtggcggcgtccacggtgtgtatcttgggcaatggtgaatctgcgctcttttgggaagacaactagctagaaggatactctgttcgctcctttgcaccagccgtctacaactgtgtccctgaggttcgagcatttcaaacgtcgcaaaacgatcgttgaggcacttcaaggtagaagatgggtcagagacatctatggagctctagggatccaagcgattctcgagtacctccacctttagaccactctaaactcgatggagctattgccggatcaaccggactccctctcttggaggtgggactgctcgggggaatacacctccagttcagcctatcgagcattgttcctaggaagagtctggtttcagtccaaaccaatctggaaattgatggcgccccgcgatgccgctacttcttatggttggttgctctcaacaggtgctggatcgtggacctcctccacaaccgtggcctcccacacctagaccgttgcgtcatttgtgatcaacacgaagagagcatagaacgtggctagaggttgcgaaggcaatgattgctgaagcggaactctggcgtttggccaacgcggcaattccggcgttgaatgtccagcccctagtcttctctaggtcgcacaatactcgtgcgagaataggtctagcttagtgtttttggttatcgcttgtatcccgtcccttattttttttttcaattttcccagtaaataacttttgttcctcataatacaaagatgcgctccttgcgtattctccaaaaaaaaaaaacgtaagcaataacttacccagtctaaaatcgtcgaaattatcatgcgaatcaatgtattactttgttatgtactttggtactccttccgtttcaggttataagacgttttgactttggtcaaagttaaactatttcaagtttgactaagtttatagataaatatagtaatatatataatactaaattagtttcatcaaatcaataattgaatatattttaataataaatttatcttgggttgaaaatattactacttttctctacaaacctggtgaaacttaaaacagtttgactttgattaaagtcaaaacgtcttataaccttaacggagggagtatcatgcagactgtaaccagaaatgaacaagggaatattcattttgcatagtactcttgtataaattatcaaaggtatcatgcagactgtagaagcatgactgcaaccggccacactgtaaacaatttggatttgatccaaagtaattgcatcaaaagaaacataacagatatttctgcagtgaacatcagtgatccagttatcataggatacaaatagttggaatgaccactacaggactcagctgcagatacttaagaggagctcaagaatatgcatgacagatttattagaacataaaagtaacccagcagaaaaaagaaatgcagtgtcttcatttttctgtatcctctatttccagcaagagagattccttgattgcatgcagttccttaatgatatctccagttgataatctactcgatggcatttcctgggagcaagaaagtcctagtctaagtaatgaaatcaggcaatcgatcttttgcttgcttgaaaaatcatcggttgtctcaggatcatgctgatcaatgcccagacacagcttgttgtcaacaatgtccatcactttaccatgtaaacccagacttacagactcgcagaggctcaatccttgtgtaaattcgctgtcactgggcctcttcccagttacagtttccaacacaagaatgccgtagctgtaaatatcaccttgcgtcgacacagtattcccagcaccatattctgttgcatcgaacattccccagaaatattagaattcttataacttgtatagctataaatttaccataagttgtactgatatacaattaggtaaaaataaaaattcaatgcttcccctaaaactaatttcatctgcaaatggcccataatattatgagcctcactccggtgctttctacttatagtagaaaataatccgagccgttgatcgtatataatcgtagggttgagatctaattctactaccaccactcatagtggtagtagaaacgtggaggggtatatttgtccatagataataattcatgtaagggtattatcgtaaattattattcagtaactctaaaccttcgccattctcaagcggctgaccccatccatcgttgacttcgtcgcttgtccatctccctctccgcctccatcatctccagcgcgatcgacatctcctccccctccagcgaccaagggtggcccttctcctcttcgccaagccgctgaaggtccttgcccacggcggacgactagtcctgccatgtagctttgaccaagacaggagatcgccgggcaattggacggcggacgaaattcaacgggttccggcgaacggcggcgaggtaggaggaatgggcaactgggaatgaacgagtgtagtatggggatgtggtggacggctcggattggccaagaaatgagctatggcagccggcgacgtgcagtggcggagctcgagtgaggcggtggcatttggtcgccgccggcgaccgtacgagcagctaagggacttgggaatgaggtgtttggatgctacatgaatagggactgtgcatgacttcacaagctgccgcggagctaatgcaaatgcttttgcataaacacgacagtagaccagggagtttgcagcaaagagtgaatcaagatgttctaagcccccattagtagacattgtcctatgactgaaaaaaaatcaatttagtggcaattgagggcttagctacccccatatgagcacaagaaaggaatcatgtagcgatgattcagagcgccagaatatgacagaatgcagttagatgtttcgatggtatgaaatataaaacaaatcctgaattacagctctgactgaaatgcaatttacatatgggcaaaactctgatagtgaaaaatctcatttaagcagtttatcagattttttcagtctcactctttcaggagcaaaacaacttgtttactgatccaggagcaggatgacatatttcagttcaaattgcttggattcatctcaccccatcacagttgcacacaaaaaaaatgcacaacacactaacatggtcaacacattgacattactagtagtccatcactattcaccttttcttttttacttaaaccattactgaacaatgaatatattgggacagtcacaagatccaataaacatcagtatctcaaagctcgtcaattagtcaatgaagtattcgacacaccatacaactgaatattacaagcagaatgaactgggcaggccttcttgttgtcacggagccacttcgcgatgttgcaatcctcgtggaagtcatgcccgcaggagagcgtgcggacagtcgccggccaccatcctgagctagcagatcgggcatgccgcatgcatcgttcagcgtccgatccagtgtcctgacgccgccgcgagcacggatgtgctgaaacctctgagcattgcggtctatcaggttcgccggcgacgccttccacggcaacacgcagcgagcgacactgttgcatattctgcatctcatgccgtgctcgcggtcgaggaggtgctcgccgatgcaagccacaagactcgggcacgcacggagggggaccggggatacggcgctggaatgtatcgcagctgcctcccaagtggccgcagcccacacaatcagagcaacacggaatggagatcactacccgccggcggaatggattgaatcctccaaagtgggcgctgccaagaatcttaggtcttgcgcaggggctccggcgaaatcggacgcgcgcggaaggccactcgcagcggacagaaggccacgatggcgaaccaggatgccgacgtggaatacaggagaggaggaggaacggatagacaggtgagaggtgggaggaggggacgcctgagggtttcaccgcaccgagccacggcgtgccgggaggagtagcgataagcaacgtgcgtcgggcgagatgcggtgcttttcgtcggacctgatgcgatcaagccaagaccgaccgagacagagaaaatagatcctgccaaaattgcccctaatatatattaggagattactaatctaccctttaaaatgaacggtcgagattaattttacttgtagtataatactccaagtagaaagcaccggagcattgctctaatattattgtataaatgtgggcttcatttgaagaacaagaaacagactaacctggggcagcatagccaatcgtccctctaaatagtattgagttcgtcgagggttggaaaactgagttttgctcatcaagaatccttgcaagtccaaagtctccaacacgagccaccatgtcagaatccaagagaacattacttgacttaatatcacaatgtatcacaggggcagggccatggcaatgaagataatccaatgcataagccacatcaaggagtatgctcactctttccaggatattcaagtacctttgctctgtatgatcattattgtcaggatgtagccaaccatctaaactgccattaggcatgaactcgaacacaattgctttgaagtcattgccactgttatcaatgcttgagcaagctgtaattattttgacaaggttccgatgccataggtttcgcagtgcttcgcattcggctatgaaacttttgagtgcgccaggggtttggagttttagcactttcacagctatatctttactttcaccagcttgattatttatttctcctttgtacacagacccaaatgatcctgatcccaacaaattggttgctgagaaattatctgttgctcttaccagctgggagtgagagatcaagggatggccttccatggatgtggtagatgggatgtttgtttttatattcttacgccaatagagaagcttgtagagcaataagaggagtagtaatgttacagcaagagaaacaacaataggaattaccagaagtttttgccttctgtgtggtgactgtgaagagcatctaggcaaatgtagatctggtatgccaccacaaagtttgccatttccatggatggaaattgcggaaggattcgaaaagacaccaaaagttggtacttcaccactaaagtcattgaatgaaaggttgagataactgagcatggtaaggtttgacaggaatgtgggtatttgacctgacaagttgttattggaaagatcaagaatttgtagacctttcaattgactcaggagtgatggaacgctaccgctcaagaaattattttggagagatatattctggagaagttggcattcaccaagggtgctagggatttcacctgataacttgttggaatctgcatagaattgaacaagatttttcaagcccccgatttcttgtggtattgatccttccaagttgttattggatatatccaaagttaacgacaacgtgtgaatcttaaatatttcaacaggaatagaacctgtgaaattattgcttgaaagacctagttccactaggtttgtcaggtttccaagtgcacttggtatcctaccagtgaaggcattcacatcaaggcggaaataatttagttctgtaagattccctatggctaatgggattgatccacttattttattattgtctatatataaaacttgcagatttttaagcctgcccaacgatgacggaagaattcccgtgaaagagttgttatggagtagaagagcttctaacctaacgaggttaccaatctcttcaggcaagcttccagatattgcattaaaatcaagatagaggtattcaagataaactgaaaggtttgagattgaaacaggaagtaccccttcaaacctattgttgcccaggaacaaagcttgcaacttggagcaattcgttaacgcagatatgaatccccatcctttctgatctttagcttcaaggaatgtgtgctcagcttctagcgaagtgaggtttcttaaccttccaacctccggaggaatgattccaccgaaagagttgaaaccaatctgtatccgcgacaaagcggacacgttacctattgatacagggatgttgccatgaaactggttgtcgttaatgtacaagtgctgcagatgaggaagagagttgaacacatcaggaggcatcgtcccatgcaacatgttttgctggagattaagctctgtcagagaggaaacattccagatggaagaggggatcagcccggttagattgttgaagcctagctcaagccatgacaatccagagagcatgccaagggatgatgggatggctcctgatagcatgttgtgtgcaagaagaagatgatagaggttggtgagattgcccaaaccaggcggtatctcaccgtgcagcctgttcttgaacaaagatagggcgcccaacgattgcaaatctgccagagaccgagggatctctcctgacaaagcattttcatgaaggcccaacctgacaagattcttcaacgcacctagctcggctgggatctcaccttggagctggttgttgcctaggtcaatcgacatgagctcggcacattctccaatggaagccgggatgcttccttggagatagttcgagcttaggttcagcatcctaagcctggtgagttgcccgatctctggaggtatgtccccggtgaactggttgtcaccaagttccagctccctgagcaaggacaggttgcccaatgacggagagatccttccagacaggttgaacgagctcatttgcaacgccacaaccctctcgggatgccggccgccgcacacaactcccggccagctgcagtagtggcttgaagcgttccatgatgccaggaagccatcagacagcagcatggacttgaacgagaggagcgcaggctcatccgccatggcagtacttctgctgctgctgctgctccctggagaaacctgggcgtagaaacaggacagcaacagcagtgaggagcagagcaatgctgttgctcttgccatgatgatcaagccagtggtgttgacaggaatcgcaccgcaaacggtgaggaatttggggaggattttgggagaaagagatagagcagagtaagaattgaggaagaagaagatagaacagagtaggttggaatgaaagcagggagagattggaattataggaaggaatagttgtttcattacaaatcagtccgccccttgtctctgacacctgcccaccttatatagcacaacgccattaggtctctctcccccttgctgatagtgggctagccaatagatactggctgactccactcgcttgtttagtttctagctttgatcgtctgtcttctttattttttttaaaaaaaaattaaaaacatatgtcatgcataaatactatttatgttttttcatctaataacaataatatattaattataaaaaaaatttaaataagtcgaacgatcaaagttagacacgaaaaaacttatagctatgcttaaaatggaacgaagtgagtagaatactttgtgttgggctgcctttctctagaagatttcctgtggggacctgaattgtcgacatgcaggcatgcaagccgactaccctgtcttcccaccttgctcttgtgctgatcgacttgaggatgacaagtggctgcaagaatgcatttgcatatattaaagggttctttatatatagaaaaaccttgagttattcttctgatccccagcaaacaaagaggatgtatttagttcataccaaaattggaagtttggttgaaattggaacgatgtgacagaaaaagttgaaagtttgtgtgtgtaagaaagtttcaatgtgataaaaaagttggaagtttgaagaaaaacttagaaactaaatacggcgagaatagaatgtatatatgtgctacttgtgtccacatcaggaatatgtcggcgaccggtcatttcattgctacttccagtccactggagggtcaatgcaatcagttgatctaacgtatggaactatggatgcatgcggtagtactgaaactgcccagttcctaccagacagcttttggcaaataatttcctgtctttttaatcaaagcaggccacttgcaaaatatataatcattttgtgttctccagtcagtcatgcacttttgttttcattcaacaagtagtcaaggggcatgcgctttggtgcacatcatttctcgacaaaacgtttggtgtgcttcgataaaaaaccttcttctaacctttttttccctctatctttataatatttggatgatcttcttcggtcatctcgacaaaaagtttgttcgaaataagattagtgactacaaaataatgcagtctgatgagcagcatgagtagtccttgctatttacattgccaattttctgcatattaaatcactataatcatcaacaaagctgtctcagtcgagtcgaggtagtcactggtttcaactcaatttaatatgatttctcctgaatttgcatacgacctctagatcaagttcaacaatacaacaacatgagcagtgttatcgccactcaatcccgacatcatatgtgttcccccaaaatttctacaagtctaaacttaatttctgagtcgcaagaatctctgtatgcaagacaatttttttttcaaaagaaaaataataataataatttttgaggttaaatgttggggattctagatcagtctcatgaacgcacctaagattcctccctctttgcccgtcgcccttggaaattccggcagcgagcgcctcaggccgccgcgctcccctctccatcccactcggcggccatctcctgcgcctcatccgccgccggtgggcctgcctctccgcgcactggactgcaccgacgccggcgccggtggcggcaatctcgtcggcttcagaggcatctcacgggggaatctcgacgaaaagcggtggagagagacagacaggaaaaaaatgatactcctacgtcccaatctaagtatagccataattttcggtgcaagttcgatcgtccgttttatttactttttatttaataaaattaaaaatagaagtcatgtataaagtaatatttatgtttatcatctaataatagaaaaatgctaatcataaaaatttttcaaataagacggaagatcatagttaagcatagaaactcatagttactaatgagacggagggagtaaacgacaagaaatggtcagtgacaagttggtcccataattgagcgatacgatagtaaaagaaaaggtcctgagaactcctatttatgatgaaaatagggttaatttgaaccatgcctttataaacatggcatattagaaaggataaatttgatccatgtcattgtaaatttgatatctctatctctatctctatctctattattataaaaattgaagatgtttttgccggtattttggtacgtcatccgtctatgagtcggcttttaagttagtttgattttggaaatacatatccgtatttgagtcgtttttaatatcgtttacttttgataatacaaaaggaatcacataagaaatttgtttaaaaaaactcgcatgctaacttgagacgatcgtactcctaactacacctcatgattttctaaaatatatatatcgtggcgaattcccatagtgaatttcatcttaactaagccatataacaataataaaattaaaatagacttcacccgttacaagcacggatatttttttctagtatttataaaagtatcactactatcatctatgtgaaaccaagtaattctttcagtgtcctccctccgtccctaaatacaagggattttgattggatgtgatatatggtaatatgatgaatctggaaaagcatcctgtctagattcgttgtacttcatgtatgtcaaattcgttatattagcatgtgttatatccaatcataatccctaagtataattagagatggagggagtatgagatatgccattttctacacctagactctagtggacccacgtgcaggccatggcatttcgtattgcccaaaatacccctgttacatgtcttctttccacatcgttgacacatgggtcccagacgtcattcccttccaaatccccactgaactcccaccacgaggagttgccgttcacctcttgcggcagtggtagcgcactcgtcggcgaggttatccattctcctctccgctcggctttgcctgcacctggctactgtggggacttggcggccggagcactcgtacgtcgacgaggtccatgttgattgacatgcttcgctggtcaaaatggggtccgctttggttgctggagagattttaatcgctgttttagaaactcctcgttttgttgggtttcgttgagaaatcaagagcgtttagtggcaacatcgttttgatctcggatttttagttactgatctcgcggtagggtttgaaatttcggttcataatttccgaaatttcggtaatttcgtcccccaccggtgtgctcaaatctcgcccgaaattttaggttttttacaatttttttgtgaatttggtcaaattttatttaaattcagtcaaattttcaaataatttcggccagaaatttccaaaattttggtcacccccagcataaaatccaatttcgaaattgaaaaccctgtctcgcggtcgctagtttcggcgttggtcagtccaccgcctccaattaattgctgtgggccgccggcgacgccaagaccgaccccaatcgccatcttcctcgacaccagcttgctcgccactgcggacatggatatgtcgtcgtggccgtctcccttgacgccggctactgcaggtctaccctacacagccgtggccatctcccttgtcgctggctgctgcatgcagtgggaagggagggagggtgatgttgaagcggtgtgagtcgcaggcgacggcgaggaccagcagaaaggccgccggcaggagggggtcatcggcgtcgagagaaccgaacccactagctgctacagccaagtatgcaagggtaattacaaccatatacaaaaacacgttacgaagaaaatgagtcaaaccgagccatacggcatggcatcgaactaaatcttttacgtatttggtatggttgcgaatagacgaatagtagcaatatttagttgaaatgatactttttaatggcacggatcaaattaacccttttaataatagaatatatgggcaattgtattcttgcccctactttgaactggaattgtgattttaccctcgtttttagggtttgtattttgccttcatttcttcgaaatgatcactcagtgttacctttattatgttaaaatgatttaacagtgttaactactacctccacggttataaaactttttgctattgtccatattcatatatatgttaatgaatccaaacatatatgtgtgcctaaattcattaacatctgtatgaatgtggtcaatgctaaaaaatcttaagatctgaaacagaggaagtatgagataaaaagacgtgtatatcctttcatatttcgcccctttgttttgcatatatctttgctaagttctgtttctctaggcacagatgactaaacattagaggaaaaatcaagctgccgtctagagacattggcaatgaagttgtcgaacacagtggagatgtaatcctacgcatagacgaaccaaaccgaatcaaaatcgacccaaagaaaacaagataattaaccagcacgcggtgagatgcagaggcctgctcgcggccctgttcccagcatgctcgcacacggccgcctgctcacagcctcacactctgcgccgtcacgcgccctgcccgcgtaggctgctgctgcctgctccttgattcgcctccccccgccatctgcgatgcacctgctcgccgccaccccgttctccacctatccgcgccgcctgctcgcaacctgcgcaatctgcgccgcgccgccgcctgctcgccgccacgacgcaactgattctgccgggatgggaacgggctggtgttgaggtggctcgtaaggacatttggtccaagggtacgtatagtggtcctatcgtattttgtagatcagttttattttatttttcatttactcgctaagttttggtcccacctaatagccatctaaattctaaaataaggacaaacggtagtttcgattaaaaaagtgagggtaaattcacaaaccctaaaaaacaatgacaaaatcacaattgcaattcaaagcaggggcaagaacataattgcccctagaatatatatcctctgcacctaagctagagagcaaagtgccacattgttacaaacttacaatgttccgcgataagctgtattatacatatttataaaggaatcaataacaagctaatacaaaagaaacattaaaatgctgttattaaaaattaaaacgagtatacattctagtaactagctgggtggcccgcgcaattgcgcggctagcactacatatatatatattttatatgattttacttaaaatttattaaatggttatctcgttgtcttttaaaagaccaaaccttatcatccccgtgtttctaattttatagtttttaaaagtcacaccagttgctaccccttacttctgtcatatcattcttaatttgcttgcttgatctaccattcttaatttgcttgcttgatctaccattgtttctattcattctcattggagcctttacaaattagatcttatagcttttagagtttattgtccagttggatcctctatggtccgcccgctacctctcatctttattgctattgggattttaacaatcgaacaaaattattattggtgttctttttctttactttctagaagttcggtcaaacagtcatcagctccaccactgtaatcctctacggcccacccgctaaatcccctttttattatcattgagattttaaaaatcgaacataattatcactggggtttacttttttactttttaaaagtccagccaatcgtccctcatcttatttgtcattggatttctatttgagattttgtttatagtttttataggtctcatcatgcatcatcaccctactcctttattaacttattgtttttccctctttattatcatttatcattgttgcgttttatatggaccttttttttaaaaaaaaaaatcatatttttcattccgatgttttgttatttataaattttattcatacttgcactcttatataattattttatattttcaaaatttattttatttttatttcgatttttaatttatctcatgatgggttctagatgatattttctttcaacaatcttttctttaatttcgaatttttgttgtttataaattatattcctagactagatgtactcttctttttctttttttaattgtgaaatttattttttttctattaatctcatactgtgtctatatgaattattcttctaatacttcttattttttatttctaatttcagttgtttgcaaaatgtatttttacttgaactcttatatttgatttttctagtttctaaatttattttattttttattacggattttaattaatctttaattgtgttctacatgaactcttctatgaattttttattgtgttattatttcagaatcaaataaaaaatccgtgcacatgccatcatgcttttctggttgctgacgtgcatcacccaaatccggctcattgtgcagccgcacggcttgacccgctgccagcatctatctccgtatcaacaaaaacacatccaaattacggttgtacagtggttcgttgcctgctgcttcatttatatatgtgtattatagcctaattcaaattggtttaggaaatcggacaaaactcttttgagtccgtttgcatgtaaaggttctagctagagattgattctaattctacacgtgtacggtactccgtatcccttaattaacatgtcaagtttgtgttaaatctcagacattaaaatctatgcctcttataatccaatggtgtaaataattcatatttttttcgattaatgtaggaatttctagcctccacggtgaacgtggtgtcttcttttcgagctgtcttaataatataatagatagatgaaaaaagtaatacgccataatcttattaataaataacacgcaaagctaaataatcatgcatcacgcgcagaaaacattccaccacaccggcctgcggcaaatacgcacaccattctactcaagctttctaattagcttattgtgcagtcatcttttggaataaactggcccaagtaacaacagctaacacatatattttgtcgtaaaccttgtcaaaaatacggaaatatgcaatcctccatgtcttcttgaagagtatgatgcaaaacaccacccataggccagcaatgaatcctgacacaaggccaagataaaagaacattggctcaggtacatgtccagctttgttgttgttggtgtaaatatgtattgtactaaggacctatctgtaaagtgttatgctaatagaatagataaggaaggggtgagctgagtaggctaaccctagaaaaattccccaaattgaacaatatggtatcagagcgggtcaacggcgactggggaggttgaaccctagctggcgaggtcgcagcggcgcgggccgaggcgaggttggcgcggcgcgacgacgcacgcgcgaggccagcgtggccgcacgcggtggagacggttggtggccgcggcaggaagcggcgctgtgccggcgcaggacggcagcgctgctaaggcaggacgtggagtgaggaagcgacggtgtcgacggcagggagcaccaacggcgacgacgcgtgcggagggctagctggtgacggcgtgtggcagaggagcaggttgttgctgctgctggtgaggtgttggtgctgctgctacttgagaaggtgaagtgggcgcttggcttgctgttgctactgtatttgctgctgctgtgctgatttggggaagaaactgagtacttgctgctgtgctgaaaactgagaagtagtgctattgctgctgttctgttttggtgagaaactgaggagtagtgttgttgctcctattagttgatttggctaatatttgatctgccatgggggattgaagtctggtccttgttgtatctctgttaatgtggtaaagaagaagctaagggaagaaaaaaaaaatgtcttctggggagggaaaggaggttgtggatactttcttgcttgttactaaaggtgatatgaaaggtttgctagaagatttgctgaagatgggcatgataggtcctaggaatgcggctggagtgtctgaagtgaaactagaattgatgccaaatgagttgaggttggaggggagcaaaaattatttgagttggtgtaggagagcccaactgatgttgagagcaaaaggggtggatcattttttactagagagttgtgaagaaccttctgataaggagagccaagcatggaggacgtggaatactacaaattccactgtggtatcttggttgatgaaccggtggctccttctattggcaggatgatagaagctatccagaatgctgcagttgtatggaagacgctgagcaacatgtattcaggagagggaaatgtaatgatgatggttgaggctcagaacaaagtggagaatttgaagcaagagaggagaacagtcaaagagtacgctagcgagctgcaacagttatgggcaaatcttgaccactatgatcccttacaattgaaacatgaggatgacattgtgattggaaataaatggctgcagaggcgaagagtcattcatttcttgaaggggttgaacaaggagtttgaggataggagtgtcacgcccggaaattcactagtaatttccgaacttatttgtgcataaaatcctcgtccaggaatcagccgaggtacacaaactgacaatttaatatacagattcatcaaattaactaaaacgataaatacttacttatgaggcacttagtcctcatcaagaagaaaactgcagcggaaaaataaaatctagcgaagctccggctccactcccacaggcagctcaactggggtataagccaaacgtcttctccttttggatcctttttcttcaactgaggttgattgattattgcaaggtgagcatatgacatactcagcaagccacacagcaaatatgcaagtgcacaaggataccaaaggatggcataatataggctcatttgcaaaagcagcatttagcaaaacatttaagagaagtaaaacagtggagtaattaatcaggaattttaatcaacactgaacagcacacccatgctgcacaggcccaaccattctgaacaaccatacccggctgaacagatctaactccaaaccaggagctaagcaaattattaccagttatagcatcaataattattgtgagaggtgtgagactaatcacgaaaaacattgctcaactcgcccataaccgcgggcacggctattcgaatagttttactctggccagaggtgtaccactgtacccacaagacacagccccacatcatgtcaccatgtgcctcagtaccaccacggtacctcggaaaggggctgtgacagtaccccttgcataacacaatccaccgcagcgcaccattcctggatcataatcacccccttataaaacaaggcatggactccccagcgacccccgtgggcttatctccgccacttctcagtctggtgctccgcaatgaaccatgctatacaaaaggtaaagccgttgcccacgctggcttgtggttggcacgattaatgtttcacaatagtagctcgcgaaccggtccttaattgtcatgagcacgactctcaaaaccatgtgctcacaacccaccattatcaagttttagttgacaagtaattaattaaccaatcacgattgaccatcgtgagctaccattaaatataaccataagtgatagtgaaacattagttatcccaattgtgtgctaatgtttctaagcatggctaagcaatcacatctaatatctagctgaaccaatatataaagctcaactagtcaagttataatcacccaaggtatcaaggaataaagtaatcaatgcaaacaggccataacaaaggaataggttcacaccacccagtgacattcgaaaataaatgcacagttgaaataaatagagaatttaaatataggatcaacatgctcaaaggaattgtgtttaggatctgtgtgacttgccttgcaataatcggtcttcaattaatcttcttgaatacttccggcgcactcgcgaaccttcgcaacaacggaaacgacaagctaacacgcaaaacgaggaaaaagactaataaaaaccaaataaacaatacataaaaagtaaacaaacatgtagatcataattttagatgaattatgagacttgaacggcctcattctgacttcaaatgaatttattatgaattttacaagattaaatctatttaaagcccatttaaaaagaattaaatgaatttaattcaatttgtggacaattttaatatgtagatctttattttacacaacttttgcaacttgaaccacattaaactgagttaagatgaattagatatgaatttttaaagattaaatcggattaaaacacttatatggattttaattgaattatgacgcaataatgaattatttttgaaaaggaaaaggaggattattgcgccagcggctagggtttcggtggaccgggcgcacgggcgacggttcacgggaacggacggccgagatcgacttgatccaatgcggacggccgagatcgatcggtccacgaccggctcacggtgaacggctccgatgacgtcagcgatgacgtcagcaccagcggcgactcgggcggcttgggcgcgcatgctcgccggcgaacggcggcacggcgacgcgaacggagagcaccaggacgtagaggacgacgcggcgaactcaccggtgaccaaaacgtcggcggaagaccaacggacggcggcggcgacgaggaggaagcggcgaagctcttcgggtcgacgacggcgacggcgctccggcggtcttcggcggcggcgaagcggtggacggggacggcgacgacgttgcgaacccgatggcggtcttcccgagcgacggcgacgtctggaacggcggcggcgcacggctggagcgacggcggcgacggcggcgctagggcacacggcgctagggcgatacggacgacgagaggcgaaggcgagagaggcggcgggtagaggagagctcgggggtccttatataggtgcaaggaggcggcggcgaaggcccacgactgccggcgacggaaaggaaagatcgggttcgggagagagagaggaatccgattcaaactcgaatccaccggtttccaaagaaaattagccgatgtttccaaaagagaaaaggaagaggagatctcaaggatcatttgccctcaaacaattcggccggagaaggaaaggcgcggccgaatttggaaggagaaggcggcggcggcgcgctagggtttgcgggcggcggcggccgaaggagaacgacgaacctgacaagcggggcccacctgtcagcggcagagagagagtggagagcggcggctcggcggactgggccggctgggccgagggaaagagagagagaagggttttgggccggctttcggcccaaagccaaaagaagacttttaaaacctttttttcaatttaaattatttcttaaatgcaattccatttattaaaaatacttccttagctcaaataaatcccagaaaaatctaggaattatagaattaagcaaagtatttaacaaaattttatctagcccaattttatgttgagatttagcaaattaaaattagatcttctcttttaagcttttaaaatcatttctaataattccttttaaacaacaatttataatttaaggattttaaacaagaaaagctcttaacaaatataattagatcatcaatgatcaaataattactgaactgttctttgtattatttaagaattgagctctgaaaaatccgagaaaatttcagagagttgacttaaccatggagaatttaataaaaattaaatccatccatgctttatatttaggaaattttatttcccacatttaacttcacttgtaacttaaagaacatttaatataaattctattaataatttattaaataatttataaatcctgaaacaaaaaatcaggatgtgacaaggagagcagctatgttccaccaagctacattgcccactatggaagaggccatttcagcaatggtgcaggaagagatgagattgaggttgatgagaggtacaaattctataagatcagcatacattgcagctgataatagggaatgctacaattgtgggcaagtgggtcatgtgagctacaattgtcccacttcccggaacattggtggtaggggatcgattcgaggagggcatggtggaactcgtggtggatttggaggagaccgtggtggttttgggggaaatcgtggtggtagaggaggtgatcgtggaggtcgtgttggaggtcgtggtaggggcagaggtgttcctcaggccaatgcagctacggaggatgggaaagctgttaccctaataggtgaacaagtgacacaatgggaggaatggtagaagaacaagaccaatgagagctctaacaccaccactcactttggtaacttcgccaactacgcccaagtgggcgaaggtactcaggcacaggcacttgcatctacatagacatcctatagattggatcatagactcaggagcatcaaagcatgtcacaggattgcataatactttcacatcatacactccttatatccactctgaaactatccaaatcgctgatggtacatccaagcctattcatggtatagggtcggtagagtgcacatcatcaatgaacttgtcttctgttctgcatgttccttcctttccagttaacattctctcagttagctcggctattgatcaactcaagtgcattgttgtatttgatgagaattcttgtctgttccaggagaaggggactgggaggaggattgggactggagtcaggcgtgatgggttgtggtacatcaatcatgaggaactgggactagctgcggtggttggagatgttgagaaggagatcagtttgcttcactgtcagttaggacatccatcttttgagattttgagtaagttgtatccagacctctttagtagagtggataagcatagattggtgtgtgatgcttgtgagcttggcaaacatactcgctctacatatgttggaattggtcttcgtaactgtgagcccttcatattaatacattctgatgtttgggaaccatgcccagttacttctgtgagtggtttcaagtggtttgtcacctttattgattgtcacactcgtatgacttggatttatatgcttaaacacaaaagtgaggtccttcgttgctttcaagactttcataaattagtgacaactcagtttgatgcaaaagttaagattattcggactgataatggaacagaatatatcaataatgaatttgtgtcatatgtctcagatgaggggattattcaccagactacttgtcctggcacccctcctcaaaatggtgtagctgagagaaagaatcggcatttgctagaagtggcaagatctctgatgttccagatgaatgtaccaaagtatctatggagtgaggctgtgatgacagcagcatatcttatcaatcgcatgccttctagaatacttggtatgaagtctcctgccgaactgttattgggtaagcgagagttcaaggttcctccaaaggtgtttggctgtgtttgttttgtgcgagatcaccgaccttctgttggcaagttagatcctcatgcagtaaagtgtgtgtttgttggctatgcttcgagtcagaaggggtataaatgttgggatcccattgagagaagactgtttgtgagtatggatgtgacatttcgtgagttgagccctattataaaagtaaaggagatcttgaccaatttcttgaggaattctcgactgtcatggaggttgatagtcgagagggggagagagagagagaggtgacatacatgaaaaaaatgttggtgacaagaatggagaggcagtagtgattggatcaataccatgctctattgatgatgcgagtaaagaagtagtggaagtcattgaagatacacaagatgaggatagagaaatggtccctcatgaagaggatggagaagaaggagaagtagttgttgggacaattccatgtcctatggagggagccgaaagggtgaaacaaaaggatgtgctagtttaccaaaggaggcggtttgatagtcagggggagaaaagaaaagggttagtgcaaagtcaaattgaagagttaccacacccaaaatgtccagtctctgaatcctcccagagtctctctcctccagcctccttggcttctcttgagacaattggtaatacttctccaactcttgaacatgtagaattacctcttgcacaacgtagagagactagatctaatgctagtagacctcctatacgtcttggttttgagcatcttagttctatgcatgacattgcaaactatatcacatattctcatgtttcaccagcatacaaaacatttattgcatcattacagacagtgcctataccaaaggattggaagtgtgcaaagcaggatccaaagtggaaagatgca

SEQ ID NO: 10370 - DNA, 16202 bp, Oryza sativa
cgcttcgcgggccacccgaaaggggaggcctgcgggcgacaaaaagaaggaggccggcgctcccagcagggagcgcccaaccggcaagtggtgcatcgtccacaacacttcccttcacgacctcgcggactgccgcgcagtcaaaagtttggctgagcggacgaggaagtgggaggaggagaggaggcaggagcgccgagagggcaagtccccggcggttccttccggcaaccggcgaagtgaggccaagcagaaggaccccgccgaggacatcgatgacggcgatgatgacctaggtttccaagagcctggggccaccattgccactgtcgatgagggagcgtgtgctcacgtttctcgccggagcctcaaggccatgaagcgagagtttctggccgcggcccctactcatgaggcgacgcgccgggcacggtggtcggaggttgccctcaccttcgaccagaccgaccacccaccgtgcgttgcccggggaggacagatcgcaatggtggtttcccccactgtttgcaacgtgaagctggggcgtgtcctcattgatggaggagcagccctcaacatcctttcccccgcagccttttacgccatcaaggccccggggatggtgctccggccgtcccagccgattatcggtgtgacgccgggtcacacttggccgctaggtcatatcgacctcccggtcaccttcggtggatccgccaacttccgcacggagcaggtgaactttgatgtggcggacctcagtctgccctacaacgcggtcctagggaggcccgcgttggtgaagttcatggcggcagtccactacgcctacctccagatgaagatgccgggccccggtggccccatctctgtccatggcaacctcaaagtcgcgcttgcttgtatggagcagcgcgcggaccacctcgccgccgcgtccaagcccgagggtggcgacgagatgcttggcacctccgcccccgccgccccgaggcagcggatagtcacatgcgacgaggtcccggtcaaggaggttgccctgggcgacggcccgtccaagaccacacggatcggtggtcttctggacggcaaataggaagacgcgctcgtctctttcctgcgggcaaacgctgacgtcttcgcatggagaccggcggatatgcccggggtccccagggaggtgattgagcatcgtctcgccgtgcggccgggcgcaaggccagtccggcagaaagtgcgacgccaggccccggaatgtcaagccttcatccgcgaggaggtggcgcgacttctggaggccggattcatccgcgaggtcatccatccggagtggctggcgaacccggtggtcgttcccaaggcgaacggcaagcttcggatgtgcatcgactacaccgaccttaacaaggcatgtcctaaggacccttaccccctgcctcgcatagatcagattgtcgactccacagcggggtgcgaccttttgtgttttctagatgcatactctggttaccatcagattcgcatggctagggaggatgaggaaaaaactgcattcattacccccataggaacttattgttatacgacaatgcccttcgggttaaagaatgcaggtcctacttttcaacgtactactcgaatttctttgggtagccaaataggacgtaatgttgaggcttatgtcgatgacttggttgtaaagacgcgcaaccaagagaccttactctcgaatctagcggaaacttttgaaagtctccgctccgcccgcataaaactgaaccccgataagtgcgtgttcggtgtacctgcgggcaagcttctcgggtttttggtctctgcccgaggcatcgaggccaaccccgagaagatacgagctatagagcggatgcgcccccccagcaagcttagggatgtgcaatgcgtcaccggttgcatggccgccctaagtcggttcatatcgaggctgggagagaaggcgctacccttatttaagctcctcaaacgctccgggccgtttacttggacggaggaagctgaacgtgccctcactcagttgaaggcgtatctcagctctcccccagttctggtcgtcccggagccaaatgaacccttgctactctacttagcggcgaccccacaagtggttagtgcggtgttggttgtggagcgcgatgaggacaatcctcattccgcgcacccccaccctgtgctggcttggctcgggagagagcagggaggagaggcccccgagccgaacggtggcccaaggcccctgacgaccggagctggtcctctgcctgcttgtcagacggtgccaggtgcccccgacccccaggatggcccgagggccactgcgggaaggccgcacctatcgccctctgaccccgaggctaaccctgtgccgactcgacccgggagagagcagggagaagaggcccccgagccgaacggtggcctaaggcccctgacgaccggagttggccctttgcccgcttgtccgacgacgccaggagcccccgacccccaggacggccccgaggccactgtgggaaggccgcccctgttgtcctccgaccccgaggtcgtcggcacagaagacaagtgcgccccgcgaggccgcttggacaaagagcgcccaagggatgtggcccctagcgaagaggatcggccccaccgaaaggtgcagcggcccgtctactttgttagtgaggccctccgggacgccaagacccgataccctcaggcctagaagatgctttacgctattctgatggcttcgaggaaactgcgccattatttccaggcgcatcgggtcacggtggttacgtcttaccccctcggccaaatcttgcataatcgagagggtactggacgggtggtgaaatgggcagtcgaactttctgagtttgatttgcactttgaaccacgccacgctatcaagagccaggccctcgccgattttgtggcagagtggaccccagctcccgagcccgtctcagtccccgaggccagctcgggtccctcgcagctgcctcacaccgcccactgggtgatgcagttcgacggctccctgtctcttcagggcgccggtgcgggggtcacgttgacctcgccgagcggagacgtcctcagatatttggttcgccttgactttcgggcgaccaataatatggcagagtacgagggactccttgcgggactcagggtggcagctggactggggatccgccgcctcctggtgttaggcgactcccagctggtcgttaaccaattctgtaaggagtaccggtgctctgacccgcagatggacgcttacgtgcgccaagtacggcgtatggagcgccattttgacgggatagagcttcggcacgtgcccagacgggataacacggttgccgacgaactctcacggctcgcttcctcgcgagcccagaccccaccgggcgcctttgaagaaaggcttgcccagccgtcggcgcgacccgaccccttaggggagacggacgcgcctgacaggcccccgatgcccgtcggagtccaggcctcgggacccgaggggagcgctcctagctcccttagattgattgcttggatcgctgagatccaagcatacctcacagataagactctacccgaggaccgcgaagggagtgaatgcgtccagcgcatctccaaacgctacgtgctggtagaagggaccctctatcggcgcgcggctaacggaatcctcctgaagagcattcctcgggaacaaggcgtcgagcttcttgccgatatccatgaaggcgaatgcggagcccactccgcctcgcgcaccttggttggcaaagcctttcgacaaggtttctattggccgacagctctcaatgatgcggtcgacctggtccggcgatgcagagcgtgtcaattccacgccaagcaaatccatcagccggcccaggccctgcagatcataccactttcatggccatttgctgtctgggggctcgatatcctgggaccgtttaggcgggccccgggcgggtttgagtatctgtatgtcgcgatcgacaagttcactaagtggcccgaggcttatccggtcgtcaagatcgataaccactccgcacttaaattcattaagggcatcatagcccggtttggagtgcctaaccgtattattacggataacggcacccaattcactagtgaactttttggcgattactgcgaagacatgggcatcaagctctgcttcgcctcacctgcccaccccagaagcaacggccaagtggagcgcgccaatgcggaaatcctcagaggccttaaaaccaagaccttcaacatcctcaagaagcacggcgattcgtggatcgaggagttgccagcggtgctctaggcgaaccgaaccacgccaagccgagcaaccggggaaacgcctttcttcctcgtctacggcgcggaagcggttctcccatccgagctcaccctgaggtctcctcgggccaccatgtactgcgaggctgatcaagatcagcttcgcagagatgacctcgactacttggaagagcgaaagcggcgcgcggccctccgagccgcgcgctaccagcagagcctgcggcgctaccatcagcgccacgtccgggcccgatcactctgcgtcgacgacctcgtcctacgccgcgtccaaacgcgtgctggattgagcaagctctcaccaatgtgggagggtccgtatcgagtgatcggcgtcccccggccgggctccgttcggctggccacgggcgacggcacagagctgcctaacccgtggaacatcgaacaccttcgtcgcttctacccctaaagggggatcgggtgtcaggtttcgggctcgggccaaccccgcacccccctcgggtgtgcagggttggccgggggctaccacatatgcatattcttatttctcttatatctgtatttcaataaaagcattttcgatttcctaaaggctgtatctgtgctgttgtttccttttgaaggattttgacttgaaataggtcacttgtgttcaatcctgccgtcgggggctcgggtcggctaaaatcgccaaacggggcccagaaccgagccgtgccccggggcgtggtgaactccgggggggaatcggcaaaaacccacaatcgggtcacccataaccctcggtcaccacgctcccggcctggccagtctcgacatgtggatctccccaggcactagccccgacccgagccatttgaggactaggacctgggcacgagcccttgttcaagccaagacacaaaaggaccgcggcacagacatcctcgcctcatacacacaacaaatagaattgacacaaaaaatttcctctttatttgattgcagattaaattagtctatacaagaaggaggcccgaaggcctcggaagaagaaaagaagaaactatttaaagattggcgggggcctgggggctcactccgatccacccgggtcgccagcctcgtcgccactgtcgcccacaccgccgtcatcgccctcctcgtcggagttgagggcgaacgcgagccgaggggccgaaccctcgaagctgtggacgatatggtcggcggcgtcccggacctgcgcgcgcgcgccatcctcggtcccgggagggaactcgtccagcgccgtccatggggagaagtcgggatccctggcttggtaactcgccagtacgagctccaccgctcctcgggcgaggtccctcgaggatgacttaatcgtcctctcgagctcctcggggagccgttggagagtcccgaccatctccgagaggcgctgagcgaggcccccctggttggcggcgtacttcacagtccgcccgccccagaggcctgcctgccggccggcgtgatctagacgggagacggcgtcccgaagcatgccgggccctacctcgcctgccaaacggagggcctcgacctccccggcggacgagtctagcgcgccctgcagatcggcaatggtgtgttcggcagctgcgaggcgggcggctaagtcgctttcgcccgtggccgccccgccgctgcgcgccctcgcgtccagctcctttgcctgcgcctcgagttcagcggcccgctggttcagtgcggccttctcggcgcgggcaccttccaaattgcggcgcgcttgttcctctagcacagcctcacggagggacgcgctctccgccagccgttgcgccgtggcctcggcctcctcaagagctcgctcccgatcggtgagcgcgtcctcgcggaggcggagtgcgcactcctcctcggcgcaggcggcctcgtgcgccgccagcgttacctcccggatggcaacggcggcctcgcggtccgccaggtccctctccacgacgccggcgcgctcttccagcgccatggcacgagcctcgagggcctcttcgcgccgccgagacgccgcctcggtctccgccgcccgccgttcttgggcagcggcagcgtcaaggaccccccgggcggtgtcgagctttttccctagctccgcctcccagctcccgtattgaaggcggagggtgtcctgcgcctcgttcatcacggtggtggcgatgagggcagccccccgctcctcctccacctccttggcgatctcccccagcaccttccgacgggcttcgagctttgagacgtgccggcggtgtgccttgcggcccacctccaccatggcctccaccgagcgtcgcccctcttcgacacgcgcccatgcggcgtcaagctccgcccgctctgcttgcagggtctccacctgggcacttaacccgtccaacaccgtggtgtttgcgacggccaaggcctgcagaaggggttctgcgctcagtggagcaacggaaggcgtggggaagagccgcctcggtgaggatgccgcgcggctcggcccgccgatgaacgtgccggactcagggatgtcccccagacctggcttgtcctgagcgtcgcccgagggaatgggcccaagcgatgcgcccgcggcctcgtcgcgagctgcctcggaagtcgtcgccgcctcggcctggcgaagtctggcctcctcccgagcggcttcttcagcttggcgagctcggacggccacctgggcggcctcctcggcttcccgtaggcgatccgcggcttctcgccggtcagattcccgcctccgagcctctgtggtcgccgggtcctcggcctcagactggccggacttggaatggcaggagggacgcgacgagatctcgctgaaacagaagaaagaccagaagacaaacaagatggatgagtgaaaactcgcgttgagggaatgaatacggccacgatgggcgtgggacgaacctgcgagggggacggttaaacgaccaccttggaggggaaataaggtttccccgggatggttctgtcccccccatcttgcggagccgtttcttcttccgctccccctcgggctgcgacgtcggcgtggccccctccgggcgcctgctgctggtacgcgccgccccgccccctcggggaggagatgggggaggggttccttcctgcttcctcttcccccgggcgtcggcagggcggccgctccccgggcccccgtcgcggggcccagaagcacgaccccctcccggggtagatcgttcccccctgcggctcccgcccgcgccatcgtggcctcgaggagcccgctcctccgatgccccgaccgcctgcatgatggtcaggatggaggcgcggtctggatcgctgcagagggggaggactccttgaggaatgagggatgcctccacggagctgagattcagcacccgttggaccactatcttgaagtcctcaggagcccagtcccatctgactccctggtgggtcctcatgtagtcttcggatccggtgtactcccaggcgccccggacgcgccgctggagcggcgcaatccggcgacgaaggtagtcgccgtacaccatggcccctatgagccccagggatcgcaggcccgccagacggtcgaggacggcgtcatagccatctcccagatctaccggcgcccgccagctggaggcctgcgccgggggctggctcggaagtcggaggcgcgcttcgtcggcgaggggggtgtagaaccagtcgctcttccagtcatcccacttcttgcggaggacgcagggaatgtagcggttcaacaccggccccgcggctggaagtagcaaccaccaaccaccgacggcggcgacaccggctgtacagtgaagaaccaccggaacagccgaaggggtgggcgcaccccgatgaacatctcgcacaggtgcgcgaagatggccaatgtcattaccgcgttgagggtgaggtgcgccatctggagatcgtaaaactccagaacatccatgaagaaagaagaaaatggcggaaccagccctgccattgcaaaagggaggaagaagacggaccgccccgggtagcatggcgccgggcgtccctcgcccagcgtaactatctcccggccggtggcagattccggcatgaagcggcgcggcagcccggcctgcctctcactcacgatgcgggaaggcggcagcacgctaccatcaagcaaagcggagccccgtgccatgacgccggaggaagagaagtttaagagcgagcgcgtgtggcgaaggtagggcacaggaaacaaggagttagggcgcaagcggcgaagacaaggggaataatggcgagaggaaggaagcaaatctcttcctcggcgtctttatacccttgccaacgctgcgcccggctcctcgcttctcgcgtccactatctcgctccctcgtttctcgcgcccacgcttccactaatcccattcgcccgtttgcggtgcatgaagtggatatgcggctgtggcagttgagatggaacatctcgtgcgcgcgttaattacgctcgccgaccgaagcgccatcatcatatctccaggaaaaacgaaccggcttgtcccgatttttagaccggccccacctgtcaccaggccttaggaagtggcgtcacgcccgaccgcttccctcgaggagagcgatcgccttggcataacgccgggggctactgtcagtgacatgggaccgggagtatcatgacttagagacttgaggcagacacgatcacccacgtggcctaaccccctcgggggggtcgggcccgagggtgatacggccgcccttctctttgtctccccgaggggtcggaccgctaccgcctcggccccgagggccgaggtgccccgaccccttgtgggttttgcgccgcgtatatggggtaggtgagcatagcggggctcacttaaccacatttattgcggtttggacgagcgcgtcacgccgcatgtaacgcagtgcagcgcgctcgtttatccggtctgtgaccggtcacagaccggtcagatcgtgggttaggtggcgacaggcggtctgacgcacgcctcgccccatcccgtcaggacgagagcctccaagcactcgtccctagccggaaccggcatgttagctcctggagatggcacgttggttccggtcagatatatgccaggcttcatcctaaccattacaggcaagatattgtatgaagaagggcgaacatgcagattgataaactgacgcgtggtggacaagaatgaccgatttgtgaccggtctgacactggtcatgtcgtcagcagacagtgtcacgcccagaaattcacgaaccagaatttctaagctgaatgtgtattaaacccctgtccaggaccagccagggtacacaaacgacaattgttgacatacagatccacgtcttacaaaaatataaaagattacaaatgcaacggaaaaagataaaagcgagctaagcctgaaggcttgactcctgcagcgggcgactccattccacaggcatccttgacggcagcgacgaaaccaacctcttcgagacatcttcaactgagaaggacttcaactctggtgtgggggaaaagagagcaagactgagtactacccactgtactcagcaagtcataccggaagaggaggtatgatgcaagatatatccaagggaggctaaaggttcttttgcataaagccggcatttcaaaacagtagttgaaagcagtaaaacagttgtagtaattaatccatattaaccaatcactgtccaacgttacaccacgttgcaacaggcccaaaccaccacctgaactaaccagttccaaaagctaactagggtgaaactaatcacggtgaatctggtcgaccgcccataaccgcgggcacggctattcgaatagttttactctgatcagaggtgtacaactgtacccacaagacacagccccacgacacgttcccgtgcgccgacatgccaccacgacataccggaaagaggccgtgtcaggacccttcgcataaccctctctaaccgatcgcaccacaccttagggttcgcccccgtccccagcaggcaacgggcagcccccctttcgtgccgcggtgaatccggaagccgatcaaccggacaccccggccgacccaactccatcacgcccaccctcgcttgggtacgtcggctagagaaaagctacactacaagcccagccgttgcccacgctggcttgtggtaagtacgataagttcttccagggcatcccgcgaaccggtccttaatcgccatgggcacgtctagcaaaaccatgcacccacagcccaccatgtagtgtattttaattagccaacaccattgcggtggcactaatccaaagctattgccaataatcaagtctatgctttaatgtggtccccttttgtgcactagttgaactaagcatggctaagcatctcctaaaccaacatctagtcattttaatacccaagttatcaatggcataagggaaacaacatatagctgagtaataggacccatcccacatgatattgtaaaacaatgcaatatttaatagaaatgcgggacatttgtaaattaggtacaatatgatcaattgcaatgtatgacttgccttgctctcgcactgatggaaccacagcaacgtcttcgagaaaccacgaatcgacgaaacggccgaaatctacgcgacaaacaaagcacacaagcaaaacatgctataagactactgtaacaggaaacaaaaccatttttaatggattctacacatttttatgaatttactgagacttgaatggatttaatcggagctcggatgaattagttatgatttttagaagattatatgtgtttattactataaaagaaaaacccttaatcaatttattgcgcaataattcatcccagggctgacgtcagcacaaggaggggtggcgccgacacgcgggacccgcgggtcagaggcacaggagagagggagagggggcggctggcaagcgggacccaccgggcagcgtcacaaggggggggggaaagcggcgaggcgcccggtcggtccggctcggcttcaaaccggccgaccggttatggcgagggcggtgccgcgcacgcacggtcgccggcgacggcaaccggaggcgcgggaagcgacggcggatgacggcggcgcaaaggcggcggcacacagccgaagcggcggctcggcccggcacggcgctaggagggagaggaaggggaaaagagggggaggggcgcctcaccgcgagttggccggcgtggggggggaaagacgacggcgaacggcgacggcgagcgaccggggaacggcgacgataggcggacgagctccgagacctcctagggaacaagatgggaggtattagagggagaggggtggttaacagcgagcggattcgccggtcgaaggcggcggccatggggtactcaccgacgcgcgaggagaagcaagctccggcggcgggattgaccggggaaacggcggacggggtggcgcacaagctggcgaacccggcggcgtcatcggcgcggtgcggcgacggctctagcggtggcggagtgcggccggagcgtggcggcgagcggcggaaggcgggatgagaggcgcgggagcgatggagagctcgggagggctcggccgagaaaggaaaaagagagaggaaggtgcgggcgtgcttaaataggagggggggcggcgagtcgtggccgggaacggcgcaatttccccggagtagtggaggaggtggaggaggagagagagagtgggggaaatttcaaatcccccgccgtttgcgggcgcgcgagctggcgggaggagcggggaaagtgggcggcgacgtgggcgtgcggtacgggcggagtgggcgcgggagcagcgggatacgcggcggcgtgggcggtggtttcgacggcggttggcgcgggcgtgggcggccggaggttagggaaagggctgacaggtgggccccacctgtcagcgcccgagagggagagggaggccgggtgaacttcgggagtgggagggaggagcgggccggcgcgggaggaaatgggccggcggcccaagaaaaggaaaaaggagggaaaagaaaagataaaaggaaaaaggattttcccagggatttaatattgcactttgcttattttaattggttaaaattatttccaatgctctgaaaattccactaaaaatcctgttagcatattttgacatgtagaatccaagaaaaattccacatgccgattccgattattatttgcatttattaatttagggtttctctcttgcctctaaagaaataatttcttccaaccatttattaattgaatttttgctagggaaaagaacttctgggcgcgacaaacctaccccccttaaacggaatctcgaccccgagattcggaagagctggcgaagaggtgcggatgggcggcctttaattcattttctctttcccaggtggcctcttcctcttagtggtggctccactgaactttgcaaaatctgattactttgtttctggtccttctctcgctggtttccaggatacgaattggcatctccacgtaggtcaaatcttcttggatgtcaatgtgctctgagctagcttgttcctcaggtaccctcaaacacttcttcagttgagacacatgaaacacatcgtggataccaaccatattaggtggaagctctagctggtaagcgacttcacctctgcgttccaagatcctgtatggtcccacaaagcgtggtgccaacttgcctttggtttggaagcggtgtactccccgaagcggagtgacacgaaggtacacataatcccctgcttcaaaagtaagctctcttcggcggttatcagcataactcttttgccgagactgggcgattcgcagtctttccctgacggtcctgactttctcctctgcttcggttaacacttctgttccgaacagttgacgttcgcctgtctgatcccagaagagaggtgtgcggcacttccggccgtataaagcttcaaacggtgccatctgtagactggcctggtagctgttgttgtacgagaattccgcatatggcaagcttttgtcccaagctccaccaaaatcaagagcgcaagctctcaacatatcttccaagatttgatttactcgctcggtctgaccatctgtttgcggatgataagccgtgctgaaattcaaacgagtccccaattcttcttgcagtttctgccaaaattttgaagtgaactgactccctcgatcagatacaatctttttgggtaccccatgtagacacatgattctcgagaggtagagctccgccaaccttttgcccgtatacgtggtatgtactggtatgaagtgagcaaccttagtgagtcgatccacgactacccagattgaatcgtgacccgatgatgtccggggcagtcctgttataaagtccattccaatctcctcccatttccattccgggatttgaagaggttggagtaaacctgctggtctttggtgctctgccttcacccgttggcaaacatcgcagagtgcgacgaattcagctatttctctcctcatgctgacccaccagaatttctctttgaggtcctggtacattttagtactgccgggatgaattgaatactgagtttgatgagcttctgtgagtatgagatccttcagttctttgtcgtcaggcacacacaatctttctcccaaccagattgtgccatgctcatcctcatggaaatctcgggcttttccgaccctcatattctttttcagctcagctatttcaggatcatttacttgagctgctctgacttgatccacgagcgtaggccgtgcctctagggcagctacgtacccgtgttctacgatgcccaaatttaggtgctcaagatcttgctgcaatttgtcacacatgccttcggtacatactgcattgcaatagctctttctgctcagagcatctgctaccacatttgctttgcctggatgatagtgtatccccatgtcataatctttaattaactctagccatcttcgctgtcggagattcaagtcaggctgagtgaagatgtacttcagactcttgtgatcagtgtatacttcacagcggttgccaataagatagtgccgccagattttcagagcatgaaccactgctgctaactcaaggtcatgagtgggataattggtctcgtgtggacgcaactgtcgcgaagcgtatgcgaccactctgccttcttgcatcaacacacatcccaacccttggcgagatgcatcacagtagacttggaagtcttttgtctgatctggcaaaattagaactggtgcagagactaacctcttcttgagttcttcaaaactttggttgcactcagctgaccacttgaatttttcatctttctttagcaactgtgtcatgggcctggcaatcttggagaaattttcgatgaaccgacggtaatagcccgcaagtccaagaaaactccggatctaagaaactgtctttggtggggtccactttgtaactgattccacatttgatggatccactgccacgccttgagcagaaatgacgtgacccagaaatttgacctccgataaccagaagtcacacttgctaaacttggcatataactggtgctccttcaatttctcgagtaccagacgaagatgatgctcatgttcctcttctgattttgaataaataagtatgtcgtcaatgaataccacgacaaacttgtcaagaaactccataaacactttgttcatcaagttcatgaagaaagtcggtgcattggtgagtccaaaggacataaccgtgcactcaaacaacccataccgagtggtgaaggctgtcttgggaatatcctcttcccgaattctcaactgatgatagcctgatcgcaggtctatcttggaaaacaccttagctccttttagctgatcaaacaggtcatcaattctgggcaacggatatttgttcttgattgtgacctcattaagggcgcgataatcaacacacatcctcttggtcttgtctttcttctccacaaagataaccggagcaccccaaggtgaagtactcggtcggatgtaccctttctgcagctgttcgtcaacctgcttcttgacctctgctagctcattagctgccattctgtacggcctcttgtaaattggagcagtcccgggtgccagatcaattcggaactcgatttctctcttcggtggcattgtagtgaggtctttaggaaatacctcaggatattcttgtactataggaatatcctccaacttcctgggacttttctccactgtttctgtctgaccctcaatagcagcctgattcagactcgctacggacttctgcgacgctggggaacggaaggtgatcttctcccatttgtcgttggttagggtgaattagttatgatttttagaagattatatgtgtttattactataaaagaaaaacccttaatcaatttattgcgcaataattcatcccagggctgacgtcagcacaaggaggggtggcgccgacacgcgggacccgcgggtcagaggcacaggagagagggagagggggcggctggcaagcgggacccaccgggcagcgtcacaaggggggggggaaagcggcgaggcgcccggtcggtccggctcggcttcaaaccggccgaccggttatggcgagggcggtgccgcgcacgcacggtcgccggcgacggcaaccggaggcgcgggaaccgacggcggatgacggcggcgcaaaggcggcgg

SEQ ID NO: 10371 - DNA, 54452 bp, Oryza sativa
  unsure (1)..(54452): unsure at all n locations
cactttgcttattttaattggttaaaattatttccaatgctctgaaaattccactaaaaatcctgttagcatattttgacatgtagaatccaagaaaaattccacatgccgattccgattattatttgcatttattaatttagggtttctctcttgcctctaaagaaataatttcttccaaccatttattaattgaatttttgctagggaaaagaacttctgggcgcgacagacagccatgttcccacgtcgcgcctgcttccggcggaagtggaggtaggtatgggcggtcccgtcagaaggtcattcggacggcaaccatacaagtctccgtctgtttatgaataaaataggataagtccccacaaaaaagagagagatggtgcatgtggtatccccttgaggtataaaaggaggaccttgcccacttagaaaggggattgaaggggggaaaaacaatcccagaacgatcgggggctggctcgcgctttgtagcttcttcatacacagatccaccaaaacacaggagtagggtattatgcttctcagcggcccgaacctgtatacatcgcccgtgtcttgtgtgatttcactctcgcgaactttccacagaccaagagcttagaacctcacccagggcccccggccgaaccggcaaaggggggcctgcgcggtctcccggtgaggagccccacgctccgtcagctacccttctcttcttcttgtagctgtcccatctcctttctccttctagtgccgccttgacaccatcctccccccaatcttccgctcaccgttccaggcgtcaactcccagtgaggacggaagcagaatgacgtctcctgtctctagcatccatgagaccatgatggcattgctacgacaattgccgttgttgattgcatcttttgatccaggaagaagtcaaagaaaaatcctttggacttagaacaggttttgttcatctctgcttgatgcaatctagcacaatcccaaattcgaacggtaagggctcactgtaatgagagagaggagatagggggagagagacgagagggaatgataatgaagaagaaaaagacgaagcaagcaacaccattccgacattcttcaatattggcacccaccaagaccgacggtgttgcacgacgtcgaagccagtgtagaacgtcatgaagacataggcgtgcaacgctatgctgggcttgtgacttggcattaccacctccctcgtctctcctcctgcctgctcagcctcgccggcgcctatatagatgccaaagaccagggtcgatgtgtcatgtcatagaaaaccaccatatataaaaaccggtttaggagtcgttttgtacggtttaaactgttggaggcgttgttatacctgattttgcggttgaggggtatgaatcaaattcgacctatatttgagggagtctagttgaactttcccctttctatttggatccgaatccaacgcgcatagccccagttgagttttgaagtaaacacgacgccgagttttatgcatgcgacgcgactcgccgccggtcacgaacttacgatggcgtccaccgccgccggcgacgacttccgggattggtccgggctgccggaggacctcctgctcaccgccatggaggcgatgcaactccccgacctagtccactccggcgccgtctgcagatcgtggcactcggcgttcgccacgttccgccgcctcggcctccggtcgccgccgcacccgccctgcctgctgtacgccgccgccgccgccgccgacaatgccgtccgcctctactcgccgtcgtccaccggcgcccacttccgcgtgcccctcctcgacgaggaggcggccagcggcgtcgtcggttcggcgcacgggtggctgttcacaagcgacagggacgccaacccttacctcctcaacccgctcaccggcgcccgcgccgcgctcccgccggccacggcgctcgggcgcgtcaggggcaggaggttcgtcttctcccccggcgacggcggccgccggggcgtcgcgtacgacgtcgacttcggccggcggccgggcggctcccccgacgtcaggcaggtcatggcgcggcgggcgaggcggtggatgtaccgccgggtggcgatgtcggcgagcccttccgccgccaccggctgcgtcgtcctgctcctgcacatgccggagcgggagctgtccttcgccaggccgggcgacgagcgctggacgccgctcgtcgacggcggcgtctgggccagccacggcacctccttcctcgacgccgtccacaaccccggcgacggcctattctacgtgctgcaggactccagccccggcggcgacaccgtggtgcactccctcgacctcaccgcgccgccgccgccgccgtcctccccggtggccacgatgctcatgttcgcgacgccgccgcgtccgtgcaaccaccacctcaagaagaccatgtgcaggtacctcgccatcacgccgcagcacccgcagcacgtcgccggcggcctcgaattcctcgtcgtggagcggaggtggcgcaggtcggggagcgacgacgacgcgagcacgacggagatgtacgtcgtcatgctcaggcctctcgacctctacttctacgagcaggtgagcctgcccggcggcgtggggggcgacctcgcgctgttcgtcggccacgccggcgccgcctgcctccgcgtggaggactaccccatgtttcgcggcaactgcgcctacctcaccgacgaaagcgacggcgacggcgaccacgcgaacccgccgtcgtggaagcggctggaccttgctctgtgggagttcggcgggagcaactaccgcgggaggttgacgaagctgcgggacatgtggccactccaccatccatggcaagataattccccgcctcctatttggtttacgccatcgctagattagcgcatctccaattcaaaggtgtgtgataagctatatattgttgttattttttaaaaaaaataatacaattgtaatgcaactaattacattgtactcataacttatattatagagaaaattctctacatacccttgaaaagtttcacaatttcttctatacccctaaattttacttcatcctatacatacctttgagttttcatttggatcttctctcacctatacgaacgctatgattttttcatttcttgctcgtataaatcttgaaacaaatttaacaattcaacaattattaaaagttatatacaagttacaatataattacactacttagattgagaattcgagagaaaccaggtgaggagaattggacaaacaaaataggaatggagctagtacttagattgagaattcgagagaaaccaggtgaggagaattggacaagcaaaataggaatggagctagtacttagattgagaattcgagagaaaccaggtgaggagaattggacaagcaaaataggaatggagctagctgaagtgttcttataaaataaacttgaaagatggagttaggtttagattactctacaactttacttcagacctacaactttacttcagacctagctcttacctagctcttgaagctaaacttacaagttggaaactaaatataaactccacttcttttctagccattccgctctatcggatctatggtagtctcagattcttttctagccatttcgctctatcggatctatggtagtctcagatttggtattcagtagaatttcagaacatactcaacatagcaatcccctacaaccatacaaggcaagcagaatctgaaggcaaattctagactaatgattcatgtatcttttaactcccaatttaaacagacagcattggacatttggaaaccaactgctgcaagcctgcaacaggtgaagaaggatatactgggcaaggaccaaggagaatcaacttataacacaaaataattcacaagttgcattgatgttctgcaacagtcctagcctgcccattgacatataactccaatatacacaagaaataaaattttaacatgaacaaattttcaagcaatatacaatggaatgcttaatgacaagctgaaaaaaaggggatgtctactccggaaatgacaaatccacggtactttgagcgaatcaactttccatgaagcacacacctcactattcacaagactgcaagaagggattaaataaccaaatgtgcaatcgaatcaaccttggactggaacttcattcgaagcaaccaaagtggtggcccggtctggccctgttgcatcctcaacaccatgttcaacagtgagcccctctgggccagaaggttcagcaggagggatttcaaccgagttgtcttgcaattgctctaccttggctcttggagcttttggttttgtgtttgaggttttctgctttgtcacaaggggttttgtctcggtctttgcagtggcagatgcttgggaaggaatttttgtgactgatctttgagcaggctttctggcagtagcatgaggtttgttattttctgtgctttcggtcaatttggccaaattagttatgctccgaggactctcacatgatacagaaccatcaacagaagcagcagcagcagaattggttggcttgtgccggccaagctttggtgacctagcgcgtgttggtgggatctgcaaatagtcacatgagttgatttcattatttctttataaatatgaatgggaacaggttcttagtgccatacaaaagatagcatatgtataaggaaactgaacacccaaaaaaaacataagaaaccacagagaagttgtttatcatgttctgaactatgaatagtctagcttactgtaaaatggcaaagctggttctgctagcatacagcttggatggagaagaccaagtatttgtcagtactccgattaaattaccttacaaactacaaatcttggtgattactccgtcaaaacatatagacatattatgatggatgatttgaatacattaggcagttcagggattcaaaaccatgaaaactaaatacagaaaggtataaactgacaaggtggaacctgccattgtatagccctagcaccaagatttgcaagaaaaatgcttggcatactcaatcattacagtacaagcctgaaatttgtacagctacttcaatcctcaatactattatgaagatccagtagaacataagtaatatcatgccagaagatctagcaaagcatacaaaattatgcacagctaggcctagttaagtttcccctccataggtaggcctctttctctaggaactggacccagctcagttggtgggaggtgtgcttataaactcccaccatctacgtacaagccctcttggacttgaatttggtgcctattatcttcttcattaaaaaatatgctagttcctcctaggtattcctgctttctttcatactagatcaaaatgatgacttatcacatatatctatcagcactcaacgggaccaaaattcaaacttcaatgtaggatcattttgtcaaccaatgatgatttaggatcagatctgctaattgttagttgagtactcttgttagtttacacgtttatattgtgctaaaattggaaacgagcaagaatgaaattgacaccaaaagatgccagtgagcagaaacatgaggcagcactcctagaagggttacaactaaggtgttatcaaaacgcgacttatcaaaaagatagcacaaacagataataagcatgtttttttttcttaagacgtcttcgcccctaatacctccaagcatgttgctaataaacaagttctggtattaattcctggtatattaagctacagattgacatcatgtaatgcttattttaacattctaataacagaaactagaaacaaatgattatttttcaatttatatcatacagtgaacagagtatttgaaatgtccatgcaaacttgtcaaggcatgtttggtggtgaggatattgcagtctagaactctagaagtcttgaataatgtggatttttttttgccaacagatatcagcaactttgcaagatcaagtttatcttagtacctttttcaactcaactttaggaggttgctccttgtaaaagcttggcatgggtgtcgctttaaatgtcaggctcttcctaagtaatttgatctcagcctcttggctctcctgagtaatagattaattttcagatccaagtggtacaaatattcaaaagttttatattaatgatatcaaaaaggttctcactttagattttgcctgcaaatttgtttgttcaagctcctttgcatggatcttctcttcaagtttttggtagaactgaaagtaagacagcactaaacctggtcagcataaggggggaaaagagaatgtaaatgaacatatggattagcgcaatgcctttatgggtataatatacctccttcctcttctcagcacgctcctgcagcctgaaactaaaaccagcagcagcagcagcattcttgcgttgagcagctgctcggggagtattggtactcctgcatgaataaatgagcatgtttcatgttaataaaaacacagggcataaaaaaagagcagctatcaagaaaataaaaatgctttacgatgtggtggagtgcacatcatcctccattttctctggcagagtctgttccaaagcatttgtggtgttctcgtttgacctgatataaaagatcaaccatttcaggccaagcaaaccccaaacagcactattatgaattatcagtggcagtaccatataatttttttctggcaagcatcacaacttggatgcacattaattgcatggtgctaactactaaacaacaactgaaattgcaatccagaagaaagaaaaggacggccaaaattgttggttggtgacagaattgacactcactcttgggtttcaggagaagcatcatttggaggcgcgtccaccgatccagatttaacaggctacgtcacagaaatctgtaattaatttttactgcattgcaactaaaaattgacaagattgttactcgcggaagatcactcaaactcatgagttttaccaaggagcggcttgcggcaggcgtccgggctgaattcaccttcttctccacggctcgccctgcgattccatccaaattcagtaaacgcaaacatcaatcaaccatcacaattcacaaaacccgagcgaagaacaagtcccaactaaactaaccagccgccttctccgatccattgggcacagcgcctttcccgtccgtcgtcttggcctgctttggtgtcgccgccttcttggcagccgcccctctcgccgggaacgacgcgctctgcgacagcgcgggcttcttccccaccttgccgttggccaccgccgccgccaccttcggctttctcgccgcggccgcgccccccgatccgcccttctgcgcaaaccaagcaagcaaacacccagagagtcagcaacgaataccaccgcactcaccgtcacaggaatcccgcgatccccgtaccttggccgtcgtcccctccgcggccatcgccaccaccaccaccgcctgatcagatccacccgccgccgccgcctcccccccactggcgagatccccctccgccaccacctccgctacctccacagccccattcaccctcacctcgtcctccccctccatccctccactgactcccacccctatcagatcccagcaagatcgatcacggccaagattcaactcactctaccactactgatcagtgcgggagaggggaggcgatcggtggatggatggatcggcgtggagagatcagtgagaagatggtggtggtggggaggggagaaggcaaccacccaacaaccaccgcgctgggctggctggcagccgatgcggctgcgagtagtgtagagagggagagggaggttgggggggagtgagttggtgtagggagggggagggagacggagacggagacgggacgtgctagccgttcgcgagctggacggtttctctgccgttttttttccgcggacggttttgccccctctcctccactcctcggagtcctctctttttctcatttctcccccgtgtgcgcccgtgcaaaccacctccggaggaggagggggcagagaccccgtgtgtggggtgtggcttttgtccattctgtcagttggtaatacacttcggttgttttctctcctctctcccaacttccacctctctttttccacgtttatacttcctgaacgattaaacggtaattattttaaaagaatttatgttttaaaaaaatcatattaattcatttttaagttttaggctaatactcttcgttttatattataagtcatttgatattttagatgttgcttatttttttataaacttgatcaaacttatcgaagtttgattagaaaaaaaatgtcaaactatttacaatatgaaacggtggaagtatttaattattcatatgctaacggcttgctccgttttatgtgccgagggattagttcctaatctaccataccgaacacaaccttctactctctgtgaagatatgtttaatggtggaggtctcattgtttgatttatgcttatgtttagattctattcggtaccgctttagatctcagacccacggtagatttaaagtttgtatgttaaattgtaattgtttaaagtactaaatttcatctaaaacatgaacaaaaataatttatctgaattttatcaacgtaattatagatctagacctatgcatggatttgtgtagttcggaataccgcttcggaaaattttggatccgaagttgtgccaaagaaaactttataagctaaattttaagttttaacacttaattttggagttgattttatgattttttttaatcattacttatttttatagtatttggttttaaatcgctaacagtacggtaaatgttttactcgtaatatttttttaattgaaaataaccggttctgatatacatatgcataagcgaaaatatagggcgaatgttaatgatgctacacaaatgtaggtggtgattcgttcgttcggagtcaaatcattttgtgtgttagctatgtttattctttggacacacagctgtgtggttgttcttatccgctagtaacacggaaaaggtgttaggagagcactgttggtaaggttagactaatgattacctttcctccacaaaatgctgaaaataaacatcatgttcctctccctttcacctatacgagtttcatttaaggattaagagtttttgcatgcatcaaatggtatatttgacacgcatatatatatatatatatatatatatatatatatatatatatgcccgtacaaccatctccgggggttgagaccgtgcgagttgacaatgtgccgactgttaatcaaattacacttctcacactcatatgttcaacaatgtacattgagatattgttgtaggtagtgatccatttatttaaaaaattaatcactggttgtggttatgcatactctttttcaaacacaatcgtgtttattcttatcgtctcataagaagagagatgctaggggcaatgttgggtatgatatggctagcatctatcgacacaaattgccaaaagcttcaatcatttatgttgcccataggtttctgtgggcttaaaacatgtgtgatgtgatggtttcaactgttggtaagtttaattaataagtaacataaatataacattctgcacaagatttctgtttttttccttaaagaatctgttataaatagctttctattgaataacatattagcatattataaaaatcatttgtgctatacgtcgccactacaaatgatataacaaaaaagaaattacattacaattttttaccttaatattatcttatattactgctagatggttagttttatctactactatcttatattaatgtagcataatactattctactactacgaatctatataaaaatattagtattttattttttgagacgaaggaagtaacctatcatcaaccgacgaccatccatccacccggcacgtatagatacagcaccgcaccgcaccgcacagcacgtcagagagaataaagcgagaatatttgtcgcgtcagccagccagtcaggggcagtgccgtctcacctgcacgagctgagtcgacgaccagtccatgtccaccaccacgagaaccacacgccgcgcgcgagtggggagcatccgcggcacgcacgcacgtaaaccgcgcgccgtcgtctccggttcttcgctaccgcgtacgtgaagcggagcgcgcgccgcgcggctcgcacaccggccggctgccagtttgttcgggctggagtagttgagcacccccgcggcgcgcgtcttagcttattttcctttggaattttgtggctcgatcgagagcttgctagctgcttgttgcttgtccggatcgatcgatcaaaaaggacagggtgtggaacaaaccgcacgcgtacgtgcatgttcggttgtaggggtgaaaaaaatgtacggaaatttccgacggtatcaaacctgttttgtgtaaaactaatattaaaataatactccctccatccaaaatgtttgacgctgttaattttttaaaatatgtttgaccgttcgtcttattttaaaaaattaagtaattattaattcttttcctatcatttgatttattgttaaatatacttttatctatacatatagttttacatatttcataaaagtttttgaataagacaaacggtcaaatatgtttaaaaaaatcaacggtgtccatttaggtaaggagggagtatcattttagttcattttctcggtcagttggagaagatcgccggtctaatcagttgtcaagcattcaaacggctttttttttaaaaaaaaaaacaaagatcatccagccgggttactatattgttttccataagcacacctataccgaactactaaatgatacttcatccgtaaaatataaacatttatagtaatgaatctagttaactacatatccagttttaactaaaagttgttatattttgggatggaggtagcacttttattttttgcaaaaacattctatataaaacttttttttagcccttataaaaataaaacgaattcttaaacctctttcacgctcatgtcacgtgagagttcatgctcagcgtgaagaaaagctaattttttgggaattttagaccaaacttctaataaactcttttaaagttcaaataaacccatttttctaatttataatagttcatactcaactaatcatgtgttaatagatgatctcattttgcatactgcgaaaaagcgtagccaatccactttgtccaacggagccttagttaagtatatgtgcatacaactcaatatgatatgaaataaaaaatttcacataatttttccgtttcttttttactttatactggatattactcatgtaaaaactttgatcgttcatgttcttttttcaaaaatataaatatttcaaagaatcattgcattatcaaagtactttatatgccaaatataactatatttcgtttatcaaaactttgtaatttttttttaaaaaatattggtcattgataaaattacatttgtcaacacgtcaaaaaaaaagtaactgagggagggagtaattaaatttcaaggatcaagttctacaaatatttagaactaaaatatatattttttaggaaaaaaaaagcctcgacgaggcttctgtgcctgcaaattaaaggttcaccgttcctggacggtcgagttaattaatttcgctgtttttcatgttaatgaatcgagttgattaatacacaaagtacaaaaggcaaaatcgtcaggtacagatcaaaagatcaggaggacggattttctcgttttggcggtgaaaatcaagtttactgctcttccttttgactctcaagtctcaacacgatctcttttgagagcacgcttaagaaagcaacactggggtgggtctctgccgttaattcaacggacggtgtatagaggctgtctggggaggttcctgcagctgcagcttcttctataattagaagctccgtcaaacagtctagcttttagtctaaattctgagaagctgtagttatagaataaaaaaattaactagaagtcagttttttcagattttcagaatttggctaccaaccagctgcttattagaatgttaaccgtccaaacaggccaaagtgttcttcacccgtgcggtgcacccgtgcaacaaaccacctccagaggctgcagaacttgtgggggtacgtgtgtcactgtgtcagttggtaataactttgtactttcgcaagctgcaagcatatctgaatatgttggatggtgtacggtgagactattaattgtacttgttagtggtgattcgtttttttgaagtcaaatgatcgacttgtgcttttgaaacacacatctatcggcgttcttcagctagctaatacgaaaagatgatatggacgacgaagggtatggtattgtactatggttagatggtttagcatcgacaactagatcatgatcgatcatggatcaataattttctttcagtagacgtttgatgtcgcaattctggtatttgtatagtatggggatcgtcggtgctagaatacacgcgagactgaggtaaaagagatggagacgaggatttttatacaggttcgggcccctgaattgttaggtaataaccctacatcctgttggccggagccggtattgctcttattcaccataatcacaccagtacaatatgtggggtagcctatctaactgttgtcgacatggcggtctgaaggtctgactcgtagtcgacaacagggtagccttcctcctcgagctcgcgcccgtcgaaatcagcgatagcgctagattcctacggccgacttctgtaggtaccggatagggccaatccaggcatatctctgatgtcgatatccggcggcttgtcttggcgtatgtaggcttgtatgttgtggcttctggtgggtgtatgttgattgtgttggttctccctctggtcctcctagggggtcttgtatttatacccataggtgtccccttgtacaagtagaactaggaaaaccaatatggatacaatccgagtagtccttgtcgtttccatgtagaactctggttgtctttccttatcggaactcctcctatatccgcaggttgtttccgtataggacatggtatgtggtggatcctatcgagatttagtcaactactattaggtatgtggtatccataaccatgacagtagcccctgacttcaatgcaaatgaacaagttcatgttctcgactgctgaccatggagtaactgttatcgagctcaagtgaccgttctcggtgagttcagagataacgttagacttcctttattagcctcgtgcgggcacctaaagggtttgtctgagtcaatctccgacgacaaccaagaaagtacatagcgtacgactaagtctcttgtcttgccgtaatcgagaatttggattgaaatcaagaaattttatctcggcgggtacaccatctcttcactccgtattccttgtcgagatccagcaaccgttctcgagcgatcgagaaggcgtagagtctgcgacggagccttgtcaacatttgtcgtactcgccttagtcgatcttggtgtagaaccacagagacatggagtcttcaacaatgtcgaatagaattttcctgaaatcaatactcagaaaaaatattaaatagaaatagcccccgagcgaacgctcaaagggtaacatgttataatataacagactagtgaattgaatgtacagactaatgttttgttatatgagcgtcttctctcttaccgactccaatcagtcagtttgtagagtcatacactctccctagcccctagccttgtcgtcggagaatcgttctcggatgataaggctcttggacctttgacctgcctcggttgaacaagcactgatcctagcccccagccgtgaagttggaaaactcattttccgattacacggcttggttaatacgcacggcgagaactcttacacgaccagatcttacatggtcttttgtctctacaggatccgacaaggccttatcggctttgggcgtccccagctgaagttcccttaggttcctcggaggccttgtcaagacggcgtaaagggacagtaggataggtttcaacgctaggtgtcatcgtggcaagggatctctggataaaacacttggcgatctcgtgtacctgatatcaactttgttgaagtagaggtagtggaaggattgctacgccgctagtcgaggaccaggtagtagtcgtaactcgacaacttaaagtggaaatagtgggagaaacgctacatcgctggttgaggaccaggcagtagtcgtaactcgatcacttaaagtggaagtagtgggagagacgctacatcgctggtcgaggaccaggcagtagtcgtaactcgaccacttgaagtgaaaatagtgggagaaacgctacatcgctggtcgaggaccaggcagtagtcgtaactcgaccactagaagcaaatgtacgagagatcactacgatcaactggttgagaaccagtgagaaggtgtctctcgatcatttggagtcgtggcacgaggactgctacgctaccggtcgaagaccagtcgtagctgttcctcaaccatctgaagtcatggtgcgaggaccgctacgccgccgtagtcatacctcgaccatctgaagttaaggcgcgagagattgctatgtaccggttcgagaaccagcgagcgagtagaattatctctcgaacaccaatggaagttgcggtgcgagagattgctacgtcctggtgcgagaaccagcgagcgagtagaattatctctcgagcgccaatggaagttgtagtgtgagagattgctacgtcctggtgcgagaaccagcgagcgagtagaattatctctcaagcaccaatggaagtgctagagttggtttattacatgtgcgtctcatgtggccagcatgactcacacacccaactcgtagcatatccggatgtccattcgcaatcatgtcgggtgatcaagccgacggcgtttacgaggaattatccgttaacaaccttttctcgagtagtccagcgatggccggtgctatgagataggtcgtcggtcttcgttggcaggttgggtgcgataactccgcatttgtcgagaatgttctcgataatggagtgtacttgaccataacctacccgagtacttaattgtttctgaaaaatattttctagaaggcaagatatatagcagataatgtcgagtatatactcaaaaaactgcatggatcttctagtattatcaggacataactgcagatgtaattatcaggcattatgtaaaccgtaaacaagcataatttatacagaagagaacggagcgagcccccagcgttagaccgtagttggcctgacatcggaagcactcgcacaatagatattgtataaaaaacatgctctaggtaaacataataaattattgatctgacaatgctgtatgatctgaataggtacgataaattgcatataaaatattacgtacctttgtagatacatgccggatgtatctacgaaattagtagatcaatttgaaaaaccaatctaccaattaccttattgcgtactcgttcgacatcatatgatctgacatcttctggtacgccgcgtatcttaaggcttgggtgatctcgatagaccaagttgtcgatgacaatggtggttccgatctcgtcggaagacatgctccggtcaggttagatctccacagccgaagtcatcgagtagcttgttgtcggagaatccatctcttaaaccaatctcgtcgaaatcctagagcaccaaagtcccctacctggcgcgccactgtcgacgtttgatgtcgcaattctggtatttgcatagtatggggatcgtcggtgctaggatatacgcgagactgaggtaaaagagatggagacgaggatttttatacaggttcgggcccctgaattgttaggtaataaccctacatcctgttggccggagccggtattgctcttattcaccataatcacaccagtacaatatgtggggtagcctatctagctgttgtcgacatggcggtctgaaggtctgactcgtagtcgacaacaaggtagcctttctcctcaagctcgcgcccgacgaaatcagagatagcgctagatccctacggccggcttctgtaggtaccagatagggccgatccaggcatatctctgatgtcgatatccggcggcttgtcttggcgtatgtaggcttgtatgttgtggcttctggtgggtgtatgttgattgtgttggttctccctctggtccttctagagggtcttgtatttatacccataggtgtccccttgtccaagtagaactaggaaaaccaatatggatacaatccgaatagtccttgtcgtttccatgtagaactctggttgtctttccttatcggaactcctcctatatccgcaggttgtttccgtataggacatgtatgtggtgggtcctgccgagatttagtcaactactattaggtatgtggtatccataaccatgacactttcctatccgacaaagctgttgaaagttgccgtagctttacctttaaaaaaaaggttgtcatgtataggtgagatcagcagtgaacacatgactaaattttagtgggtgctatgtttggaactccaagttctaaactccattgcttcgttttccgcacgcacgcttttcaaacggttaaacagttcgtttttttaaaaaaggtttctgtacaaaagttgcttaaaaaaatcgtattaatctatttttttaaaagaatagcaaatacttaattaatcacatactaatgaaccgctccgttttccgtatgtactgtttaggatgagaactggcatatgcgaacacaaccataggcaaaatacatgccaagctgattaaatataaaacaaatctaaaattcatacataaatagattatgtgtcatacataaaatttgtacataaataatggcctgatacttatttatctttttcttccctctagcaatttttttatctaatagaattggatagtacatatagtgggtttggccaacagtaggagggactcaagctagcccaccttgcccccctttgggatcgtcattgggtgagatctctctctatgtctccttaggatctgtttgagttaagagaaaaagataatattgagaagatacgtaaaacgagataagtcattagtgcatgattaattgattattatttttaaacttaaaaaataaattaccatgaatttttaaagcaatttttctatagaaaattagaatatctccatgagcctctctaaattttgctctccatttgctcatttagctaactaggcaaaaaaaacgttgctctccatattttttatctactcttttcttaagaacattttctacatactcctacatcctctctatttaccctctccattttgacaatgaaagccacacgtcaatctctctctccttccgatccccttctctgcacaacccgtcccttccccagtccccacccaccaccacgagaggccaacgttggccactcgcgctagcagggtggctacaccggaggaggaggcgattgatagcggtgatggaggcgagacggacagcactgccacctcgtccacggtggcgtactgtgcggcgaagagaagggaggaagaggcggcaacgtggtggaagacggatgcaacggtactcatgcgggcaatttatttatttatttaaaaattcatatattaaccaaatattaagacagagttcagggggatgtgatccccggtacatcaccatagctgatagaacttacagagcacaccatcctttcggaggccaactgaactaagaaaactagcatccaaataaaactaaacagcaatagaggatgatgtcgcgtacatagcataactgactgactactgccttcatcctatgaagttttaacggaaattaagactgaggtgaaaattaaataatagaagtttatgattgattaagacgagaggtaggtgaagaagttgattttagacattaaaatatgctatatgtgggagggaactacatcttttatagttgaacattttttttatgcgcgagggcaaaagaaaaaagagttacaacctcttggagaaagaaaaaaaaatgttagtttggtagacaaaaatgtcctattctaatctttattttgagctgaaacgaaaacagtcttaaaccctcttacgaaggcatctacgacgtgttcaaattggagccattttaaatcatacatttttcaaaaaaaatgacagatatatggatatatttagtttgttatcaaacataggtaatgcatatagaattttaacaacaatacatttagcctatctgatagacttggtaatgttagcaatttaccgaaattttggtattgctaaatttagtcattttgaaaatgtttatttcaacactaataacctagcatcaaccatccatccacccaccaggccacaggccagcacatacatgatacatcacggtaatagcatgtacaatagcatgtacaatagcagactataagctagctataaacacatatcgagaagataaataagaagagataagagcagcagactatatatttgtagccagttgcagcacagactataagacgcaatgtgtgtataataggtgggaccatatattacttgtgtaatatatgtttatatgtaaaagtatgattagattattaaattgattatagataatttagagctaatactgattggctatactattagagcaagttcaatagtatagccaactactagctccaattatctatagtcaatctaatagcttattcatacaatatttacatactacactattaatacctggtcccatctatcatacgcacacggcgtcttggagtccgtgctgcagctagctacaaatctgtagcctgctgcccttctctctcctcatttatctccttaaaatatgtttgcagctgacttatagtctactattcctcctcttaaacttgctctaacgccagagaataattttcgcgtcagccagccagccaaccaaccgtcgaccgcaagcccaggcacgtatacaccggtccacgtagtacgacgagcccacgagcgcgcgtgcaacgcacgcaaacgtaaccgcgcgtccgcgacccgtcgtttccccacccgacctgcgcccggctgcctctgctgcatctatggatcggggacgcgtacgagcgcgtgcgcgtgcggcgtgcggtgcgatgcgggccgcgcgcggctgatcaccccggggtgccagtttgtccggacgcctcgtccgatcgccaccaaacggccaaacagctagtagtagagcgggcgcgccgcgcgttttcatacgtttgcctttggagttttttgcagcctcgcttgtccggagtcgtcgagcgggcgcgccgcgcgcgcgggcgcatgcgtgcgtgcccggtgggggtggagcacatcgccttcccaactaattaatcagagcaaaactaataatacaaccgatctaataatacaaccgatctgttaagtataagattttttttagccttctctcagcatgtttatataatagttagctctttataattaatacatgacccacttatctctctcaaagagtttattggttcttatgtgttcaaaccagctataagtttatagcccacttctcctctctctctcctctatcctctcctccacctcagcatttagtcggcttatagcatactattatacttgctctcaagtgcgcctccgcgaccgacgaccgggttcgcacttcgatcgcgcagttggtttggttggaaggtgtagtacgtggaacgagagatttttttttcaagtacagctgtggataatttgctaaactttttcagcggggcctaattcttttcaggttttaagggctactggactttcgtgggcacgtcttgtaagacgctaaaattttccatatacgggtatatatacgttcgaataattgtatcaccttgatgcaattgacttagtttaataaaagcttccattatctaaaaaaaatgtcgttacgtgctagatagactagaagggatattggatcagatggttatgcaagcggagtggacgtttcagggcatccgcaatatactctaaaaatggtccataagcaatataatatttgattcagctacttagcaatattgtggaactagtccataggaaagaaataacaaaagctacccataagcatatgggctacccatagagaataaaatatattatttgtctctatctcttctctcctactaatactactccgtatttgctatccatatatattgtgaaggttataatagttagggcctgttcactttgataccatttcaattttgttaaagttacaaaaaaaagtggctacatttagtttgctgccaaattttggtaactatataagaaatcctgccaaaatttggcaagttgccaaaatttggtaatgttttttttttttgcaacaaagtgaacaggcccttaaagctcatatatgtggtttccatctctatggattacttttgccatatacattattgttacccttatagtattagataaaatgtatatctttttttaaaagaatcaaataaataattatttttaaatctgataagcccatacctcactgtaaaatggacctaaccgtaggcacatacggagtacggtttaacgtgatatcatattaatatattaacacgattaaattcaaatttaaactgtcgtgcgcaacaattttagaattatagagagcctcagtttttttttgtgtgtagtgtttgcttgtattgttgactgtgttttgctagagttaggctgtttcaggtaataaaaagaacttttgaatttgaatatactaaggctatgtttttcggtgcatgtccgactctacttccttatttttttaagcacgctttttaaactactaaacggtatgtgcacaacattatatagaaaatttgttttaaaaaattatactaaactattttctaaaaaataattaatacataattaattatgtgctaatgaattactccgtttagaattatttctcttccgtctgagagcaaaaacagcttggaaagctatctatcccctctcttcctccacttgttttctggattcacgtactggttggctgtgttcggatgcctcttttcccaacctctctcccttgttttctacgcacatatttttcccaacccctctcccttgttttccacgcacatgtttttcaaactgctaaacggtgtattttttacaaaaagtttctatacagaagttgtttaaaaaaaattaaattaatctatttttttaaaaaataacaaatacttaattaatcacgcgctaatggatcgctccgttttccgtgatcaccgttccggatgggaacttgttatagcaaccacagcctaatataaaatagtgagataccaattgaaaggaggagacggatttttccctttcgggcggtgaaaatcctgttagtgctcttgcttgactctctcgaaacaatccctttttaagcgcacgcttaaatgtgcatgtgttctttacaacactttctttacttctaatatttattttctatatgttttcttaaacaaaaattttagaggaagttacttttagaaaatcatattaatttatatttcaagttttatctatcaattaattaatcgtgcactaatcttatatagtgaaagcagcaagctttcttgcacgaggatgtgccacattatcaaaaatatattagccgtcggataaaaagttcggataaataatggtcattagatcaaaaaagtgcatgtattaagaaaagaatcaaatttccggaggtttctggtatatcctctaaacatatgatataaagagaaagtgaacaaagagaagaaagatggggcttttaatgattcctcttataaacatatactccctccgtttcacaatgtaaatcattctagcattttccacattcatattgatattaatgaatctagacatatatatctatttagattcattaacatcaacacactagtacagatccttctatctgtgacgggctctaatatgcttagaaataccgggccgtcacaaggaagtcatctcaatcgggccgaaaagtgcccaattgagatatggtcgcacagacatgttagatgggtataaaacttaagcccgtcacggatgacacctatcagtgacgggccacaactttaggcccgattgagataaaattctatatctcaaacgggcctgaccatcatctgtgacgtgcacctcatctgtgacgtgcaccaacttgaggcccgtttgagataacaactagacccgtcacagatgactcatcagtgacgggctatatacttaatctctatcgggcattaactaaagcctgtcaccgatgactatttttccatttttcatatgaaatgtttatatttgtaagttgactatagcaaaataattttacgggtagaaatgatttcaaatggaaaaaatgtcaacaacaaagttgtataacttatcaatatttacaacttttagtttggtcatttttcaatataacattttttttgaacagtttgaatttgaatttaaaaatatgaaaacttcaaataacattttcaaatactaaatgatttcaattgaaaaagtcatcaacaacaaagttgaataactcatcaagatctaaaacttttatttttgttatttcttcatctgacgaaatgttagtaatattattcacaaattttacatatatgtgttatagtttataaaaaaccagataagagatatgtcaattttgtgaacaatgttactatcactttgtcgtatgaagaaatgaccaaaataaaagttttagatcttgatgagttattcaactttgttgttgatgactttttcagttgatatcatttagtatttgaaaatgttgtttgaagttgtcatattttcaaatttaaattcaaacggttcaaaaaatgttatatagaaaaatgaccaaaataaaagttatagattttgatgagttatacaactttgttgttgatgactttttcagttgaagtcgttcactgatctaaaattctatttgaactttttaaactttgaatttcaaatttcaaattgtttaaatagagtcagatggagaaatgaccaaaataaaaattttgcacctcgatgagttctacaactttggttttggtgacttttctatttgaaatcatttagtaacccaaatttgacatcctggcttagggcataataagattaatagaatactcataccaacatgttacaattacttttccggaagccaatctctaaagaactttccgcgtgggtgcacacgagtgagggctagccaaaaaataaaatttatttatttttggaatatactcatctgtgacgggaattaactctagcataagttaatgcccgtcacagatgactcatctatgacgggctataattaatgcccgtcacagatgactcatctgtgacgggctatagttaatgcccgtcacagataagagtcatctgtggcgggcgctagttgtgacccgattaagataggtcatctgtgacgggctatagtttgactggttgtctgggtcaaagctatcggtgacgggctttacttagggcccgattgagatagaatcatccgtgacggccgtttgcccgattgagatagctctttacatcagtgacttctagcctgtgacggacgccatgcccgattgagatgagagtatccgttctagtgacatgaacgtgggaattgctagaataacttatattctgaaacggagtaagtagtactacttggactagaacaatatatacttcgtaaacaaattaacttatatcaaaaccttcttaaaagttaaggtaaactaataaggcatatacaaaagttcttaaatagaattaacagtcgcgcatcgcgcgactatgtggctagtatatgttgttttgtttaagttgtgagaatatcccttaaaaaagcactgcgtaagaaaacaacactcattcgtcactagcttcaccaacactaaagataaacattctcgctgttcagtaatgatgacggtaataccgatggattaggatagatagcaaaagatctcgatcgtccaaatccgaatggagagtgccgtacaagctagcaatacagacaaaattaatagttagtactaattcgtatccagttaaaattctcctccttttttgggtttgacaaggccgcgggcaggcccagatagaatgtgacgtaagcatgactacctatacatttatcgataaattttctattaaaaatttatcaaatgtaaatacaatataattatactgtgattacactgtaactacagaataattacactgtaacttacgtgtaattacactgtaactatagtataactacactgtaactataataattacactgtaatttagtataactatactataactataatataatataaaacttgcatgtaagtgagatgtaactttagaaaacttatgtttggcactgcccacgtgaaagagggattacggactcgcaatgtctgtttgtacaatgcgtgcggaggccatcatccatgcatatgcatgttcggctataccctgctgctttatctctgcccttcgtctgtcatctacgcgggcatgagccacgcctgaggtcggcggccggcggacgtcgaaagaaacaaattaaagcgtcgacacaaaagcacgaatcccaaggttcatcaagcggttcaaaaatcgataaattccaaggaagaaatttgtcagcagatttatagcaaaaccgttatataaattgtggtctaatccaaaggttaattatataagcaattcctcaatacaaaatgtcattaaaatagtggtatatatgaaattgtataaattcttcatgaaaaaatgcgccgccaacagctagcccctcatccacgactccacctcagctcctcgctgccctcgcccccatgctactgccctagctagatgcgccgatgacagcaccggatcaagtcatggggataccggatccagcctcagcggttttggttctatccattgatgcaagcccttccagtccgttctaaaatataaaatacaattatacttttcaccgttctaaaatatataaggatttttagtgtttcctaaaatatatatggaggttttgtgtatttctgaaaaaaatgcatcggaacgtcgagaaaaattttggaaatcacgtaataatccttatattttgtacaagaggccaagagggagtagtttctagagatagaaggaattaccagagttgtccatccaaacaaatttagtttcaaataaacgacaatcatatttcggctagttttagtgttatgatgagaaaatttctgatcacgcacagcattcatcttgactttgaaaaataaaatactttttttttgtttttttgggggcaaatacatttttttttgttgaagagagtataaaagcatatattccttgtgaactttcgatcaatacacatattgttgcttcgctcaaggttgatcgatttatccattaattttaatattggtcgctgtcgaccagctagctaagcgtatacgttcaacaataccagatcactctgctagtacttgatttctctctctagataatctctaaataatgagtcatttggctggtttgttcatatattccattgtattgattgaacaaactaaccagaacattttatactatggtatgcatgtgtggtgtgtcctaccgtgtttctttaataatcgggtttagcacgtccgagatcacaggctcacaactactggacgaaaagaagttttaaaaaaacaaactcttcgtgcacccttgatgttagacttgccaacaagacatggaatatgtgtacacgtattatatattttttattactgttatgtggtctagaatatatgttatgtgttctagaacaaataatattaatatatacatttggatggcccaaaattatttggggtctatcatcactccatgctccgtatgtaaaagtggcaattttttttctctgttttgtattatctcggaacttggtatagcactctgtatttagattgatcagtttgcgcaaaactatttgaagttcaatttttctgctggtccagggtttgaagatctaagaatgggcatggcaaatatatataaagtaggtaggatgtagaaaaaaacagagaatcaattaagggaagcaccaggtttatggtatatcgagtgaaatcatcacatcttaggtgcccacatatatttacatgagtgaaatatatataaggtctctaaatttgtgtaggtatgtcatctagattactggatctttgtgtgatccgaggaaccacatgagcgaggacctacacgtttttaacagaaagttggggggttttgatgcaacattctgattgcatggcgtcgctagtccgtgactttctcagcatgcgtacgtacggtgtttagagaggtaatgttagagattttgtcgctgacctcatcgagcattcacaattgcgggttgcgggtttgaggggtgtgaacgcggacattttttttccatgtgggtctcgtatatgtaacttaaaaaaaaataagcgagagaacaagtaaaaatatcaaaaaataaaactaattaatgccgctcggtcctatttaacacaacactaaattctatatccatattgaatttaaagtttgtatgctaaaatataatggtttaaaattttatatttcatttaaaatagaaaccaaataactcattctaacgctatcaacatatataacataacagtaaactcagattggtaggtttgtgaaggtatatcaatacccaaccttaaaaatcttatatatgtggttatgccaagtaacatcccaatgatcccatatatcggggaggtcgaagctagggagggaggccgaggagcggcgatttgtagtggcttaattaggctgtgttcgggttgtgaggtgggaactaatccatcgtttatataaaacgaagtaacccattaatgcataattaattaagtattagttactttttttaaaaaatagatgaaaataattttttaaagtaactttcatatatatatatatatatatatatatatatatatatatatatatatatattaaaaaacataccgtttagcagtttgaaacacgtgggctagaaatgggttggaaaagttggctgccgaacaccgccaagctcttttgtggcgcggtgctctcgcgtcgcttgccctgtagttcatcctctggccgtgtggccagattgatcgatccggcgaaacaaaatactgagcatgtaccacttcagtgcctctagtggtagcagtagaaaagaaccgagatcgtgtcccatgtggccgtattggtggcaggcagccacacaggctgcatccatgcagatgaggatggagctctatagctagctcagctagcgtgtggtgatcccgattcgatcggaaatgttaattttatctcctcggtcataaactaatactcctaatgatgcttacagagactaattaatcaagtgattagaagcgttgagttactcctaattaaaagtcctaggttaccactacatgacagtggaccacagcatatgttctactccctccgtcccataatataagaaattttgagtttttcatgctgattgaccactcatcttattcaaaaaaatttggaattattatttattttttttgacttactttattacccaaaatactttaagcacaacttttcgttttttatatttgcataaattttttgaataagatgagtggtcaaacaatgcaaataaaaactcaaaatcccttatattatgggacggagggagtacttaattaattaccttagtcatactcccttcgtttaaccacttttaaatttgaatctgaacatagttgagaaattgtttgtagcactcgggtggacgaccacttatttcttacatgttgactaaattgttatgtaaaaatttcacaaaaattgacaagatagagtattatattatatatcactccatagacatgtaagtcaaatttaaattctacaagttttaacaaaaataataaatttaactgtgaatatgcgtatactagttagagtttaatttattgttttttacaacttgtagaaaatcaaatttgaatttgcatgtttacggagtaatatattacatattaattatcttgttaatttattttaatttttataaccatttattcgacgtgtaagaaacgagtggacgtccacctgaaagattggaatctatcaacgaacatatttacgtccgcttcaaatccagaagtgggtcttttttgggtgaagggagtacagatcggagaacagtaaaaaaaatataggggtagttcacgaaagagggagagctgtaaacaaattaaagaataatctagctgttcgatcccactgtactcctgttatttgcaactgctctcgacgggatgagaacgaaatcgaccgaccggccgaccgggcggccgttgcgttggacggaatccgatgcgaggcgaatcatcatcacccgtccttgcttgtctcctcatctacttctccactcccatccagctcaccgtgcgtggagaagccatatcatgcagattctaactacacttgcttccataatcacgtctttctttctaatatcatgtagaaatggcgcatttctttctaatattttttcttagcatgtttttctttttgctttttttactgacgacgaaaaccatattttctccctttttgcttttttttttctcgtgtgtttttgcctattttttctgacaattattttctcgcgcgtttttttcttgtattttcgaatgttcttttttgctttttttcaatacaggagaatatatgacgaaataaaagccgtgtagcagatggcaaaaaattgatgaattctatccgactcaagcgtctatcaatttagcgtttttctgatagttttttcagagcgatttgttttttaatacacggtacttttttcttgcgaggttttctcaaaccattttttttagaaatggcacgtttttttgtagttttttcctcgcatgtttttttttaaaaaattaccgacgatggaaataacttttctcgcacgtttttttatggaagatggaaaacctttttagagtgtttttttgcgcttttttttgacttttttctcatgcgtttttttgaaccgtttttattttctcatgcattttctctttttaaatagttagattagattagagatagagaagagatatataccgattagaaatcagactttgtttcacccattctatttttttctcgcatgcattttttaattcatacgaagcagatttttattttttacgaaccatttttttccactttcttaggaaatcggatgaaattttttagatgttttttttcagattttttttgcctttattggaatcagactttttttttcgtttttaaaggaattggatctagctttttttcaccaccttttgtttgccttttataggaataggattttttttttgttcggatctatgtttttttggccacataggggaaacagacttttgttgttgttgttgtttttcttttttcctttattttttttgcggcttttctttttctttttatgcacctttctgtctttgttatctcccttttattattattattttttaaaaaagacctcaaataccttgttgcaagattatacggacttaaatgtaaatataaaaattatagggattcaaatgcaaaagtacacacccaaaaattaaaatcatataaaaatagaatgctctcgatatgtaggttccttttttgcaaacatatccccaatcaggcacatcaatttttttcatcaagatgtatgggatatcatggcatagattaaaaatgaggggagtggtgcctgggatctcggactcaagcctagaggagaggtgccttttatttttcgtttttaaggggaatcggatctagagttggatttttttcgtcagagatagagaatcggacatattttttttttatttttttcgtccttctttttacccggagtcggacagatccaatttttttgtccggattttttttctgtaatggacagatccgattttttcctttaatgaacagatccgacttttttcctttttcgcctttttttttatcagacgggtttaggttttttttttcacccggttttttctggattggatagatttggttttttcgcccggtttttcgttttttcgcccttttttatcggacaagtttgttttttttcctttttttcgtccagttttttttacggacagatttggttttttggtctggtttttttttacgaacgatggaagcacctcttatttttttttaagtagtagagatagagaattgttgagttcattttgattgtgtttttttaccatactccatttttcagaattattttctaccagtggtggagtcagaaaattttttaagccctgataaacttcaatataactagctataaaaattccatcattaattaaccctttattattaaagtttagtggactttttgccagcgagcccaggcggctgcccggctagccaggcggtggatccgccactgttttctaagttgctaagaagtaagaatacataaaaaaaaaactcccaaattactttttaccgttaatgtgttatgttggcttacaactgctggcatggactgatgtcggcaggcagatggacatagctaatcacaattgacaaagataaaggtagtttaattctcttgtgagttgtgaaacgtgaagctagcgaaggatcctgacagggatgttctcctgtggccctgtgggtagcagccgatcagtggagttagagaggttttggtacattttgatgtatatgtttttccatagattttgccattgccttttgcaaagtgttgggctaatttagcatcacacggtcctgcgagagtcagcctgtccgattagatcaggtcgttttcgtgtggttcggtgtgtgtcctactagcttttctgattgatgctagctttgttgtcacctgtacttgaacacagctatatagctctcacttttccttaacgaaatcaaggcatcgttttaatggacgtgggccttaattcagcctatatgtacatgtttatgggccagaattttcgtactataaacttttatgcaaacaaaggagtaaattgcactcacggtgcatcaacttggtaggtgggtgtaatttggtgcaagaacttgagatataagtgttctagtgcaacaacttggcaggtaggtgcaatttagtataaggcctttataagtgatcatataaatgcaacaacttaaaggtaggtacgattttgatacaaagttatgcggacttaattatttggagctagattcaatttttaagtacttattttgacactatactagcatgtatttgtataagaatatttatatttttatcctaataactaataattgaaagtcaattaaattggatgtagaaattattatatttcggttgatatttgagaaggtgaagaaaacaaaaaattcttaaaaggtaattagatgcaaattgtatgtgcagtataattcttaaagattaaatttactatgtaatggcatattgacatcgtgaaaaaaattcacccactatacaagttgatgcaccaaaatactaaattgcgaagttcttgtagtaaaacacacttacttgtcaagttgttgcattcggacgttcaatttttaagttcttactctatatcgcacccacctgttaagttgttataccatgggtgcaatttactccaaacaaaagtgtcagggttatggataccacatacctaatagtagtcgactaaatctcggcatgacccaccacataccatattctatacggaaacaacctgtggatataggaggagttccggataaggaaagacaaccagagttctacatggaaacgacatggactactcggattgtatccatattggtttccctagttctacttgaacaagggacacctatgggtataaatacaagactccctaggaggagaggagagagaacatagacacacccaccacaatctacggaacaatatatcaagacacaagatcaatgtacaagccaacatacgccaagacaagacgccggatatcgacttcagagataggcacggctagtcccctacggtatctccggatactgataggagagacattgtgctgtctctgatctcgccgggcacgaactcgaggaggaagactaccctgttgttgactacgagtcagatcttcagaccgccatgtcgacaacagttagatagtctaccccaaatattgtacttgtgtgatccagatgaataagagcaataccggctttggccaacaggatgtagggttattacctgacaattcaggggcccgaacctgtataaaaatcctcgtctccatctcttttacctcagtctcgcgtatatcctagtaccaacgatccccatactatgcaaataccggaatcgcgacatcaaacgtcgacagtggcacgccaggtaggggcattttggtgcttcaggatttcgacgagatgggttcaagagatggattctccaacaaaaagctactcgacgacttcggctatggggagatccaacctgtccaagtacatcttccgactagatcggaaccatcatcgtcatcgacaacttggtctatcgagatcatccaagcctcaagatacgcggcgtaccaaaggatgtcagatcatatgatgtcgaacgagtacgcaataggtaattggtagattggttttccaaattgatctactaatttcgtagatacatccggcatgtagctacaaaggtatgcaatattttatatgcaatttatcgtatctattcagatcatacaacattgtcaaatcaataatttattatgtttacccagagcatgtgttttaacaatatctgttgcatgggtgtccccgatgttaaatcgactacgatctaacgctgggggctcgctctgtcttgttctgtataaatcatgcttgtttacagtctacataatgtctgacattttctgctcgttatatcctgataatgctagaagatccatgcagttttttgagcacatactcgatattctatgctatatgcttgccttctagaaaatatttttcaggaacaattgagcactcgagtaggttgtggtcaagtacattgcattatcgagaacggtctcgacaaatgcagagtcgtcgcgcccaacctaccaacgaagaccgacgacctatctcatagcaccggccatggctggactactcgagaaaaggtcgttaacggacaattctcgcgaacgtcgtcggcttgatctcccgacatgattgcgaacggacatccggatatgctataagttgggtgcgtgagtcatgttggccacatgagacgcacatgtaataaaccaactctagcacccccattggtgttcgagagataattctaaacgttcattcgctggtcctcgaaccagtacgtagccatctctcacaccgcaacttccattggtgttcgaagagctcgctggttctcgaaccagtacgtagcaatctctcacaccgcaacttccattggtgttcgaagagatgtttctactcgctcgctggttctcgaaccagtacgtagcaatctgccgcaccgcaaactccattggtgttcgagagatgattctactcactcgctggttctcgaaccagtacgtagcaatctcccgcaccgcaacctccattggtgatcgagagatgattctactcgctcgctggttctcgaaccagtacgtagcaatctcccccaccacaacttccattggtgatcgagagatgattctactcgcttgctggttctcgaaccagtacgtagcaatctcccgcaccgcaacctccattggtgttcgagagattattctactcgctcgctggttctcgaaccagaacgtagcaatctctcgcaccgcaacctcagatggtcgaggtacgactacagcaataacgcagctgtcctcgcaccatgacttcaaatgatcgagagacacctactcactagtcctcaaccagtcaattgtagcgatctctcgtacatttacttctagtgtttaagttacgactactacctggttcttgatcagaggtgtagcgattctcccattacctctacctcaacaaagttgatgtcaggtacacaatatcgccaagtgttttacccagagatcccttaccacaaaagacacctagcgttgaaacctatcctaatgtccctttacgccgtcttgacaaagcctctgaggaacctaagggaacttcggctggggacgcccagagcggataaggctttgtcagatccttcagagacgaaagaccatgtaagatctggtcatgtaagagatctcgccgtgcgtattaaccaagtcgtgtaaccggaaatggattttccaacttcacagctgggggctaggatcagtgcttattcaactaaagcaagtcaaaggtccaagagccttatcctccgagaacgattctccgacgacaaggttgggggatagggagagtgtataactcaacaaactgactgatcgaagtcggtaaaagagtagatgctcatatacaaaacattggtctgtaagtttaattcattttcggttttccatacatattataacatgtcaccctttgagcattcgctcgggggctatttttatctaatattcttttttgagtactgattttaggaaaattctattcgacattatcgaaggctccatgtctctatggttctacaccaagatcgactaagacgagtacgataaatgtcgacaaggctccgtcgcagactctacgccagctcgattactcgagaacggttggtggatctcgacaaggaatacggaatgaaaagatggtgtacccgccgagataaaatttcttgacttcaatccaaattcttgattacagcaagacgggagacttagtcgtatgctctgtactttcttggttgacatcggagattgactcagacaaaccctttaggtgtccgcacgaggctgataaaggaagtctaacgttatctctgaattcaccgagaatggtcatatgagcacaataacagttactccaaggtctgtgcgcggttgagaatatgaattcgttcatttgcatcgaagtcgggggctactgtcagggttatggataccacatacctaatagtagtcgactaaatctcggcaggacccaccacataccatgtcctatatggaaacaacctgcggatataggaggagttccggataaggaaatacaaccagagttctacatggaaacgacaaggactactcggattgtatccatattggtttccctagttctacttggacaaagggacacctatgggtataaatacaagactccctaggaggagaggagagagaacatagacacacccaccacaatctacggaacaatagatcaagacacatgatcaacatacaagccaacatacgccaagacaagacgccggatatcgacttcagagataggcacggctagtcccctacgatatctccggatactgataggagagacatcgcgctgtctctgatctcgccaggcacgaactcgaggaggaagactaccctggtatcgactacgagtcagatcttcagaccgccatgtcgacaacagttagataggctaccccaaatattgtacttgtgtgatccagatgaataagagtaataccggcttcggccaacaggatgtagggttattacctgacaattcaggggcccgaacctgtataaaaatcctcatctccatctcttttacctcagtctcgtgtatatcctagtaccaatgatccccatactatgcaaataccggaatcgcgacatcaaacgtcaacaaaaaggcatagaagaatacgcttatttttgtgcaaggaaaatatgcatgttagagcaagctagaaccacatatcaagaatattaaagaagagagaaaaaaacgaactgtagatttgttgccagtggcaatacagacttgaagacgttgtgtgtatatgagaggtgtgaccgggtattaatagattagtatatttttattcgtaactattatataaataggttattagattagttatactccctctgtttcacaatgtaagtcattcgagcatttctcatatttatattgatattaatgaatctagacatatatatctagattcattaacatcaatatgaatgtggaaaatgttagaatgacttacactgtgaaacggaggaagtagatgatttatagatatcatttggctatactattaaacttgctcttacctttaatcttgatttttggccggaacagcacagggacgcttatcgattttattagatttaggaggaataacttaatctcgtctcaaagcaaaatatttgttttatcccataggtaaatatcaaaaggaaatatgggtctaggatttgacatgctacttattagtattacgacatgactatgccccattattttatcacgcaaatatagggttctcaatggctgtatttagttcaccaaaattaaaagtttggttgaaattgaaacgatgtgacgaaaaagttagaagtttgtgtgtgtaggaaatttttgacgtgatgaaaatgttggaagtttgtttaaaaactttggaactaaacacggcaaatatatcctaagtgaaatatactaaagtgtagaacaggaagacaacatgatccatgattgtgtagaccacgaaatactcccccatctcacaataagatcaatttttactaagtcagtttgtccaaaaagaaaattatttttaaacaattattgaatcggagttaatgaaattggaaagtaaatgcattagaagcgtgttcagtgaaaaataattacattaggatttgataaagtggggtattgtagtcttattgattttgtattattttggagtaactaaaatttttaggacggcgaaggtagctagtatcactgaattaatgataattccagtgctcttccgtcctactcatattaagagctcatttgaatcaaaagatttatataggaatttcataggattcaaattctatagaaaatttttctatttggccctttgattcaaatgattgaagctttccaaatcctatgaaattcctatggaatgacatattacatatggtaaaagcttcaacctccaggcacggggttaaaataatagaaatgactataggacatggagaaagtggtgaaatgactgagtactgtggttacattaaagaaataatagaaatcagctttgatggcaccaaacctctcacacttgtgctcttcaattgccattggtttgacccaagccaagtctggtactcgccaagatatggccttgtcgaagttgctcatgcatcaatccttctcaagtttgagccatttgttatagctcatcaagcgacacaagtgtattacatgccatacccatgcaaatctgtgcaagatctcactaattggtgggttgtatataaggtgcagccaattggtagattagaagtacccactgatcaagattatgattttgtccccaacactgatgttgtccactatttccaagaagatggtctgctcggcagttttgtaattgatcttggtctgaactttgataataattctgaagaggttgcctccagtagggatactgaagatatttgcaatggcaaggacttggagcttctcaatggatcatctattcaagatgtcaacgacgatgatgacgagtcttattgtactgactcatccaatgaagatgatgaatatcccaccaatagggatatcttatttgatgaatatttctaaggtaaagacctcaatctgagttggaggccaatctgccaatttgttatatcctacatctgtaaatacatatttatttttatcaaattgcccacaatcgagctttcataaactaatgtgtactgtaatattatttgacagctaacttattttttcatacttacaggcatataatgatatggcaaaggactagagtttatttttaccatcaatccggttaagacaaccactagtgtctattgccttcctaggagaggtgtaagaacttagactgtagtttctatggcatcatgtgtacctagttgttggatgtattcatattgtgttcttctatcatgttccttttagcactgagaatctgcagctaattgtcgatttctaggatcgacaacatattttatagggtgcgctagatcaaagaaagaaatggtgacacaaatgttatactggttcaggccctcgacgtgaggtaataccctagttcagttgtatatggattggatctgtgtccggtatgaagagtggataatgacgcaaggtgcagccatcatccgggttgtcgagagtcatccctcgtctcgggaccccttcccctcttatataggatgaggggggagggttacaaggaaagtatctagttgattgcaactagatccctctattccatctataaaagatatgtaggatcctcgggatttatactttatcccgggtttgtctatttccttatttacaaggcagccatatgggcctatggcccttggcccaccgtatgtcgcagggcccgaatgcctctccttgggtacccgggtaccgtgtaacccacagaagccagctgggagagacaagactggctgagtacttgtagacccccgattttggaaattggaaatcttctgtgtttatccgtaccaatccctggatcagtagttggtacacacatacatagttggatcacaacatatcacgaatgaatttaggctaaaagagttaaatacttacattagggccaggtaggctaacaactatcagagaacaacagcaaaagacaaaataatataagggcctggttaacatgccacaggcagtcgaccggggaacgagacctagaacaagaccgcactccgatcatcttgtgggatacgcaagcgtaccgacaagggcttctcttcaacactctcctaaaagatatataaatagcaagggtgagtaccaaccgtactcagcaagccaccacaacaacaatgcatatgatagagggtattcaaggaatggtttcaggttcttttgcataaagctgcgttttgcaaatattttcacaagcctaagacctatcatagactgatcaaattttagttccagtgttcacattaaacaacgacggttctgtctaccatccattgtgatcccaaggatagcttcccgccattgagtcgtcatggttttttgaggacgtccacgttccctcctctcaggaaatggctccatcagcataaaaatcaccatgcaatatcccatcctacacaagttaagaatttagagtctagccaagtgtaatacatgtcccggtgctcattaaccgcgagcacggctattcgaatagatttggtttactcacactgcagtggatgtacactttacccgcactccgcgactgcccaacacatgagcctcgtcccaacacatgagacgcgtcacgacaaagcttttcgataacctcgcattggcagtacccgctccgtgaactttacatcctcatgcactctaggcgcacacggtttctagcagtgagaggagttctggcgcacccgggagggaaagacttacacatgcattaagttataattatgtttaaattctcacatgacagtcctaccaatggcgacaccactgtagacacccgcctcgcggttctacctatggctgccccaccgtagagcccctgcctcacacatcaagaaaccactatgcatggatactgcctccgctcagccatctactccgccaggtctatacccatacgagaagcgcggttgtacgggggtcgtttcatgcttaacttcatggctcggtccttaattgaccagggacggcactagccttttccggataccacccaaatcctctgtccgccccagtcgaaaatagttgttttagttttatttctcttttcacaaatcatgtcatcaatatcatggcaatgtggcgctcatgtctccacatgccgcatctcaattaccttcccaaaggtaattgcccaagcataaagcattttgataaatatgagtatgcatgattctagaatagcatttctaagcaattgtcatagttgactagggactcatacgtaaacatggttacgaaggaataaggggtaaacaataatcaaggcatggcataatcacaagtaggatgttcatcattgcatgcaattttatttgtatacaaaacaatttcgcaattgggatcaacatgttcaaggaatagtgatgacttgccttgctcaggatagtccttattcttgatataattcttgatcaaccttcacctcctggaagttgctgacgttgcctcacgactatccgatacacaaagtctataatacgcgagaaaaaccaatattcaagcaacaatcaaatatgcacaaacaaaatatatttgttgaggttgaacctaaggttgctcatattattcgcgcttgctaatgggttccaacatgctaagggctaaagtttcttaatctttctgttatcatggtggtctatttaggagctagccaatgtagtgtgaatgagatacgtatctggctaatttgtggtttagtctagctaatggctatggaaggattatggctacacatgcatctatctaaataaaatggtcgtatactagaggttctgttgtcggatggatttaggatcaatcaaataattacagtgaatcatttgtattatttattttattgatggaagctttactttaattatgaacatattttacttgtcacaataaattataaaaggttaataattatccatgctttgtatgttagagttgtttaggttaatcatattatggttacagattatcccatcacataattttacaatgaataatactaatttacagttgaactataattataattatatgaggtcaagatttataactagtatttatctaatatacatgtttgtcatacactccctcttaatttcatatatgcaacacgcaaattaatactataccgtaccactataatgggatgtatagtatatgtgtaagcaacaatatcttattattggatcatatatttgagtagtttctttttactgtaagctatacaatacatgttgattttaagatggctctatttggttaactaatggatatcaaccgactatatatatatatatatatatattctacttcacatgacatggtatcaactaattttttttaagtggtccaaatacaactagctctgtgattactctcctaaacaagttaaagattcatctatatgtgtttatagtttagttacaaaatatgaggctaaactttatgtaaataatttataagtcatggaattagttatatttggacataggctagtaaatggcactaatattttcctttacatccattaatttgaaggattgattataattaatttatttggttgctacagtgacaagatatattaaagataattatgctactgtacaatatccatttttttatttattggcacactatttaggttaactattatctaatcatttgatattaattaatttataattataaatatattttattgaatagtgaattatatattattggaaagcttatgaatttagatgaatttaggttcaagtttcactcaaatccgagttaaaatgaataagttatgctagtgtaaagattcaaatttgaattaatccgagaaattgcgaaaagctactgttcataaacgatttatttttaatccaagacatatccattgacaagtgggaccccgggtttatcctttttcctaccgaattattttctaaagggaaataggaagagctaatgacaagtggggcccacatgtcataaactcgagaccaaaaaaacttctataattagatttttaaccacccggacccacatgtaatagattcaactaataaagattaagaaggggtttactattcactaaacacgtggggcccactctaatctctcctctcctttctctctctcttttcttttcttttcctttttctctctcttttcttttcttttcttctcctttctctctctctcttttcttttcctttctctctctctcctttccggtttctctcctccttccctcttctttctctccctcggcttctcccttcctctctctttctcggctccctctctacccggcggcacggcgacaaatagggggggcagcggctcaccgacggcggcggtggcgacgacggcggcggcgacgacggcgcacggcgcggcacactgaggcggcggcgcggcggtcacgaatgcggcggcacgacagcacgagggcggcggcgcggcggctcgaaggcggcgacgcggcggcgcgtggagagggggaagagggagaggagggggaagatggagtgaggagaggggagaacggtggctcttataggggagagagggaataaggggaagagggaagagaagggagggggtgacgcgacggcggcgcggggctcggggcggcgcggggcttggcgcgcggtgagggcgacgggcgacgcgacgatgacggcggagcgtcgacgggacggcgacggggcgacgggacggcgcggcgcggcacggggctcggcgcgcggcgatggcgacagggcggcgcggggctcgagacgacggcgacacgacggacgcgacgcgtgggcgcaggacggcgtgacagcggcggcgcgcggcgcgaggcagtgacggctacggcgcgcggcgcggcagcggcacgcgacgggtaanggcggtgcggcggccaggcgnacagagagagggggaaagaggaggggctgggttaggggaccacgtcgaacacctggcggccgatgaatagtgtcttttcctatttaatccccattttagcctatttcttgtgtaaatttgattctataaatcctagattttgtataaatgaagtttacccaatatttgtgtcattccaaccaatggatttattctagattaatattattcatattttatttatataatttatttgaatttttaattagggttaattcttattattattatatatttttcaaagttttcctatttttcttcttttagggttttggttgatttataaattgagaaaagttgcaaattaaatttgtatttactcctaagcatttaggtgaccgtattaagtgttcaaatgtgaatttgcccaaaatttaatattgtccaatatttaaggtttattaaagattctataattttctaatgagaccgttattaacacaataccacattagctcaatttatttatatgttagtttattttatatggaggggtttaatatatcaaatttcaatccctaaatgcaattaggaacttggtgcaaaatcgatctacatatcgaattaaatactcccgtaattctattatatatatagagagctcagtttatttgaatgatcatcatttcatgtgtacacatattatggcacccacctacattattcaaatattttaatatttgataaaataggttaataataacttttcttttatttgattttaatatcttgtgcataattatttgtaggattaaatatattcccgtaaatcatatctattgcttaaatgtagttcttttctttactttcttggtgatcatttacggtttggcaagcaatagcaatcataacaaccagcatgatgcaaaagttttaaaaagttcgaaattttcgtgattttcattgtcttgaattttaaggatgttacagtactcatccccagcgttgccgagtgatacttgttgtagccgagtccttgtccaactgactagccaaataatcatcttgttgaagaagtgtcgtttctgacgtagaggcgaaaccagtcttctcggagatgaaagccttcaggcggcgacgaagtaaccgtcctgcgcggagacgacgtcgcccgacggcggtgtaggtagccggcgtggtggtgtaggccctcaggtggcgacgaagtagtcgtcctgcacggagacagcgtcacccgacagcgacgtaggtggccggcatggaggcgcaagccttcaggcggcgatgaagtagccatcttgcacagagaggacgtcacctggcagcggcgtaggtggccggcgtggaggtgcaagccaccgggaggcgatgatgtagccgtctagcacggggacgaggtcacccggcggcggcgaaggtggccggcgtggtggtgtaggcctctaggcggtgacgaagtagccgtctagcatggggacggcgtcacccgacagcggtgtaggtggccgtcgtggaggtgcgagcctccaggaggcgatgaagtagccgtcctgcacatagacgacgtcatccgacggcggcgtaggtggccggcgtggaggtgcaagccaccgggcggcgacgaagtagctgtccagcatggggacgacatcacccggtggcggtgaaggtagccagcatggtggtataggcctccaggcagtgacgaagtagctgccctgcgccaagatgacgtcacccggcggcggtgtaggtggccagcgtggaggtgcaagccaccgggcagtgacgtagtagccgtccagcacaggggtgacatcactgggcagcggcaaaggtggccggcgtggtggtgtaggcctccaggcggtggcaaagtagccttccagcacggggacggcgtcacccgacagcatcctaggtggctagcgtggaggtgcaagcctccaggcggcgatgaagtagccgtcctgcacatagacgacgtcatccggcggcggcatgggtggccggcgtggaggtgtaggcctccaggcggcgacgaactagccgtccagcacagggacgacatcacccggagaaggccataggtaaccggcgtggaggtgtaagcctcccggcgacgaagtggtggccaagtaaggctaccctccagggcacatctcccgagtacgcccacccagacctgggtctcatgcccgatcttcagcaaatgcaagtcagtagctatacctagtaggcccctgactccatgtcgcaatgactggggtcatcgcggagtggagttgtcttgacgaacttgaagcgaagccgggtagcatcctgactccgtaccggggtgactggggttgtcgcggggcagagttgacttgaagaactcaaagcgaagccgggtagcgtcccgactccatgccgggacgatgtaacgccccgattttcgttcgggattaaaaatcattaaatactacattttctagaaattaaataaaaattaaagcaatttaatcaagtgaattatcgagggaattaaaatttcctttaaaaatcatggtcggaaataatttgtaatattctctgtgccctaatgtactctctgaaatttcccgtgaattttcggagctcaagaaataattttaaaagcataaaattcatttaatcaattaaaataaaaagagaacaaaataaacttcccttcctccccttgggcccttttttcagcccaagccctcctttccctcctccctctctcggccggcctcccctctcctctcttgggccgtctactcattttccctctccttcagcccgccctcgtgaaaatctactttgccctcctcccggtctcccctctctctctagccgacatgtgggacccgaggccccacatgtcagctcctcctccttccttcagccaccccgcaagcaaccgccatggctgccaaatccacccacgtcgtcgctttcatcgcatggttccctctcccgtgcgtgcgtgggcgtggtcgccgcccatttccgcaccgtttcctctactctcctcgcaaaatcctgccatgccaccgcctccctcatctctctgtctccccccacatcgccggcagttgccgccctctaccgcctcgcccgaccacgatcccaatcccccgagcccataaaaacgatccccggagctccctctctcatttccgctcctctccctctccaacaacgcgccaccgccgctcccgccgtcgccgcatcctgccgctggcgccaccggcttcgccatgccgctccgcaccccagcacccactccacttctaccttccacccacgaaacaccatctccactgtgaatccccagtgccgctgccgttctgcacttcggtcggccaccaccgccgctcctagccacctcaagtcgcgccgtcactgccgtttgcttcacctcatcgaggagtgccttggccgcccttctgttttgccccaaccgctccggagtggttgcctcctcgcgaaaggtgagctccatcattccctcctcttctggccggcgattgacgccgcctccccctcctctaacccttcccccttgttccctaggttccgccggttctcggccacgcctccgccgcggttgggagtcaatggagcgtcgtccccgactccaacccgcaagcaccactgccgtctctcatcgttgagctccccgcgtcgcttccttgcctcgggcacttggtgagcacccctctctcatccccgccgccatcttgcgccgccggtggccgagcgccgccgtcgcgccatggctcagccgggccagctttgagccgcgcctgtgccctggccgcgccactctatggccgcccgatcggttttggccgatttgggccgtcggttcccgtggaccggcggtggaccacctcgtggttctggtccacggtggaccgctccccttgacccactgacgtgtgaggcccgcctgtctgcgccggcccctttgatgacgtcagcaacagccttttctttgagaaaatatttaataattgcatcataaatcgatgttaattctagaaaatcattcaaatggctcaatacttctaaaatttatatctaattcatacgaactccaaattgggccatttaacttgcaaaattcatctaaaattgagatctacatgtttgtttactttttatatactgtctacttggtttttattagagtttttcctcgttttgcgtgccagactgtagttttcgccgtttcggaacatcgcggttgcaaggataagagttcagaagattgttttgaagaagcaaggcaagtgacacattcctcttgagcatattgagcctactttataaatattttatcatttgcaaatgaaattgcatgtcttgttaattatgtgggatcagggtattacctatctgctcgcttgtgccatgtttacttgatatccttcctttgctaaatttgggtgataatttgactagttcgtgttacttatgtgacatagctagaactataggcttagccatgcttaattaccactagctcagttgatgggataattacattattatacatcttagtactcagatgagctgcgtgctcgagacatccgaccatgtttcattggtcgtaattatccaacaaaaatgcgacttaatggtgggctatgggtgcatggttttgctagtcgcacccatggcaattaaggaccggttcgcgggaaaccctggaagaattcatcacgcttaccacaagccagtgtgggcaacgactgggcttgtagtgtagcttttctctagctgacgtacccaggctagggtgggcgtgatggagttgggtcggtcggggtgttcggttgatcggctttcggatccactgtggcacgatgggggctgcccgttgcctactagggatgggggcgaaaccggaggtgtggtgcgattggttagagggggttatgcgaagggtccagtcacggcgtctttctggtatgtcgtggtggcatgtcggcgctcgaaaacgtgtcgtgggctgtgtcttgtgggtacagttgtacacctctgatcagagtaaaactattcgaatagccgtgcccgcggttatgggcggtcgaccagattcaccgtgattagtctcacccttaataaatcaactcaatgcacttagtttgagtgggatggttgggcctattcaacgtggtgtaccgttgatcaatggagatttaatgttaccttaattacttaactattttactgttttgctcaataaaatattttacaaccgcatttatacaaatagccacaagccatccttgtatccccttgcacgtctgcatcgttagtatggcttgatgagtacggttgttatactcagccttgctattgttcccctttttagaagtaatagcgcttctgagctgaagacgaagttagaagactaaggctcagaccccagttgagttttgcctgtggagtggagttgaagccccgctaggatcgccttttctgctgctgtcgttctctttcggtctgaggactaagtgcctcttctgtaagtattttatgctttatttacgtttggaactgtttattacttgtcgttttgtgtaccctagctgattcctagacagcgatttaatacacaaaatagtctaaaaatttgggctaaatttctgggtgtgacaaatgactgggttcatcgcggggcggagttgacttgacgaactcgaagcaaagccaggtagcctctcgactccatgccgggatgactggggtcgtcgcgggttggagttgacttgatgaactcgaagcgaagcccggtagcctcccaactccatgccgggatggctggggtcgtgctggggtcgagagtgagtgatgtaaggacctgtgccaggctcctagatgcgcacccagcacctgcggagccgggctctgaggcaggagatcacaagcctcctacgtggcaataccaaggaaacaaggaccgtgaagcccatgaacccgaggtcttcgctcaactcctagagggctctgaccagggtcgggtgatggcctaagggtagtgggcccccgggtgtggccgtacttcatgtgacgggggccgtcggacctgaagcctttgctcaacccctaggtggttaccggccacctgcggggccgatggtataaggaacacctagcttagccgggaggggcatggccagggcctggcggttgccgggagatttcgagccttcgggcgtggcagaatttcttgtggtcaggcccggcagcgtgtgatcttcacctcgtgccttgacggttgcggtccgctggttggcgagggagacgctcctgacccgataggaagggtgagtgaaggtgtgacctatggcactcggtttagcctctaggcttttggtgtttgcgcggcggtcgttcgtgctgtctgggtgagggcggagctcccatcgtgcggcatagcccccgggcgtagtagtcatgcccagggcggagtcgagccagccaggtgaaggtggagcccccagcgtagtagtcggtgaagctcctcgtggcagcgtcgtgccgaccaggtgaggatgtagcccctagcgtgcggcgaagcccccgggcgtagtaatcgtgcctagagcggattcatgccggcagggtgaaggtggagcccccagcgtgacgcgtagctctcgggcgtagtagtcggtgaagcccccggggcggagtcgtgctggccaagtgagggcgcaacccctgcgtgaggcgaagcccctgagcatagtaatcgtgcccagggcggagtcgtgccagtcgggtgaaggcggagcccccgggcatagttgtcatgcccagggtggagtcgtgccggccgggtgaaggcggagctctctgcgtgcggcgtagcccccgggcctagtagtcatgcccagggcggagttgtgccggatgggtgaaggcggagcccccgggtgtagtagtcgtgctcagggtagagttgtgatggccgggtgaaggcggagctcccaggcgtgcggcgtgcggtgtagagcccaggcgacgagagaggtgaagccccccgagcctgtagggaggttggtgaagcgtgccagctgggtgaaggacgaagcctcccagcgtgcggcgtagcgctcaggcggagaggtaggtgaagcccccgagcccatggaaaggtcggcaaagcgtgctagccgggtgagtgacgaagcccccggcgtgcggtgtagcgcccaggcggagaggtaggtgaagccctcgagcccgtggcgaggtcggcgaagtgtgctagccgggtgagtgacgaagcccccggcgtgtggcgtagcgcccaggcggagagggtggtgcccgtggcgaggtcggcgaagcgtgcttgccgggtgagtgacgaagatacccggcgtgcggcgtagtagatgacagagcctcctgtttgtattggtggagccgtggggcgtccaagtggtgccgatggagaataatacatcgttgatgtggtccgtcgatcgtgttttcttctgagttgtcttgcatacaagcttctatacggatgatgatgatgtcaggctgatgtggcctcgtctcattggttggccatgttgccatgcatgctcctgttgactgtacgtgcaaatttcaaaatatataatatttttctcgattttgtatatatatacatgtttctaaaaattttacgaaaatatacctttcccgctgataggtgatgcggcaccgtacctttggcgcacctcagaaacacgggaccggctgtaggggggcggtcccgcggcgccaatatgcgctgtggaagaatctaatatgttgtattattgtgttttcttatattttctgatatattacatctaccctctcatgaggtatatataggagtacataggggatagagacttggagtacaatacaagtaagagtagatttatctctaggattctatctctaggactctatcttatctctaggattctatctctagaatatatcttatctctataatttgtatttgactcttatctctaattaacatattatacttctaacattccccctcagtcgtaacgggagcgaagcaaacgattgcgactggatttgaaatcttctatttcttcatctctctgagtcatcatcatcgattgcatctctgatggtcggtcctccacctggtggctgcgtccccttctgtgtcgtcccttgactatcctctattccctcccgcagtcatagcgggagtgtcatggacgatagcgatgacacggacgctttgactggagttgtcgtagatgattcttgttgtagacgttcgtcgatgtagccaatcatgtggtagtcgtggtcatggtagtcatggtagttgatgtagccgcaaatagccgaaggcggaaaaaaaaattcacgccatggtgtgaagacaaaaactgcaattgttagcatcttgcatcttatagatgtcagaggatgagagaatgccattggggacgtcttgcatatgtcagaggacgtcgttggcgatgaggccaccacttcagttggtccttctgcgccgtgaagcggtcatcacaataatgatgccgagttgatgcagtcgttgtcgttgtagatgacgtgatcgatgccgtcatcggtgacgcggtcgttgccgtcgtagaggacgcggtcgatgtcgtcgatgaagcgtcttgcagattaatctgtcagaggacgcgaggtgtccatctatgtggacgagtcggcggcggcgcgcttgttcctatgttgatgaagaccatcggcgatgttgtgtcggagaagacaaatgtatggctgatgtagaggaggaagcagttgtggcttgcgtcgcggccgttcataggagcttggcgaagatgatcgatgcggattgcttggtgtcttgacgcttgattctcctgtcacctgtgcaccatgtgcttctctcaattgagtagatggatgcaacagtagatggctcgatgacgtttggtgttcccgtcgctcgggcttcacggcgacttggacggtggtgctgtacgccacggcctcgccttctgcttgatgatgctattgagcgacggcttgcgacgaaatcgtcgtcgtgttggctcctagagatcgtagggttcgatgtggcaaaaaaataaattgatctaattctaatattggtaaaatctaatctatggataatttgtggagctaatagatgcggcgccccagggagattataagattgatctcatctccccagggcgacgcggggatcgaacgacgttggtctctaaggctctgataccatgtggaagaatctaatatgttgtattattgtgttttcttatattttctgatatattacatcgaccctctcatgaggtatatataggagtacataggggatagagacttggagtacaatacaagtaagagtagatttatctctaggattctatctctaggactctatcttatctctaggattctatctctagaatatatcttatctctataatttgtatttgactcttatctctaattaacatattatacttctaacatgcgcgaccggacggcataggatcggtgcctcgccatggccatgtgggaccaatgggaacggaagggagtgacgatggcatgaggttaaaacgtgggactggattgcgatcccgcagaatggtcgagcgacaccacgcctaatgcaaacgatcatgtacataatcaaataaacttattcctaatgcccatagcattagctaattagtatgtgctgtgtatatgcatgtgtatggccactttgatatactaatcattaatcattgtacactactacatgatagatcattaatcattgtacactactacatgatagattttcctgaataatcaaataaacttattcctaatgcccatagcattagttaattgggaaaattggaaccatgccattataattttgtaaaatttgagatatgtcatcctgacctacatgtcattgactcatgtgggtcctacgtgtcattgagataccgatgacatatcttaaactttacaaaattataatggcatggttccacttttcccagtaattggtgtgtgctgtgctatatatgcatgtgtatatgtgtatggccactttgctacgtgtgtggcggtggcgcagattggtcacgcggcatcgccggcggtgccgcctgccagttctgcgcgactggctgggctgccagctgaggagcaggccgacgcgttaccgcgctgccccggtgcgggaccgtgacggtcgcgcgtgttggcgccgcggaaccgtcctctctaatcggtctcgcatctttgatctgcgcctacggtgcggtgccgcgaccccaatttacgggagaggtatatttgtgtaaaatttttagaagcatgtatatatatataaaatcaaggaaaataatatatatttcaaaatttaattcgctaggcttcgtccttgatcgtaggagcagaggatgttggcgaacttggcgtcgagtggcagcaacttgctgcgttcttggggagaaggatgtggtttcttttctgcattttaattctccgccggtgcagatgcggcgcggtcgtcttgtacatggcgttggcttagcttgcacgtagaggaatggcttcacgtgattggttggccatattggccatgcatggcttgcatgcatgagcctgtcatcaggcttgagcagcaggttgtcgatggcgtcggagacgatatatgtcgtaagggaaccggcggcagctgtcgtccgagccgcaccgcgaaggtgtattcactggtggagaaaccatctttcgtcggtcggccgaattccacaatagttccggttgcaataaaaaccgggactaaagatcaagtcccggttaaaaaaggtaatgggcatatttgatctttagtcctggttggtaacaccaaccgggacatctttagtctcggttcaaatgctgtcagggcttgtcaggcccttcgagatctttagtcctagtttgtaacaccaaccgggactaaagattgtaaatgtagtcccggttggtgttaccaaccgggactaaagatctcgaagggcctgacacgccctgactgcattcgaaccgagact

SEQ ID NO: 10372 - DNA, 1683 bp, Oryza sativa
ctcatcatcgtccatggttacaccaagatcgctcaacttgtttgccaggccactgattttgccggcaaactcgtcgattgactcggtgtccttcatgtgcaatgccttgaaatcgctcttcaaggtttgcactcgcgcctttttcacacgctcaacgccaaggaacctcgtcttgaggctttcccagacctccttggcagtcttcttcttcgcgatctgctgcaacacgtcttcggggacggccccgaagagacacgcacgtgcctgcttgtccttcttaatgtccacggcctcatcggccgcgggctcgatggcatcccagatgccttgcgcctccatgttagcctccatcttgatcgcccaggtggagtagttggtggaggtgagcactggatatgggagcgacacgatgccctccctcatcgatcgcgatgcggagtgctcgacgatggccatcttgttgaagcgcaggatcttgggcataaattggctctgataccaattgttagaatctctcctctctgaatgtttaagtactaatcactagcactaacataaacacttgtatttactcggtggacacaaacacacaagaactgaacaaaacacacaggcttttggttgatgtggctaatcacaactcacaccattttcttcattacatagacttaagtacatgcaaaagataaggatcagccaactaatttggccttgactcacgccttactccaacatgcagatgccatgcaacaaggtaactagctagacctattcttccgccacaaaatcacttcgtggccttccagcttgagctgcagctctgcatgcatcttaacacatccaactaaatgcttgcatgcagccgctaatcactagttctacatgctaatgcaacagcctttacacatcgtagatatcggcacgttcgtccggccgcatcgcacagctcacagcaagcacgtttcacacgtactggctcggatcctttgctgccacacactactaccttgtgcaaaacctatacaaaccaaatgcatacactctaaagacaagattattgctaacatttacccccctaatcttggcatgcttcattcagagaagagttggctcctcatcacttgacgctgcggcaaggagcgctatctccttcttcttctttttctcagggcactcatacgcaaagtgtccaagttcttgacagtagtagcacattgtcttggacctgtccggcttcttgacgcggctgcggccaccgcttgtgtcgccggacgtgaaaagtagatgctcgccattcttgtcatcacgcttgcgtatcctttcctcgtatgccttgaggcgaccaattgcctcatcaaatggcatgctgtccaagtcagagaactgctcaattgcagcgatgacatgcagaaacttatctggcacagaatcgagtagtttcttgacttgctcatcatcgtccatggttacaccaagatcgctcaacttgtttgccaggccactgattttgccggcaaactcgtcgattgactcggtgtccttcatgtgcaatgccttgaaatcgctcttcaaggtttgcactcgcgccttcttcacacgctcaacgccaaggaacctcgtcttgaagcttttccaaaacttcctggcaagtcttcttcttcgcgatctgctgcaacacgtctt

SEQ ID NO: 10373 - DNA, 1308 bp, Oryza sativa
gtacgatgggagcgtcaaccccaccgagtttctccaggtctatacgaccgggattgaggccgctgggggtgacgacagggtcatggcgaacttctttcccatggccctaaaaggacaggcgcggggttggctaatgaacctgccacccgcgtcggtccactcctgggaagatttgtgccaacagttcaccatgaactttcaaggcacatatccgcgcccaggtgaagaagcggacttgcatgcagtacagcgaggcgatgatgagtcgcttcgctcgtacattcagcggttttgccaagtccgcaatactataccatgcatccctgcacacgcggtgatctacgcgttcagggggggtgtgcggcacaaccgcatgctcgaaaagattgcctccaaagagccccagactaccgcagagctttttcagctcgcagaccgagtggctcgtaaggaggaggcctggacctggaactcctccggttccggagtggtagcttcggccgcccccggatccgccgctcagacagggcggcgtgacaggaggaggaagaagaggccggaccgttccggcgacgagggtcatgtcctcgccgtcgagggcgctccacgggccactcgaaaggggaggcctgcgagcgacaaaaagaatgaggctggtacacccagcagggagcgcctcgccggcaggtggtgctctgtccacaacacctccctccacgatctcgcggactgtcgtgcggtcaaaaacttggccgagcgaacgaggaaatgggaggaggacaggaggcaggaacgccgtgagggcaagtccccggcggttccttccggcaaacggcgaagtgaggccaagcagaaggcccccgctgttgacattgatgatggtgatgatgacctaggtttccaagaacctggggccaccattgccaccgtcgatggaggagcatgtgctcacgtctctcgccggagcttcaaggctatgaagcgagagcttctggccatggcccctacccatgaggcgatgcgtcgggcgcggtggtcggaggtcgctctcactttcgaccagactgaccacccaccgtgcattgcccggggagggcaggttgcgatggtggtttcccccaccatctacaacgtgaagttgggacgtgtcctcatagatggaggagcggctctcaacatcctttcccccgcggactttgatgccatcaaggccccggggatggtgctccgaccgtcccagccgattatcggtgtgacgccggggcacacgtggccattaggtcacatcgacctaccggtcacctttgg

SEQ ID NO: 10374 - DNA, 10248 bp, Oryza sativa
cgatatatgcaaaatctacccaaattgaagctcgaattttgaccatgcgcatatggatgactaattaattctcggcattaagaggttagctagctagctaacctggagacttcctcctagagggggcctttgaggacggcttcccgaaaggcgacgtccatctccgaccggatcttgagcagcgccagcgtctcctgccgtggccaccggttgcctgcccgcgacccgctccggtcgccctcctcgccacccagcagcccgttgtgctccagtagctcccgttgagctgctcctttgccgtcgcctactccggcgacgagcggctgctgatcggcgacggcgccccccactccgcctggctgcttcgctcgcctcctgcaccgccaccggctgcacgcggtcgatgagcacggagaggagcagcgacatgttctgcttcaacgtgcggagcgccgggcggatgcgggcgtcggcgacgccgccgacgtagagcccgtcgtagaacgagtggtgcgagttgagaagatgaggcggtacgcggcgacctcggcgacgtgtccgaccgcggagctcgcgatcacgcaggaggagctccccgccggcctcctccccacccgccggcggcctgcagagacaagattgagagagagagaggaggaggaagggagagaagatggtaaataaagggtgatgacgtggcacgctgatatgtggggtccacgtgagtcccatgctgactcaactgccacgtagattaaaaccaccgaataacctcgggtgatcggttttgtatagttaagggatcccgcatatttggttttgcggttcgagaatattttttatcccgatgataagttcagggatcttcggtgcactttttccactagacccttaaatgtaatctaattctaccgattcaggccagccctaaagtgaaaaccattttagcagttttgatatattgatagcttgttttatttagccagctaagattgtaagccaactacactattaatagattacgtcacctattatttatttcgtttggttacaaataaaatatccgttatgaacaaggttcaatccaaacccagatattaatacctgatgagaaaaaattgtagcagtcgataaaatagctagctagcatgcggggcgaaactagggaggggcggagggaggcctggtctcccacaaagttgcattcttgcttagcatctgctaatcgattatctaattacatgattagttagtttaagcatttttcgtttaagcttccctttattcttgacgattactgcatcctctatatcctgagctatgatcagtagaagattttacatgctagcacgttagatcaagcctacaacaagctaacacgtgcaagaaatctttaatactgatgcatgtagctaattatataccgtatgcacataaatataattttgtatggtctaaatataattatatgatttcctatccatgtaaaaaatataatacttgaaatttacatgtattgtgattattttttaatagattattgtcatttgatacatcttgtaattcgtttatcagatatatatggctaattaaaggtttcggcaaccaatgttgggttatattagcattggaagttttctttggtagttattgttgggagcttggtgctgaccaagtaaaacaacactaacatgttagactaactgaggggctggttgacagtaccatactacccattaattatagcctcctccaatatatcggtgccaacaaatcatccagtctagctagcaacgtaatcaacagtgatcatctcatgtgtgtagtgttagctctaccataaccatgtaaatcgacaatgattggcctatgtaaagtacgtcagttaacaagtcaaagcttaagcgagtcagaatggtgagccaagcctatttctccattcagctttctagcacgacttggcttgatcttagttagtcttgtgagctcagctctagtacatgataacgtatactttaacaatagttttataaaaatatttttaacaataattttattaatttttttaagttaatcatattaaataaaaaggtgaggagtatttaacattagggataattgcaaatataccactacatttcacacttaatttgaaatagccattaaaaacatgaattgtaaatttgccactgaaattgatccaccgtgcttctacgtgccattgccatctaaactggtgcaattaagaggcaaaaaataatacataaaactagattgaaaatgacataattaattttcccatcttcatttaaaaaaaaatcttcttccaacttacatagagtgccactactaatttattctttttttcttggcactttataaatataggacatgaatttgtgtttcgcatagggtctcgaattcttagggatggctatgatgtcaatgttaaagcagatttacaaagtttacagtgtcaataccacatataaatcttagcaaatttactatatccatgttataggaaaattactatgccaatgtagtaggaaattgaagatttttgttattcaaatgtactatgccttgcttttgttctctaactcctcagctagtagctaggtgaggtgggaggaccagatagtaaagaggagaagaacgaaggattaaaaccaaaagaatgaaagacttttttatagggacatgaaagaacctttctgcaatagatgtttctcgatgggaactttatgatattttgtgtagataatataacggctaaaattttgaaatactagatcgaacggtctaggttttgccatcaacgtggatgcatgttagaaaaggatcctcctttcatttaggggatgcgccatatctatagaggatcaggttgatggtaactcatattcgaaaaatgtgtgggacaggaggatggctaggagtgcctattcaacctcaataaagatagaacatttcaggactgtaactttgcaagtgcatcagtaagaaaaagatcgtcctaccctttgatcaaaggcagagtttattaactaaaagatacgcatgtatcatatggttggcatgcaccaaaacttttggttgaagcatcacacttcagctttttgcaaataaagggtggttggcaatcgaaggttctctctctgtctgctttgttcttgtgttgtaaactgaagggtctcctgtttgttcacatgcggattaattagctggctgagcttaccctacatgtctaattaattatggaatatttctccttgaaaaataattgagttcataatcgagcctggacacgccaacccactttgcccccacacatctgatttatcctatataataatttataatactggcaacttgtatattctctagaaaaaagttcttaaatatatttgtcaataaatattactgagtaattggctctgttgagaaaaacacatgtagatcatttttatattttctctggcagttactaatttttataggattatgcaaaatatttgcacatcactacatttctctactattataaaagtggagtcatcctccttccatatttcactgcatgcagcgccgtttaacatgtctaaccactggatttaatattttatctttaattattatcatgattgacggagctcgtggctcctcaccgggagaccgcgcaggcccccctttgccagttcggccgggggcttagggtgaaatctcaagctctctctctctctgtatgtggaaagatcgtccgtcagcaagaaacacgagacaccggcgatctatacaggttcgggccgctgagaagcgtaataccctactcctgtgttttggtggatctgtgtatgaatgagctacaagtgtgagctgacttctcccccgttctaagctctcaatctggaaaagaatcaaccaaccccctctctatgggcaaggtcctccttttatacttcaaggggataccacatgcacccttctctttccaaactggactgttctttttctcttgaatgggcggagatcagcacggttgctgtccgaatgacgctccgatgggacagcccacacctacctccacttccgccgggggtgagcgcgtcgtgggaacatggctgtgcgctgacgatatgatcagtgtcagaccggtcacaaatcggtcattcttgtccaccgcgtgtaatcttggcaacgtgcatgtttgcccttcttcacacaacatcttgcttgtaatggttaggatgaagcctggcatatatcgatcggggctagcgtgtcatctctgggatgtaacacgctagctccagccggggacgagtgcctagaagctctcgtcttgacaggatggggcgaagcgtgcgtctgaccgcctgtcgccacctaacccgtgatctgaccggtctgtgactggtcacagaccggataaaggaacgcgccgtactgcgctgcatgcagcgtgacacgcctgaccagactgcattaaatgctgttaggtgagcacagctgtgctcacttatcccatatatgtggcgcagacttccttaagggggtcggggtgccccggccctcggggccggggcaagcgcaacccgaccccccctcggggggaatcaggaggagggcggacacctcaccctcgggcccgacgtccccgaaggtgccaggccccgtgggcgattgtgtctgcctcaagcctctagtcatgatattcccggtcccatatcaccgacagtagcccccggcgttatgccagagcaatttcccttcccaagggaagcggtcaggtgtgacgccactcctaaagcctggtgacaggtgggaccggtctccgtagttgggcaaaatacccaacggtctcaatccatgcacatcggtattgataactttggttgtccataatgggcggtctattcaagactgccacaccacttgagcagcgcgcgaatctgggtgagcagatttgtctcgcccggagatatggtaacgccgcttcggtcggcgagcgtaattaacgcgcgcacgatacaatccgtttcgattgccacaaccgcatatccacttcatgcgccgtaagcgggcgaatgggattagtggaagcgtgggcacgggaaacgagggagcgagatagcgagatacgagggagcgaggtagtgggcgcgagaaacgaggagccaggcccagcgatggcaagggtataaaagcatcgagaaaaggatttgctcccttcctttcgccattgttcctcttgccttcgccgcctgagctctaactctttctctgctacgccctactttcgccacacgcgctcgttcccaatcatctcttcctccaccgccatggcacggggctctgctctgctcgacggcagtgtactgccgccttcccgcatcgtgaacgagaggcacgccggactgccgcgccgcttcatgccggagtccgccaccggtcgggagatagtgatgctgggcgaggggcgcccggtaccagattacccggggcggtccatcttcttcctccccttcgcaatggctgggctggtcccgccattttctcatttcttcatggatgtcctggagttctacgatctccagatggcgcacctcacccccaatgcggtgatgacattgcccatcttcgcacacctgtgcgagatgttcattggggtgcgcccctctcttcagctgttccggtggttcttcaccgtgcagtcggtgtcaccgccgtcggtggttggcggctgctacttccagccgcgggggccggtgttgaaccgctacatcccctgcgtcctccgcaagaagtgggacgactggaagagcgactggttctacacccccctcgccgacgaagcgcgcctccgacttccaagccagcccccggcgcaggtctccagctggcgggcgccggtagatctgggggaggagtacgacgccgtcctcgaccgcctggcgggcctgcgatcccaggggctcaccggggccatggtgttcggcgattacctccgtcgccggattgcgccgctccaacggcgcgcccggagcgcctgggagtacactgggcctgaagactacatgcggacccaccagggagccagatgggattgggctcctgaggacttcaagatcgtagtccaaagggtgctgaatcttagctccgcggaggcgtctcgccttcctcaggagatcctccccctctgcatcgatcccgaccgcgtctccattctaaccattatgctgggggtcggggcctcagaggagagagcccctaagggccacgacggcgcgggcgagcgccgccggggggaacaacctgccccaggagggggtcgtgcttctggggtgggcaggtgaggcgaagcagagcttgatgcccatgtcttcgcagtagtcgccgaagagttcactagtgaattgggtgccattatccgtaataatacggttaggcactccaaaacgggccgtgatgcccttaatgaatttaagagcagagtgcttatcgatcttgacaaccggataagcctcgggccacttagtgaacttgtcgatcgcaacatacagatactcaaacccgcccggggcccgtttgaacggtcccaggatatcaagcccccagacagcaaatggccatgacagtggtatgatctgcagggcctgggccggctgatggatttgcttggcgtgaaactgacacgctctgcatcgccggaccagatcgactgcgtcattgagagctgtcggccaataaaatccttgacgaaaggctttgccaaccagggtacgcgaggcggaatgggctccgcactcgccctcatggatatcagcaagaagctcaacgccttgtttctgaggaatgcacttcaggaggattccgttagccgcgcgccgatagagggtcccttctaccaacacgtagcgtttggaaatgcgttgtacgcgttcactcccttcgcggtcctcaggtagagtcttatctgtgaggtacgtttggatctcagagatccaagcaatcaatctaagggagctaggaacgctcccttcgggtcccgaggcctggactccgacgggcctcgggggccggtcaggcgcatccgtctcccctaaggggtcgggtcgcgccgacggctgggtaagcctttcttcaaaggcgcccggtggggtctgggctcgcgaggacgcgagccttgagagttcatcggcaatcatattatcccgtctgggcacatgccgaagctctatcccgtcaaaatggcgctccatacgccgtacttggcgcacgtaggcgtccatctgtgggtcagagcaccggtactccttacagacctggttaacgactagctgggagtcgcctaataccaagaggcggcggatccccagtccagctgccactctgagtccggcaaggagtccctcgtactctgccatattgttagtcgctcgaaagtcgagacggaccaagtatctgaggacgtctccgttcggagaggtcaacgtgacccctgcaccggcgccctggagagacagagaaccgtcgaactgcatcacccagtgggcggtttgaggcagctgtgaggggtccgtgctagcctcgggtattgaggcggtctctggagccggggtccactctgccacgaaatcggcgagggcctggctcttgatagcgtggcgtggttcaaagtgcagatcgaactcagaaagctcgattgcccattttaccactcgtcctgtaccctctcgattatgcaagatttgaccgagggggtaagacgtaaccacagtgacccgatgcgcctggaaataatggcgcagtttcctcgaggccataagaatagcgtaaagcatcttctgggcctgtgggtatcgggtcttggcgtcccggagggcctcactaacaaagtagacaggccgctgcacctttcggcgaggccgatcttcttcgctaggggccgcacccccggggcgttcttcgtccgagtggcccctcggggcgcacccatcttctgcgccgatgacctcggggtcggaagacgacaggagcggccttcccacagtggcctcggggccgtcctgggggtcgggggctcctggcgtcatcggacaagcgggcaaagggccaactccggtcgtcaggggccttaggccaccgttcggctcgggggcctcttctccctgctctctcccgggtcgaatcggtacagggttagcctcggggtcagagggccataggtgcggcctccccgcagtggcctcggggccttcctgagggtcgggggcgcccagcaccgtctgacgagcggggagagggccgactccggtcatcaggggccttaggccaccgttcggctcgggggcctctcctccctgcctgctcccgggccaagtcggcacagagtgggggtgcgcagaatgaggattgtcctcatcgcgctccacaaccaacgctgcactaactacttggggggtcgctgctaaataaagtagcaggggctcatttggctccggggcgactagaaccgggggagagctgagatatgcctttaactaagtaagggcatgttcagcttcctccgtccaagtgaacggccccgagcgcttgaggagcttaaacaagggaagcgccttctctcccagccttgatatgaaacgacttagggcggccatgcaaccagtgacgcactgcacgtccctaagtttgctgggggggcggatccgctctatagctcgtatcttctcggggttggcctcaatgcctcgggcagagaccaaaaacccgagaagtttgcccgcaggtacaccaaacacgcacttatcggggttcagttttatgcgggcggagcggaggttctcaaaagtttccgctagatctgagagtaaggtctcttggttgcgcgtttttacaaccaagtcatcgacatacgcctcaacattacgtcctatttggctacccaaagaaattcgagtagtacgctgaaaagtaggacctgcattttttaacccgaaaggcattgatgtataacaataggttcctacgggggtaatgaacgcagttttttcctcatcctccctagccatgcgaatctgatggtaaccagagtatgcatctagaaaacacaaaaggtcgcaccccgcagtggagtcgacgatctgatctatgcgaggcagggggtaaggatccttaggacatgccttgttaaggtcggtgtagtcgatgcacatccgaagcttgccgttcgccttgggaacgaccaccgggttcgccagccactccggatggatgacttcacggatgaatccggcctccagaagtctcgccacctcctcgcggatgaaggcttgacgttccggggcctgccgccgcactttctgccggaccggccttgcgcccggccgcacggcgagacggtgctcaatcacctccctggggaccccgggcatgtccgctggtctccatgcgaagacgtcagcgtttgcccgcaggaaggagacgagcgcgtcttcctatttgccatccagaagaccaccgatccgtgcggtcttggatgggccgtcgcccaaggcaacctccttgaccgggacctcgtcgcaagtggccatccgctgcctcggggcggtgggggcagaggggccaagcctctcgtcaccaccctcgggcttggacgcagcagcgaggcggtccgcgcgctgctccatgcaagcaagcgcgactttaaggtcgccacggacagagatggggccaccggggcccggcatcttcatctggaggtaggcgtagtggaccgccgccataaacttcaccaacgcgggtctccccaggaccgcgttgtagggcagactgaggtccgccacatcgaagctcacccgctccgtgcggaagttggcgggtccaccgaaggtgaccggtaggtcgatgtgacctaatggccacgtgtgccccggcgtcacaccgatgatcggttgagacggctggagcaccatccccggggccttgatagcatcaaaggccgcgggggaaaggatgttgagagccgctcctccatctatgaggacacgtcccaacttcacgttgtagatggtgggggaaaccaccatcgcaacctgccctccccgggcaatgcacggtgggtggtcagtctggtcgaaagtgagagcgacctccgaccaccgcgcccgacgcatcgcctcatgggtaggggccatggccagaagctctcgctggggatcctctagagtcgacctgcaggca

SEQ ID NO: 10375 - DNA, 14479 bp, Oryza sativa
tgccgcgacgagctcgcttcctccctcgcggcgctcccatctgccgccctctccgccggtacggcgcgcaccgccgctcctctccctcccacccgccggatggagaaaatggtttggcggcggcacggagctcctggaagacgacgacggctcgatccaccaatctaactaatttgcatgtattttcctgatgttagtgaggtctctagagtggtacaggtgcaaggaatcaacgcgaggctcaccgaagcagcgggaatcgaaaattgatgccggcggccggagttgaagaagatggggtcgatctccctcttcggcgctccattcttctcggttcttgagggctattgattgcactgatgaggagaggttgttggcgcgaggatttgatctgcggtggtccacagcggtcgggacggcgacgatgtcactgcggcggccgccggatgccatcttctaaagcaaaagaagaaaaagaatgaaaaagaaaagaaaaggatagacaaagagaggaggggagcagtgaggatgacatgtgagggagcggtgcgcggcagtgccagcggggggaagctacgcgacgaccacaacgtcaccgagctcgaccgccgccgctcctcctctgctgtcccacttgagccgccgcaacaagggccacctcccgccaccgattcctcttccgcccacaaccgccggagccgtgcctccaccgctgcgcgccgctccctcctcttccgccggccgccgcgtgccgctgtctctccgtcgcctgggagaaaattgcatatctaccatcgcataagattggcttcgtagaaataccatcacttaaattggcttcgctagaataccactcccaactagaacggcttcgccaaaatgccattttggacaaaaatgaccctgcatccgtctcttccacctccggcacgagcaaacggcaatggtgcgcagtgcagtagtgacgggtgagatgaggaaaggtcgacggtggtcttctccgacgagttcgtccgcctcacctagctgcgcggcccccaacgccttcagtctccacgacgcgccgcctccgtcgccgacgagttcgacgaatcatccccattgccggcgagttcatctgctgcctcgacgcaccgccccatcctcaacgagttcttccgccgcacctcaacgcgttaccctcatcgccggtgagttcatccgctccgctttcgtcgccgatgagttcggccccatcaacgttgatggcatcggctacggcctcctcctagcgcggcgggcaggatgaaaaggtagggacgacgaggatggcagcgcccccatcgtcgccggcaaggtggcaccggtggctgccgacgagctcctccggcattggaggaagggagaagaaccagggtcatttttgtccaaaatggcattttggcgaagccgttctagttaggagtggtattctagcgaagccgatttaagtgatggtatttctgcgaagccaatcttatgcaatggtagatatgcaattttctcgtcgcgtggagagaggagagagagatgaagataggggagatggggagagagaaggaagaagagggggttgagttggactgacatgtggggcccacgtgggtcccaccattttttattattttctgtgagactgacatgtgggacccacgtgggtcccaccatttttttttattattttctgtgtgagactgacatgtggggcccacgtgggtcccaccattttttattattttctgtgtgagactgacatgtgggtctcacgggttttattatttttccagattgaattgccacgtaagcgccacgtcatgccacgtcagatgaagactgggtcaagtgagccacgtaggcaccacgtcagctaaaaccgccatcaaaaccgctgagggacctaatctgcaccgattttgatagttgaggggcctgttatgtctggttttttggtccagggacgtaaatcggattctttgacaagttgagggacctcagatgatcttattcctcctgcggaaacatgtggcttttctgggccgttcagttctccacatcaaccttgtctctcgtaggccgaggccctggagaagtccacatctcgcgttctcgtggacgcacgccatcgtggaaatggaggactaaaagcaaacctcggttggtggcccaggcccagctgaaacgtcctgaagtgagggcgaatccttcgccgtcacaccgcgtcagcgcgttgtctcgaggcaggtatatgcaagggtggaaggcaacgggtgctctttgatctgatgatgccgctagctagggctcgccctacgcgattacggatatatagaagtatggtctgcctctgtccatgcctacttattggtatgggctactttggcctatccggtcatcggctaataatgtatggagggggctagctacctccatggaatagaaacggtgtcatattccctgtaaccgctctggccatctcgtcaagtagcggctggccagattgacgataacagatacgttggcatcgtccctagttcatggaacctatacaaccgaacttaatcagctcaagtttggttcatagctcgaggggtgccaatcatttgtgcccaagtggaaactcgccgaagttgtaggcgtaacaattcgagctatggtataaattgcacaggacaatattgccacaacgcgaccagtgttcatatgatgtatgaaacctagttaaaactatgtttggcatgtgtgatattatacggggttagtacgaaaacggtactagctagtaccatttcgtagagataataacattccacgattccaaccatttctttgtgacccctattactccacccatgcacccctcgcaagtcgcaaaccgtccagacatcggcagcgccaacatggctgcaggcccctgattgcgccgccagagtcgacacgagaacccgtgcggcatcacgtcggtccgggcgaaacgggggtagcaatacaatgattgagccccccgccagcggcacagccaaaaaagtctagccgccgcatggccagcccagcgcgtccccgtccccgcaggtcgctcgccggaaaacgaccgcgcgaggaggaagggcgcgcgcggaccgaatcagcgaagaccaacgagcgcgcatcgacaagccccctcgtgacaatcaactgctctctcgatcgagacgcggaggcgctgttgcacgtccacgtacgcctcgctcgctctggtctccgcgcagaaacggcgacaccctctcgcaaaaatcttttcctcccgtcaggatcagatcgaccgtcgcggccagtctctgatatcgatcggttggtcgactacgacgtggctgatcgactgatgagataataagagaatccccctccgcgcgcgcgttacgcgagtgtgcgctcctacaccgaggaggcaacgagacgcggatgtggtatgggtggtgggtcggtctatcgacgactcggtgtatacgatcgttgatagaaggtttgacaaatgcggggcagaggatgaatgaaagccagggggcgagcacgcaacgaacgcaacgcaacgcagcggtgcgtgtgggccgcagcacaactaccacccagatgctaacatgatgcatccgttgcttggatcgggccttcgcttcgggttggctgccttttgataacgacccggttgaatcgagcgaatccactaaaattatcgcaaatggagatggtggctccattattggacgaaatcaattttagacaagcgtccaaacacatatgtggtgtttaatacaaaccaaatcgtacatgaacaaaagaggaccgagtggagtgaaaaaaaaaatatggaatacgcaacgcaggacgtacgttgccagcggaaagtagacagtaatgcgtttgtctgaaaacggatcacattttacgtgcacacaacgaatgatggtggtatatatgtagattaatctagcaaattaaatttaatacagcatcacaaatagaaagttacacaagaattataaacaccgtaaaaagttcgaaatgtgccactaaatcctttgggcggttcacagttctaacggccagagacggggacttgagccggcgtagctcatgtgccccctgttgttggccatgccctgcgtacgtatgcgtgtacctcaccattgtgattaaagaaattatgtggtggttaacgaaaggcctctgaaattcaacgccatatatttatgtacaaggctcctttgcaacatgtagcaagttgacagtgtatagtattaattactcccgttaatcatcttgcagtacgactgtaccctgaggtgtacgtacagtacacttgtggctgacaatcataccaacggctattcgggcaactagaatgccaaaactggataggtgtgtgagcttgactgccatgttataagttgacatttcccgttagtgaaggtgacctgcataaaaaaaaagtgaaaaagatataggtaaaaaatgccgctatgtttcctcaggcctcatcagctaccatgcgcaggacacgcctgcatgggtcggacaactatagtcaacgacagatcaggattaatctagacatgagtagcactcattggacgtgtttcattttttttatcctctagttatccaattttgattggagtcaactgagtaattaaccaattagttttaggccaatcatacaaaaaaaagtaaccggaaatcaaggtcagtgtcatatattttagctcctcttataggattactccctccgtactcgcgaaggaagtcgcttagaacaatatttaagtcaaatcttgagaatataaatcataaataactcttaatttgttgagtttgaaaatgtaaaaaatatatgaatagatttgtcttgaaaaatactttcataaaagtatacatatgtcacttttcaataaatatttttagagaaataaaaaaatcaaagttgtgttttggagaccgtgtcgctgtacaaaacgacttcctttacgagtagagagggagtactatttttgcttggcctagctttaatttgctgatgtgtttgcacaagtgaggtcacaaggttggacagcagggacgtgtatgtagctaacaaactaacactccctccgtccccctaatataaaggattttgatattttattggtactgtttgaccattcgtcttatttaaaaaatttttaaaattattatttattttatttgtggcttactttattatccaagatactttaagcacaaattttcattttttatatttgcataaattttttgaataaaacgagtggttaaacagtgtaagtaaaatattaaaatcccttgtattaggggacagagggagtagtacgatactgtaatcctatttacaatggaaattacaaaactctaatcagtgccggttagtaaggggttgtttagattgaagacaaaataaatcttactaaattttggcaatgccaaaattttgataagttgacaatattaccaaaattttaacatgatttcttatgtatttatcaaagtttggcaaaaaaaacactaaatgtatgcacatctttggcaatcttatgaggagaatcatcggtagaaccgacacttatgggcctccttggctcaaaagaaaaagaagccagctcatcaagcccatgctccgagcagcccgaaccctcatctacctgttgacgactaaatttggtaagatgtgaaccgggtttgacattgagatcgaggcggattcgataaagagatcgattcaaagaacagagtatgcattggctgtgaaggcattggctgaagtgtgcatcggctgggatggatcggacagaggatagccgatacagccgatggaggtgatgcagccgattccaatgaaggtggtttcagggctgtttctagactcgttcaaagtatttcatagagattgccacgatggggataaagctcttggattaggcaattgtacctattaattaggatatttcgtgtaatttccttagagatatgtttgggcaaaagtttgccgcaaagacttatggtatcttagagtttgttagagatgagtgtcgtgtccggcaaggacatatcttgtatctcgggtataaataaaacccgaacccatgtaatcaataaacaatcgttcaatacaatctcggtgcatcgccacccttttttactttcgtttatttcgacgagttcttactttcgggttgagctgcatcgattcgattttcaactagaggtaaaacttgttatggcggcttgcgttatcggggttaatgcttccatctttatgacactttaaccctgtttatgtaattcgtcgagttatcatatacacgttgtaatctatgttggtcgcgctatataacttgttatcggttggttcttattgtaggaaagcaatcaatagagttatgttttgttattgatctagattgcattgtgtatctaccatctcttgtaggttttcatcatctcgcttagatatcatatttgtctttatgcttaatgctgcatcggttgagttcgatctattaagtaatatctacaactatgatatctggattgttttatgatcatcgagagagatagtatcggggtttcagccgatattacctgatttagctttatgttttatatgcttaattgatatgctgaatctgcctgttatattaagatcttatcgcaataaagtatattaggcttctgtttgatatattctatccgttttaatatcttaacataaagtggtattggagtactagccgatacatgctagatctatctgatcagctatgctatgagcgtttataatcttcacgttaatgtatatttcgatctaagtgatttatactgtctcagcatgatgaccgatctatcccaatcacttggtttgaatatacattgacagaaagattataaagcgttaatatctatagccgataaagtagatttagttttactttgcttatttataactgccgatcgattcacatatgacatcggcttgaaaataaatgacatgtcatcggcgactggccgatcggctatcgtttatggatttaaccgcggtttcttttgtctttatttcttgttgattgtaggatcaaatcaactggcacgctaacaaacctaaaggcaagattttggacctgcactgaagttaagcagatcttccaggccagtgtgtatttttcgcatcaacactacccccgatccccaactttagatcaagaatccacattcatttccctgatccccaatatcagatcaagaacatacaaaataaaaaatccccccaattcacaaataaggatcaacttcatagtaatctcctaatctatcctgaataaaaaatgtcacatatcaaaagaacatatggtgagttgagaagtccgtccatgcgtagatctggctgcacccaagggaggaagacacaacaaccagcagcccaagtctcccatgccatctcccaccgtacacccaacctcatccatcgtcgcgcttgagcccttaattgccaccaacttggtgatctccttctccttcgccacattggctagatccgggatcaacaacatgaacacaaaccaaataacgttgtcgaccccattggataagaaaatagcaacgaaggttctgaccagccaaccggatccatcggcggggaggccggggtcgccagatccggtgtccccggcctcctcgctggacgattcggtggcggcgatggcgcagctcttgtgaggatgcatagggagagaggacaccgacgctttgtgtcgaagcttgtgcttctctagctggaaggagtggcaccacccttttgggattcaggtagggagcgggtgcgaggaaacatggcaattggcgtcgcgcgcggataaacgagggctgcaaaagactatggtttagatagatttaagccactcgaaagtgtaacaccctactcctatcttcttgtttggattccttgttgccatgtatttaagatgttggtgtacttctgttctgaggctctgaagctgatttctctttgtgtggaggctagtggcattggtcctccccttataactataaggggataccatagtccccaactctttacacatgggtcccataggagttggtatgtttggtcttgttgcacggcagttggcgaagcccactatcgactccgaactagcatatcggtcgtgttggcaaggcatagagtggcttctctccacccctttgctccttcctttgacgtgtggcttagggtaggtgatgtggacaccttggtggttgccgagcctacttgagcattagaggctaggtggggctgtactacagtgggctggaactggcaacaagtcaaacgaccatgtcgtctgatagcccccatgctcagtgcctttttagggtgatgatggcttgtcccaaggtcggcatacgccatcttgtcgtccatcgtcccggacgcacgtcaggttggtatagattgttgctatcctgagcacgtggggaaggtggcagatgtgccccgagtacagtgcatgaggggccgcactcatgggcgaacgtgcccggagcataacccacagtagggatgaaaacggatcggaaacggacggaaactagctttatcatattcgtttttatattttttttcggaatcgaaatcggaatcgaaaactcggatacggaaattaaatagaatattattgaatacagatacggagcgaatacgagatggaacgaatacgatagcgaatatttaccggcatataaaaagcccctcaaattaagtttcttgatcaaggaagagatatcacttattattttagttcaacatctctaacatttatatcgtcaattttgtagacggtctcacaaccgcatgtgaatatcgattttcatggttgttcctctaagagatccatatgcaaatatgattatcattttctattctcaagaccttttactagatgcataacttacttgccattgtataaattggagatgttatttattttacttcacattttcaaaatttgtaatatttgttttatactttaaattctttcgaatacaaatgttataaactacaaagtggtagatcctgttgagctctacatctttgatatggaacacatctccatcagatgtcgtttgaattgtagatctgagattttgtaaaaattaatatggtatattataatgaatatttagacccttaaatgacctcaaataataaaatagtcaataagaaagttgtagatctcatcgagctctacaattttgatataaagtgtgtcttcatctgattccgtatgaaaaagttatgtatatatacgtgtttttttctaaaatttgctcaatgtctgcggatatccgaaaaaaattccggatagtttccgaccgttttccgattctgatggatagtacccttactgtattcgtttttgtttctgagaaaaaaatccgaattcgtttccgaatacgagaatttccagatagttcagaccgaaactatccgaatccgaaaaatggtctggacggacagaaactatccgaaccagtttcatccctaacccacagaggccgcactcagaggtggacatgtcgcgagcagaacccctagggtgttgcacccgagggccaatgtgcttgagcacaactcatggaggaccacacctaggggtggatgtgctcccaagcacaatccatatgaggggtcacgcttaggagcaggtagcaggtacgtttcgacttttgagaaactagtaatggggatcttggttcccgtttctccgacactttgaatgggagagtcaggactcaggagttatactcagctcaatatgagaggaagggagagcgaggaagtcttgggctggatcgatatgagaagcggaccaagtatggacttacattaaaaagaggggtttggagttagtgaggcacacgactcggttcatgagtccagttttctggctggtctggataaaaccagtacaaatagtttgttttttgggttaatcaacaaaaccgagactaaaaacataagtgtcgatttatatttaaaaaacagtacataggtaggattattagtaccggttttaaatttaggtgttacgtaagggcttgaaaggcatgaaaagtttcatatgtatcaattttagatgaatcggtgtatatgagagcatcccctattagatgcttcatagtagtggctaacgcaagaaatgaagttgactgctcccttgtaagaagcaagttcacatggcttataccggcgatgattgagttagccgtacgtacatgcgtttgctttattgatcgagcccggacgaatcgaccgatcgactcgattcttgcagcatttgaccatgcgtcccacgcgcgccagcagagagacgttttggctcattgcaaagtactatctttatttcgatcgttctccaagagtacgcgtcctgaattcctgatttaacacgccaaaaaaaaatctccttggttaatcgataaagtccttgggttatccaaaatagagacgctattattattacattattatgcgggatgtaaccggtatgaattgatcttctgaaaggaaaaggctcggctttacggaattgtgatctattactctttggatttcactgtctacgctcgctgttgttctttttatgtgcacttaaaaagtgcgatgcgtacatatcaccgacgattcaccggtatcaacaagtgatcctgcatgccgctcgtatcgcttgttgctcgtattgatattcctttatgttagaagaaaaaatcgcttgttgctcgtatatatgctaatcggatatgatatgataagcccgtaattaaggggaggcatcagcagtctacttcttatagtggagaggtagcaacttgactgaccggaaagagattcttattcatgttgacaaattctcaataagggtggttttcaccgtgggtccgtggcccatacacaagtcggattcttagtacagtaaagaatgataattgtaggatcgtaaagggccttttccaccccaaaagctagccattaaggtgagtgacttccctacttatatcttagttcctttgcccttccacaactaatgtgggactattcaacaatctcccctttcacacattggtgtctctcagcccttcactaccctttcaccgtatctgggcccccaccggcccacggtccatcaggtatacgggccccgcaggcactcacggtccatcaggccttcacacgtgtccgtcgggccagagatgttaacctagcctggctctgataccacttttaggatcgaatcacaagaactaagccaaccagagggggtgaatggttggtatatccaaaaaccgaaaacttttagcggaaataaaagttaccctcgaagtcgatggattgcggtctgaccgaaggtattgcgccggtctaatcacttgatgaacgtcggtctgaccgatgtagatcgatcggtcgaaccgccgagacgcctgccacgcctgtcgccgccgccggtctgaccgcccgtatgccgccggtctgaccgccgcttgccgccggtctgaccgctggtagatcgccggttagaccgccgaaacccggtgaaacacaaattgaagaactcttaaagtagatgacgactttattgattctctctgtgtttacaaagtgcaccaacagcactccttacaaaaatttcgactaaactcgaaactctaactcaaaagctcaactcaattgctcttaaaagtaataccgggaagcctcacgctccccctctatttatacccgaggtaggtagcctaaagccacgaaccaaactcatactaagagtcctaaacaccttaggaaaccctctagtataagaaagaaactttacataaccaatcgtaccaaatttggactccttccaaattcgactccgcatcccatacgcacacaataactccatcgtatgccatatggaatctccatcaaccacgtgcatcaactctagcctaagtatcccgcatgatctctgactaccacggacgtcgtcttatccccaagccgactcccggtccgtcaccgcaaatactctcccgaggcatcgattcacctacacacgaaataaacaaagaaaccatattccgagaccaagctatctccaacttgactcattagtagcaaacaacagtattacatacgtatagtattcatctagaagtcataatcatgaaataatcacggatatccaaacaaacaacccgaaaccgaaactgacacagtgtcggccggtctgaccggcatacacagcccggtctgaccggtcacatgaaataatgaatcctgtgatcacctgtgaaatccaatcatctccaaaaccacttcgtgaataaattccaaataacaaaaccaataatctccgatgcccaattgttcatcacataataataaccaaaaacacctttgattttacaatctcccccttgatgaacacattggcaaacctatcaaaaatgttttggtgtttggaaaaataaaaacaaaagtggtaaaaagcacacttcgtacaaacgtacacatcgtgctcaaaaatccaaaagaaaacttctcccccttttgaaaagaaagaaattcccaattgaaccaaaaacatactcttctcaacaactcaccaaaattcaccttgcttctcccaaaaatccaaaaattttcacatacttctcccccttttgacaatgatttcatcaagcataggaattatgttcattaatgttcaagagcttaacatacatatagtatatcaagtcatgtgttgcaataaaaagaagataaacccatctataatataacaagcatgcattaaagtataaccatgaaccaaagattttacaattaatcttgaatcaacaatcaaaattcatgatttcatacaatttataatgcaacatcttaacaagcacataggttgaagaataaacactaaacacacatacctattgcatttattactctttctcaaataacctttagcacaaaataactaagagaatttttttttcaatttttttctttgcttgagcctttttgctcatatttttctcttttattccgggtatgtccctgtcgtcaagactgtttctagggattcggcacccattattttgctcacatcgaatacgtcgttgtcgacaagactgtttccaaggattcagtattctttttttcatattttttattctctttttcacaatgagcaattaaagctatttgaggaataacaagtcaataaagcatatatatatatatatatatatatatatatatatatatatatatagcatttatagatcaaaccatatgctagcatcaacattgcatatttacttaattcaagtagaatttaagtgtcatgcatcatctcccttaaaagtaaaatctaaatctcatgaaaagactagaataaatacaagctgtgctagagacaaataaactttcaaagtattgctagcatgcacaagaaaataccatatgtataaacaaagctatcttttatcaatttttctcattgtcatattattgcttgataaaagcatgaggtacaaactccccctcaaaccatgccaaaaggatgaattattcccaattcaccacgaagaaaagcaaatcggttagaatccaaaggtttagtgaaaatatcagcaatttgcaacttggtgtccaaaaactgcaattcaacatctcccttctcaacatgatccctcaaaaagtgaaaacgaatatcaatgtgctttgtgcgtgagtgttgaacaggattcttagcaatgttaatagcactagtattatcacaaaagagaggtactttctcaaaagtaagaccataatctttcaaagtaaataaaagccaaagaatatgtgaacaacaactagcagcagcaacatattcagattcagcagttgattgagcaacactagattgtttcctagaagaccatgcaatcaatgatgtaccaagaaaatgacatgttccactagtatttttcctatcaattatacaacctccaaaatcagcatcggaatatccacttaagcatatagaagatgaagtagaataccaaattccaaactcaagtgtatgattcaaatacctcattattcgcttgaccgcttgacgatgtgaagcacgaggagaagcttgaaagcgtgcacacaaacatacaacatattgtatgtctggcctagaagcagttagatacaacaaagatccaatcatacttctatattccttttgatcaacagcttcaccatcttcatcaggatccaacacagctgtagaaccaattggtgttgaaattggcttgcaattctccatcttgaaccgtctcaaaagatccttcgtatacttcgtttgatgcacaaaagtaccttgaggtgtttgcttaattt

SEQ ID NO: 10376 - DNA, 2818 bp, Oryza sativa
tgcctcccatcccacaccacagccgccgcctgccgtgctcgcagagagggagagagagagtgagagagaagggaaggagagagagagtatgacaggtgggccccacaatcttttaaaaaaagaaaatgctgactaggatgccacgcgtacgccacgtaggataaaaccgctctagattgggtcgaggggggtaattcgtccggtattgaaagttcaaggtgaatcatgtctggttttcgggttcggggggggggggggaattcggccgaccgcgatagttcgaggggggggtaattcgtactttttccactgcgttttgattggtaaatgaaatgctaaaaagtgagaaatacctttttgtctttcaaccccaccccactgtagcaagttgttctgtcaaagcgcgaatacatttcccaattgcacgatgacacaaccagccatgcgtcaccacggatcggggtaccttgtatgcctcgatgcaaaaccacttgctagcttaatttcagcgagaaacttgtgcagttcgtatatgcatagactttatgtaacatagaatggaaaatacgtcacgattgtgacgagcacaatacctctcaggtcattcacaatggagtataataccacataagctaagcacatggtttaaatgggctcttctcacactacaaagtggtttaaccgcctaagggtggcatcaatttttcatgccacccaaaacactttctattttagttctcatatctttcaattaggatatctttcaattaggatagaagccttacattaaacacaagctctctcttgcccttcactctcctctcctcggacctcacttgtccactcttcccttcccatgggccaactctccctccccggtgatgaggtccgccgcctcctctctactcttaggccattatgacgagctcgtggcgggtgtggatcaaaagcagcggttactgaacttgtcccatttcaaaatgatgtcatcgtctaaccctcttgaacggcttgggcctatgagctcctccatcgtctagatttgctcgtgcaccaccgccgagcccctccaacaatgcaaatcaacattgtgtagtcatggtgggcgtcaatcttcttttatcgatgttggatccaagccagccatgcccttctagatctggcgtagaagaagctcggcagggtggcatgtggatcaggggtgtgtctggccagcgatctcacccgccagtgatggcgacaataggggtcttcctggtatgttccttctagacctgtctctctggtcttcagatctacctcccattgtctagatgcctcaccaacaaataacgtgaagggggaggggagggctgcacgcgttgcacgagagacatgtctctcacggctggtgaccatggctccaccatcaagtgacctcaggcttgtcggggcacctgtaccctctacaacgtgtgaggagcccagtgagatcacaacctcagttgaggtggagttgcgaatccaatgtggtgagccggagctagtcctacgattaccatgagctcctcctctgatgttggttgcatgaggtagtgtcgtcgccacttgcttcagatccatcgcccacgcgacctcaccctttacttgctcgagctcctttgcatgtggatgtgagcttgcctgggtgttgccttctcaagctagtgcctgaaagctggcggcgatgcctagatcgagcatggacaatggtgtcttggccgtcgctcaagtccaagccactgatactagtgccaacctcgttcttgtcgtcagccgccgctgtagctccctccccacctccctctcctctgccaccactcatggagaagaggatggcagtggcaatggcgccaccaatggagaaaagaacaaaggtggcaaggcaacacggtcaggtgacacgtcagccctacgatgtggcgtcctaaaatgtcatgggagagctcatgtatgactcattggcaaaaaaaatcctaattaagtccttcatagggtggtatttaaaagacgatgagaaaaagttgaatttcctttaaatttaaatttaagaattcttttttctgacggttggtagaaaaggtagctagggctatgaaatttcatacaaacaaaagataggaacctttcgatagaactgtacactacctatgtactgtaagatagctaatcgaaaggggtagcagctttctatgaccatgatttgtatagtatagaagactaagtaagtcaaagatacagtactgatcatgacattacttaccaataatcaactgtatacgtgcacgtggtactattatattatttcgccatttacctacttaacaatactaatcgtctttgtctatactaatcgagcacccaacgtttgtcttaggggctgtttggatagtgacagcggtttacaacaccaaaccttaggcacaccataatttcttagggtagtgtttagttgagttaagccacactttactagcacattggtccacacgtcatactcttattttctagccaaagtttgctatagttataaccaataatttattcactacattttgtgtggcttatcatagttatgataaatagagttatgataaagttagtatccatccaaacaacacgtaaaatcgacaaatcgccgcatatcgcactttgctgggcgaatgccacactacaggactcagccgaatatgtctgcagctatcacaccgaaatatcaccccaagatgcccacgaaaaggaccccgctgcgcgtagcggatgatgagcgacgcgctagcttttgcccctcccctcccct

SEQ ID NO: 10377 - DNA, 13407 bp, Oryza sativa
gaggcggggcaggaggtggaggaggaggaggaggggaggcgtcctcctgctcgtcttcctcctcgtcgctgcacccggcgaagcggcaggcgacggcggagcgcggcgcggatctggaggcccgccgcggcgccgtccgcgcgtggggcaaccaggcgctggcggaggccgacccggacgtgcacgcgctgatggagctcgagcgcgaccgccaggtgcgcgggatcgagctgatcgcgtcggagaacttcgtctgccgcgcggtgctcgaggcgctcggcagccacctcaccaacaagtactctgagggccatcccggggctcggtactatggcgggaaccagcacatcgacggcatcgagcgcctctgccatgagcgcgccctcgccgccttcggtctcgaccccgcctgctggggggtcaacgtccagccatactcctgcacctctgcaaacctagctgtttacacaggtctcctcctgcccaaggaccgtatcatggggctcgagccgccttccggtggccatgtcagccacgggtactacacaccaagtggtaagaaggtgtctggagcatccatattcttcgagagcttgtcgtacaaggtgaatccgcagactgggtatattgattacgacaagcttgaggagcgggcaatggatttccaccctaagattctcatatgtggtgggagctcataccccagggagtgggattttgcacggatgaggctcattgctgataagtgcggtgcggtgctcatgtgcgatatggcacatatcagcgggcttgttgcggccaaggtaaataactaccataaaggatcatttatttatgttgtatgaaatgtagcagaattactcaaatcacgactgaaaagcctagttgttagtatggtttgctgctagctgcccagaaacgtgttgaagaagagtttcaatctttggctaccttcattacctggctatctgttaagtcctgttgatttgaaccattcaacatcacaatgcaagattttctttatcatgtttctaatgtgacgattaggctgatactatagtcctgatgaaactattttgcagtcagttatcaatgtatcgtattcaaactgagtttgagcatagtaatcatagaacatttttatttttagagaacctaaggttacatttctagtcatgttcacataagttaaagataactactacagaattatattttctgtgagtcaacgttgatccatgctagttctgggattttcccctggtgatggaaatcatgctgatgaactaagttactagcacatgttatcgctattaaccacaatattcaaactgagttgatactgtagtcctgaagaaactattttgcagctagttatgtatcatattcaaactgagtttgaacatagtttatcatagaacattttgatctttagggaacctaaggcaggagtaacatttctagtcatgtttacatctgttaaagataactatataactatattttctgcgagtccacatcgattcgtgctagcttatggggttttcccctggtgatggaaatcatgctgatgaactaagttactagcatgtgttatcgttattaaccgcaatatcttatcaatattcattccattaagaaactgcagtctccatgtacgtcttactgctgttttaatattaatacacaatataatattttcaaagcatttttcaatgtcatttttatatggcaacttgagatagtttcacatatatgttatgtcaaactttgagaatgatgactaggttatacatttagaaacatatagaatagcttttgttagaattatccttaatcagtttgttgcatttttcatgtttgcttagatgctacctacacttgctactcttcagaaatgttttatttccttaatgtgtggcatcattgtgtgaagccgggggtctgccccctgaatcaaaataaataactacaaaagttcttagttggttctactgctaaatctagctagttcaatgttcttgatgttcatattgtaatagtgatattgttgcatgctccttactgttgcgagattcttatttatacaagatgctcatactgtggttgctgagcatttattgactactgacagtttatttcttgttaacttttgcaggaatgccgtagtccctttgattactgtgatgtggttacatcaactactcacaagaatctgagaggtcctagaggtggtataatatttttcaggagagggaaaaacttaaggaggcgtactggatctttttctcaagcggatgagaatgattatgacttcgaggacaggataaattttgcagttttcccttcaatgcaaggaggaccccataataatcatattgcagccttggcgataactctgaagcaagtagcaacacctgaatacaaagcatacatcatacaagttaagaaaaatgcccaagctttggcatcagccttactcagaagaaaatgcagattggttactggtggcaccgataaccacttggtactttgggacctcagaaatttaggcttgactggtataattctgcctactgttttcttaattaatctgtttgtaaacttgtgatcagggggtgtgttaatttcatagtgggtgcctggaaactgaaatatctctgctatgctaatgtagcttagcacttagtttttggaaaaaaagtctatacgtacttagtttttcttattaaattcttactaactctgacgtgtgtcatgctatgagtacatctagttatgttataacttccatctagataaacgaaacggttgatatcatcgtttgtaagagttttgtaaaaaaaaatccattctttaattgcttaaagtcatgtctctagtactattgctctttgacactttatttctacaatttagatgtggaaatgcatgtggtttctaatgtattgtgttcaaatttttacaggaaagaactttgagaaggtctgtgaggcatgccacatctccataaataagatgccgatatatggggataatggctcaatatctcctgggggtgttcggattggttagtgcatacaccatggctgttttttcttactgttttgtcatttctacataaaacatagactattgtattctacttactgtcatgttacatacaggaacacctgcaatgactactagaggttgcttggaagatgactttgaggtgatcgcagatttcctcatcagagccacccaaatagctagtaatcttatgaaagaacatggaaaaatgcagaaggaattcctgagaggcctacagaacaataaagatatcatagaactccgtaaccaggttgagaattttgcatcgcagtttgcaatgccaggttttgatgtatgagtgtgcatgtatgtgtacatatcttggtgaggttgtccagattcatcaggaattagcaaccgtttcactctttgccgaagtgtttctttcaacaggagcagaatagggaaagatcgttttttcttttgttggaaattggtcttgactgaagctgtacatgcatacttctgagttgtcatttatgtaacgtattgaaccttcatataacggctttgtataggagataattttcctccatgcgtaaggatcttaaatctattttgtgtttatgtctagcctgaactgtattgatccagatgttacagggtagttgtgatatcagtagctgacttacgtgcgccctgcctgcatgttgttgttgataaccagaagccctgaacaaccaagacattacagtgagactagtagtaacactatcagtatagcactgacgcattgacaataatggctgtcaagatctgactatttgttgtactggagtactcctactcgctaaacgctgtaagccaagcacagtgcaggttgcatcatggtactcccctgttcgctgtatagggagaaacccatcatgaagatttggtatagctggcatgttaggtaggagtaggagtaggagtagtagcagcctaattccggttgcagctgagatgggttatcatctcctcttttgacccttgcctgccgcctccctcgctcggttttgtttttgcccgtacttgaccattgatacgcttcttttcggccatgatttgcttcgctccggtttgttgccgatccatggacatcacatcggtttgctccgtttttcctccgtgcaaatgatggtgtgcggcgtccgatccatcgatcgatcgcccgatccggggggcttaaggcgaagaaagccacgacacaggtccttttcttcaatgcggagcagaaagcggcgcagcttccagctgccgttccagaacccctttaatcattgcgaccatctgctctgcttcttgggacatcaatccaatcagacaaacaccaaaagccggaggagtagactagcaggtcgcagctgcagtcgcagtgtgtgttgtgttttacactgatggtgttcagttgctcatctctctgactctcaatcactcctcccgaatcccttttatctttctgggtgtgtttagttcacgccaaaattgaaggttggttgaaattgaaatgatgcgacggaaaagttggaagtttgtatgtgtaggaaagttttagtgtgatgaaaaagttggaagtttgaaggagtttgaaactaaactcggcctctgtctagcatctctcctgattagagacaatgaaacattagttaagctttccttttgttgccttttcttttctcattgagggggatataaggaatctaaaccccttttctccccctattcttgttctagtggagtccttaatgatgacttatgaggaagtgagctcgccactaccagtaaagaactgatcactaggtataagggacaaaaacaattgagagagaaaagagggcgagatcttggcatttcacacttccttttaaggtcttctcgtttctcagtatcaagtttcacagtgattgattaatcacctaacctagaaaaagaagttgctgatagcaaatggatgtgtcttagcatagattcatcagtcatcacaagggctttttaaggtttttggttcaagcctatcccaattcatgatagctgacagttctaatatgaacaagagacaattagacatactcacataccatgtcattttagtatctattttaaaatgagagacataataaattactccctcctttataaattgatcatcatataatagaatctaaaatttctcaaattgatcattgtataactatatggacaaggattttataggaatacaattaatgcagtatgagagaacgtgtgcgtgctagggtatactcttaattgacatggagttttaatcgatgcatacattatgagagaatgtatgcataatatctttattgatgtgatttaaattatacttagttttggtgtataaacttatacgatgatcaatttataaaggagaaagtagtatggtagacgtaattctcatgcagatgcttcatgcttcccatgagaaagaaagaatgggactcttgatgctgaagctggaagctacggtctactgggcgtaggagagaaccaaagtttcggccatttttcgcattatggtagaactctgatagtagcccgacctacggcacgtctgcctccccaggcgaacaaacaaaaggcgaccccttccgtcgtgcaactgcaactgcctgtgctactcctgcaatgcaacaagaaagatttcctttctctctcatccccatcatgcctctcctttcatggcacctttcatggcagagacgcagcaacaggatggaaacaacagcagcagcagcaacaacaacatcatgagcaaaatgctgtgacagcgacacactctgtctcatcgagtaccactaactactactcgtactcgctactgaagattatgcttgctactactacgtacagtacgagtactctaccacgcgaagcatgaagcatttcatgccatcatccatggcgatgatgatggtgttgcagtcgatcgatcagtggctgcaaaggtcggagagctccttcctgccctcgacaatgtcgtcgaggaagtcgtcgagctggcagacgaggccgtcggtgccggtccggagcacgtcgagccacgccttgagctcgtcgaccttgtccttgacgccgccgtcgccgtcctcgcactgctgcttgcgggggcccgccgccacggcgcgctccacctcctcgtgcgccgcctccacggcggcgcgcgcgcaccggaactcgtacatccggatgcccccccgcgccgcgccggcgctaccgtcggcgtcggcctcctccgccatcctctgctgcagcattgcgatggacgccacgaacccgccggcgtccgcggcgccatccgcggagcacggccccgctgcggcggcggcgcaggagacggcgccggaggcgaggacgaggagcagcagcgagctggcgttgtgcagcgcgtagagcaggccgcggaagccgttgaagccgctcaacctggcgtccgcggcgcgcagcagcagccgctcgtcgagctgcagcgacagcggcgcgatcctcgcctccgacagcgcacggttctcctcctccgccgccatggcctccctcctcgacgcagagatcgccctcatcacctgcaccgatcaaacaaatctccataaacacaaaaaaacagagcatccaacaaagaacacatagtagcgatcaatcgatcaaacacacaaacagagcaagaaccactaatggcgtgtcgcagcacagaaacaaacacgtttcgcaaccaaccaacctggcgagtggagagaggggaagggtcctggagccagtcatccatggcggccgcagcacaagacgcggcagcgcaataccgctcgacggcggcaaggccgaccttgacggcgaggcaagcctcccagagccgcgcggtctcgtccatgtactcgtcgagccaccgcccaccgggcggcaggtggagctgccccaccagcagcgtgagctgcgagtgcagccccctgagcagcgccgccgcccgcagcagcgccggcagcgacgacagcccgccgccgctgctcaggtcgtccagccctctcgccagcgacgtgaagaaggcgttcatggcgaaatccccacagcaagaaagatcgaacaccggtcgatcgatgcgtctggaaggtcgagctccggctggctatatatagcgcgcggtgcaagaagggcaaggaggagacgatcggggaggaggaggaggaggcggggggcgtggaggggcaatgatgggtgtctagacgagggggagaagggtgatgatgaggttggggggaggcagaggcacagccatggctgatgtctcgctcgctcgctcgctgctgctcgctgtgctgtgtgcggtgctctggtctggtctgtggctccgcgcgcggcgtacgagcggggcgcgtttaatggctgcctcctcgcgacaccgcgcgttgccgggtttccggaggaggttaggcttaaccgccgtctttcttcggtttcactgcggatgttgtgggaaacaattttaatttctagagggcatcctcgtatttttaaaacacaacagaaacataggtaatcataaaacacgcatactcatcgctataaataaacacgcacacaatacatctataaacattttttaaaaaagttactgtatatacgattatgtagcgttacacaaccaaatcccatggtattttctagccgtttctaacgaagtaacacgtgacattcactatctgttagcaatcgtataattatcgtacatataaatcgtatacatagcattttcgatttttgaaacactagaccgacatatcctcgtcaatcatgaacgtctcactatcgatgattacgtcgcctgcaccgaaagaatatcacccatcttaagcctagaactttaatgggtgatttggttccgtcacaagaaaactaactagttaaactacgtttagttcgctagttatttacatattatcaaaataattaggaaaagtataaaaatttaacgagatcaaactccataagcctacaatattaatcaagttaaattttagagtggcatatcacatattaatatatcttgtcagttttaaaaaatattttataatgcaaacataatgttactagtagagttcaagatccattccccatgtgtttttagccatttctagcgcgtaccgcaggggggcgttggtgggggaggttgttgctccatggggtggcccgcctacggtaggggggaaaaacatacctaccagattatcagcttttggtgaaatttctccaccggaatattgcgctttctgcatagttcagcggtcaaaatggcatggcatggaacgtccagtccttgactacggaaacaaaacaatcgagcactagaaacagtcttggagagggacttggtcgtgtgtggtttgtatggttcactgaacttggagagtatagtagtagtagacttttttttttggcattgaatatttgcaaatagttcagctgctctagcgatgccattgagtggttatgttggctaaaatgtcaaaccaactgcacattgtagccacctctagttacagttaccaaggattctctcatccatcctttagatttttttgttattctttcaacatttgttcatttaaaaatttgaaaataaatcgtccataccaaccaaatttaaggccaaatgtcatgccaaagaatttttgtagcgcaaaaagccaagatgtggcgatggtgatttactatactattgtggagtaaccaaatcattaccacaccatagtttttaacccatgtggtaacattgtcttgtcatgccactaaatattgtcactttgattatgttgccacctactgacttgactcttagcatctgcagccccatcgtttggctttttccctataaaaataaatttatattttatatatgtgttattggtggcctaaaagctaatactgaaaaagaaactataataaaaaaaatctcaaaattaagtttaaaaatttaaaaattgcctttttttggctgattaggccatccgataggagcctatttgttggtttgcgcagccaagatttaaattttaaacttaattttaagttgaatttgggatgttttctatcattgtctatttttcaataccgtcttttagtctgtgaataacataatttttatctataaatcatttctgattgcttcgttcatacttctataacaaccaatggcatggaccaggataacaaataagcaaaagccactatatgaagcggcaaaatagaaatatcctttttaacattatacaaaaacatcaattttttttaaaaaggctcttttccatagaggaaaaatatattattgctgtgaggaatatagagttttcagttctctcagtaaaaaaaactgtttttctatagcttggtaggattaacttattttagccacagggacagatatgatgagtgatggtgcaatttaattaatgagttaattttactttgggctatgttttattgccaaagttttattttggaccaccatttatctaatcttttcactttggactaggtaactttacctttgtcgcataatggaccaccccaaaacacattttcatttcttcgatgacttcgagcaaattgttaacgacataccagcaaactttcatatctatatgcatgatatactttgtcgaaagagacgctagacatcacaagcgaaaagagttagggttgtccattgtgcaacaaagataaagttaactagttcaaagtgaaaagattacgtacagggtggtacaaaataaaactttgataataaagtacaattcagtcttaatcttatttgtcacaacaacgcagatagtacaaagtagaggcaacttgttctgcttgcgaattgtgaactgcatcagtattctgcctggtactacaaatatcatcagaaaaagcagtttcctttttgtaggttgtggatcacgctccgacaacacagcgtagggttaaattaagctatgcgatatttagtaccatcaatcccatcagtccatttgacatcccaagcatgcgttattcgattcaatcttatacctccctttcctccccctttattccctttccaactcagagatgcaaatcttatcctgccaaagccactacatatcatagctcactcgaattctcttctacagttcatcccaactcccattagcaaggagctaaagatcttcactacttttacaccaacgaaaaacaattatactcattctgtatcttcagacaagatcacaagagtccagagacatctagtcgaaattattgcaatacacgaacagttacctaggtaaggctattttgtacttttatagaattccagtagaaaacatcctgagctttaaatcatgcactattctcctgtttattcgggttgtcaaattgaccccttttttgtttcccctcctttacatgaacagtggctaatacttcctccgtctcagattacaagacgttttaactttagtcaaagtcgatcaaattgtttcaagtttgattaagtttataaataaatatagtaatatttataatactaaattagtttcatcaaatcaataattaaatatattttcataataaatttgtcttgagttgaaaatgttactatttttttctataaatttgattaagtttaaagcagtttgattttgaccaaactcaaaacttcttataacatgaaatggagcgagtagcaaattaactggcgccattgtgtggcatgatttcagcgttgtctgcttgccatttggccgtctcagtaagtttcagacgaagagttaactgtcagggctagtgtactcagatcaccactccctgctcagagagggacaattacccgacatgcatgggattagcatggttttcggtctgagcagcgaacttcttgtgatgcgcctttgcgcctttgtgttcccatcttgtcaagcactgaaagatgatcaatcctaatcctgctctttgtgcgcgtaaagcctgtggagacacggcaaaacagcctcgtcgagcagggacatgaatgatgataccagccatggaaggtggtcatggcagctcccaagcaagaggacaaaaacggaaggctttttcttcagaaatgagaactctgaactctgaatgtctgaatggaacttctttgtatgctgcataatttcttttggaaacatctgaaagcagggttgtggttaattaaaaaaccggtctactagaccatgaacatggaacaggagcccctagctactatgcttaccgtaaacgcatgcaagaaacacttttgtattgtcacctgctgtaatgagacatctttgcaataactacagcaatttgagctaaaattggtcaacactatcatgcttagggtccccaaattaaactgcacttttgactaagaattggcagaagctagcggcagcaaattgttcctttccattggacatattccccaactcattatttaacgacgcttttccattccacttgatacgctagaagaaccgtgtggtttatcatatctgcaaaccaaacggatgcaatcgctaatcacatggataaatcttcgcaaaagggagagatttcgggtgtgtgcgtgcgcatgcgttgttagagctgctactcgtgggatcttggagaatgtgatgcttgtagaaagaaacagttaaggggtataaacaaatgctggagaagcaaacaggatcctaaaccgtgatctcgcgtaatctaatcacggtctattgtatcgccaacatgtgataggtgtctagaagcttgcattttaatactaccggcaaagcttgatttgcctctgctaatgtgatccaaacatgataaaccggttttgtatccatccctgaattaggtattctcttgccttctgacagtgtgatccaaacatgattatccggtctgtatccatccccgaattaggtactgtcaaatacagtgaatacactattgtcatgtgtatgcattctgaatataaaatagcccaaaatgtcatgtgtgaccaagttttttatgaagaacacatgagcaaatcagcgtgcattatacagtggagtacacttaatcctgcatttattttgtttgctaaggagacagggagacgatggagttggaaggcatgagatttgcgctgcaccaacccacatggatgaaggattcaagggggacaaagactgctgctgagcctcttgagtgagtcccatcatggtcactcatggcagtaattatggccgcaattatgcctgcccaaaagcccacagggcgggcagggccaaatgcaagtatgcaaccgaccctaatggaggggattagcaataatttcctcgtttgatgcttttgaccaccgatgatatcagcactaatcacaggggtggattgtacacaacacactacacaaaggccaaagggatccatgcatgatggtgctgcgtttgtagggcactcggcctagacagaacccccgaaaaggctgcaaaatctgctgcagctgcaatgtgagctgagagtgaggccgatcgagctcgagctcgagctcgagctctcctctccccttcgattctttttggacagtgcgtgagctaatggccccggcctaagctctcctctccccttcgattctttttggacagtgcgtgagctaatggccccggcctaattcaatagggccagtatttaatagtacgggcagtctctttttccctgcagggcttgtcttggccggtgggtaacacaatctcagaatcagtactgctaatgatccgcttggtttttaataccgctacaactactagcactactattcctagttgcagaacggagagttgagctaggctgtaaagatcgcggagcacgagtaattcttgcttggatgcatggacagatggatgcgtgtgtgcatgggtgcagctgcagtggcgccgtcatcatgtggttcaatattggggcgagcgaaatctatcatttgtcgggccgacacgccagcatggacggatcgacggacgctggctggtctcagccgttgctcctgcagcctccgcgtcgacggggcggaggaagacgagaacgagacagcgagtgtgtgcgcagccagccggccaggcaaggcatgattcggtccggtctggctggctccgatcggcagcgcgcgcgcgcggcgctgtcaaccatgtggcgctgcgcctcgcggggaaacgacacggcgcgcgcgcgcgctgcgtgacgcgttcgtttcggttgcatgcgaatcgcggggcggatcgatcgtgccggatttgagtcatttggcgggggggggggggggggggg

SEQ ID NO: 10378 - DNA, 1635 bp, Oryza sativa
tgaatttttcccaaaaatgtaagctgattcatcattcatccaccatatccatggtgtgcaagaatgcaaagcgcagggatgtcccaatctgtgacatgtgcaggcactagcacatcaaacgcaagcttatccaacttaaaaaaaatggacactaactcataatatttttattgagttcttaaaaaaactcataatatcgcaacgaaacccggacgctttacatgtgcatcacgttggaccgccgtgatcttagaaacagggccaaagttcttctgtacagtactaccggtctactccacggtgtcactgtcaccccagaaacctagtaaaagggaagaactgccttgttttagtttagtgctattctaactttgtcatttttgtattaaaaaaattgtcatttttagtagctatagaaagaatttggttattgccagaacttttggcaaaaaaaaaaaaaagattagcccttcgtttcgttactaccaaagctatacgttatagaatcaaataagtcaaataattagcaatgccaatgtcttagctaaccaagcagacggctaatatttggaaattatctatgaatttacctagtttcatcgtccaaaaataacttcgtagcaatacaaagataaaataataagaatgttttctactttgttcataggggtgagggtacgttcgttgtgagtgtctacgttgtactgtgtaattaatacaaagataaaataataagaatgttttctactttgtttataggggtgagggtacgttcgtgtgagtgtctacgttgtactgtgtaattttttttaaaaatatactatattaaaattacaattgatcccactgtatcgagtttaatttatccttcatttttactaacttttttttcttgtcatgtaacaaattttacctgcagtatgtcggaagtcaatcgtcgattcgtcgacacggcccagaaaaagggcccagcccacacggggtagcccgaccggcacgtgtcggcggcaggtgcgtcgaccacctcccagccggtttcccgtccaggttcttccccccgtcgtccgtgctccatgctccaagccgcatccgcgtctctcgtcacgcccacaccaccacccaccaaccctccccttccgtcttcatcaatagtagtacgcctcccctaaaaacaaaacaaagagaagtccaccacacatccccccccccccttcccctcctcaccttcccttctccggttctcagattccacccaatccgccgctgcgtcgcgtgtgctgttcggcgaaattccaagccccaattccccacatctcatggttctctctcccatcgcctccgccgacgtcgaccgcctcctttgctgctgtcgccggtgttgttgctgtcgccggtgttgttgttgttgagggggtaacggtggtggtggtggtggtggtgaggggttagaggggctagggttgcggatttgcggccaattggttgggggattttgaagggggaatggatctctcgcggccggaatcgtcggacctgtcgctgggattccactcgctcggccacgcccgcgggcacgcggtcacggggccgctgcggctgttagatgacatggaggacgccaagccggagaagagc

SEQ ID NO: 10379 - DNA, 50929 bp, Oryza sativa
  unsure (1)..(50929): unsure at all n locations
cgcaagttttccaattcatctataagaagtttgttgtggtattgcgagaactcattcatccacctaagacaacctatctctggctcataatcttccttcttatcactctcaaattgcatgaggtatgttggaatacatccaattgggaggttaccaggaacaactagtgtcttggctccaagtccgatcaattcctgcgaactcaactttattgcattacaagctatataatattatattgcttcgtgaaacaggagctcaaggtatataaaaagatgcaggcacattactcacggtgattgtagaagaaattttggcaataacactaggagtgaagctgcgaatcttttcaatgggcacgccgctcataagaggatagttgtaatcattgcctccgatttctccgaccaaaaagagagattgattcatcatgcccttgcaacctgtgccataaacatcgtttagtaatagctgaaagggaactttaactatcaaaattgctgctttatatggtagttaaactaaactatcttcacctactacttctagcatgttcgtttattatcctattataaactagacagatttgtagcaaacccacaatcattgacctggcatatttattttttttattttattctatgcaaccaattcaagggttaagcaattattcacgtggaaatcatatcatgttgaccaaatatttggcagtggcatggtgtgcattattgtatagtagcagtagtagtatactccaaactagcatggtggctcgcgcagattacgcggctagtaccattatattttctcttatataatagcatatatattttctcactatattattaaaatatattacaatgacaatataattttaaattttacaataactttacgaaactactcatgcgtaatatttatattgtattttatatacgtgttagttattaattatttttaatatcaaactttagttatttgtaaattatatatattcctatatggactctggacttgtcttttaatatatttttttaattctgaacttttattatttttaattgtatttctatgtggattctaaattcatctttcaaaattctttaatttttaatttcaaatttcagttacttctaaattgtattcctatattgactttaaactcttcttcccatgtttttcttaatttctaattttagttatttgtaaattgtatttttatacggactctacacactacttttcattttattatgtttattctaaattttagttagttttaaattcctatatggactctatactctacttctaatattccttatttttaattcctaatttctattttttttttcttaattgtatttctatatggactctatactctacttctaatattccttattttttaattccaagtttctattattttctaattgtatttccgtatggactctatactctacttctaatattccttatttttaattccaaatttcagttatttcctaattgtatttttatatggattctagtctactcttctaatattccttatttttttaattccgaatttcaactatttctaaattgtatttctatatggactctagtctcctcttctattattccttattttttaattccgaatttcagctatttctaaattgtatttctatataaattcatctttcagtattctttaattttaatttcaaatttcagttacttctaaattgtattcctatattaatttaaactcttcttcccatatttttcttaattttgaattttagttatttagaaattgtatttttatacggactctaaactctacttttaattttattatgtttattctgaattttagttagttttaaattcctatatggactctattctctacttctaacattccttattttttaattctgaattttttttcttaattgtatttctatatggactctatactctacttctaatattccttatttttaattccgaatttctattatttcctaattgtatttctatatgtactctatactctacttctaatattccttttttttattccgaatttcagttattttctaattgtatttctatatggactctagtctcctcttctaatattctttattttttaatttcgaatttcaactatttctaaattgtatttctaatatggactctgattttccatatggactctatactctacttctaatattccttatttttaattctgaatttctattatttcctaattgtatttctatatggactctatactctacttctaatattccttatttttaattcagaatttcagttattttctaattgtatttctatatgtactctagtctcctcttctaatattccttattttttaattccgaatttcaactatttctaaattgtatttctatatggactttgtttttttctttttctccgattaatgcgagaatttctaagccatgagagcgaacgtggaggctcctttttctaatcctttaataatataataggtagatagataatagatagatagatagatagatagatagatagatattgttaatgattgtggtatctctagacacgcacctttctagacaataaagccccaccaactaatagcaaactgctatgactagtgcttagaaaatgagaactgccacgatctcgttccaaacgtcattgtcgaagcctcaaaggttggtggtgcaaggcgaaagccgaaagccgaaagccgaaaggtgttggttgattcaaacataccgtccatgtcgccggcgcagagcatgtcgagcagatcgcggaaccaccccatctccatctcgaggtgcacgacaccgtcgtccgtgggcacccctctctcccggaagaagtccgggccgagcgccgtggcgccgcccaccgcgaagttggccccgctggcgaagtcctccgcggtctgccctccccagtacggccgcaggaacggcagccccattgcttcagctgcggcgcggcgtacccacacgcgcgcgcgcgaattacacgtctcatattagcaaacggatcgagcgatcaatcgatgcagacgaggcctgcaggatggatggatgatgaggcgtaccgatgaagtcgatgatgaggcggccgtcggagcaccggccggtggcgcggtggaagaaggtctcgccgtagggtggccacagctgcgaggtcgttgccggagaggaaagcgacgttgcccgtgtccgccagcgagtccccgaagctgaacacgcgcaggtagcacggcgccgccagcgcctgtgccgccgccgccgccgccgacagcacaactgccaccgccagcactaccgccggcggcgagaggaggcctgctcctcctccggaagtggaggagaccattcttcctacactttcgtttgcttctgctcgacgtcgggcccgaaggcgaagcggccactgggattggctctgcggtgttttttcgcgttggcccaaaaaaggcaaatactccaagaaacgtaagcgtggctcgttaatgttaagtgggctcgagtgacgaatgcccacaggtcagtagggcctctggtcgctgttagcctattacacatgagacggtgacaggtacgctccatcctccactaaatgcactgtgaaaacgtagtataaatgctaagcgctcatgatacgtacacattgatccctatatatatcactcatcgctaaaataataattacccgtaaatgcaaatgctcatgtcaagtataggatttgaatcaaggggacttcgttctaccacgagaaagctaaccagttgagttgcgtttacaagtacgtttatttcgtaagtcgtaaggtaacacttttagatacacagattgttgtatatcattactttggaccaaaagatttgatacatccatatattgattttttttcggcgatgtatatttaaccaagcgtaagtgaaaatatttttccccgtcgttcgcattctgccatggtgaaacaacttatcgaacgataatgaggcttgcagcaacaaatcacaaaatggttcaggtgataagactcgaggagatagaaatgggaaaataagtgtagtccaacgacaatgacaatattttttttacttcctctataaaatatactcaaccttgtatgaaataggataatctagtacaattatccatatattcgttgtactagattattttattccttactagcttacgttttttgtgacggagggagtattaagtaaataatcgcttctcttaagagtgttaggtgcaaggagagtaggtagtgaattaatgatgttgcaacataattgacctgattgatatatactggtagttgtgctttttatattatctaatatttgaagtgttttcgttatttcgatttctttaaacaatatcccgtacatgtttgacactgacagtttttttatttaagctatatggcacttctgatgattgtggatacaaataagagtcatggaactcactaaaaattagataaagcgatcggattgcatgatctttatacaatatcgctcataagaaatgcctctacgagaagcgacatcacggccacatcagccacgcagccaaggtgaccaaagaatgtagttgtctccctgtaacccctaaccctttcactatacacagaagaaaaacaatggagctaaattataataatactacacataccctataagaaataataaatcttaaaaatttacgaagaatcaaacgatccacaaataaaaccttgtggtcgtgactaaaaacagagaaggaataacaagagccagccaatcacttgggcaacagccattctgtgtagaacagttctgcagttctgtaatgaggcaaaaataccacaatcgttacatcttttaatcacacgtattgtctatataataaaaaaaatatagttacagaattacaaatcgtagaggaccttgtattcaacagaagaactgagctcagtaatttgcgggcacgaattagtggtggtagcaaatgaaggttgtgtatatgaacctcgtagcagtccaattgcaatggccttgtatgcagcttctgatggatggaagccatcccatgacccaaacttttgtgggtcatcgcaaaccttgtattcaccatatccacatcttgcagttccagatacaccatacggtcctcctccaccacaacaagctgtcaaaggatctttgattcctgaaccgaggttagggaaatgttaaacaagctatactcagaagaaaaaaatgatctttttcttgataatatgcgctttcctccatattaaggcttctagacagtttttctagtgtaaccgactagttagttcagtcttaaactcggtacaagtgatgtcatgttaatttgtaatacacataatgtatctataccatggtaagaatgcaataatttgtaatacacataatatatctataccatgataagaatgcagatatctgaacagaggtctggcgtgggggtgcattacgtgacatgatgaaaataaacttctgaaccttacaaacatatgaaggatacagacagatttgcttcgtttgagaagcactaaggtaatcaaatttaagagaacacatatagagtatttttcttgtaacctaaaaactaaaattagtagtgttaagctttcgaaaagaaatcatagtagaaacagtaatgaattaactgaactcaccaaattgttcaggggaaaggaaaacttccatggcagctccatagtaatcagcatagatgatggccacatcaggatgaagcttgcgtaacttttccaattcatctataagaagtttgttgtggtattgcgagaactcgttcatccacctgaggcaacctgtctctggctcataatcttccttcttaccactcttgaatatcatgaggtaatttggaacacatccaatggggaggttaccaggaacaaccagcgtcttggctccaagcccaatcaattcctgcaaactcaacgctgttgcattacaagccatgtaattttgtattgcttcttgatacagggtctcaaggtacacagaaaagatgtaacataggcacgttactcacggtgattgtagaagaaattttggcaatgacactcggagtgaagctgcgaatctttgtaatggacaccccgctgagaagaggtaggttgtaatcattgcccccaatttctccgaccaggaaaagagattgattcatcatgcctgtgcaacctgtgcaataactagtgtttagaatcagtatgtaaatatgatattatagctgaaaatggaattttaagcatatcacaattgcttatttattatatcatagttaaacatttaaaggatcacaggaagcttactacttgtcatttctactaaaaaccagatttgtagcagcatgatcttccccttggcgtattaattgatttctgatttatgttgtatgccatcaattcaagggcaaagttcatatgtagcagtgacatggtgtccatttataaaatattttttataatttttaatttcaactaatgatgatgtattctttggaaaacaatgtgttatggattcgcggtgtgattttatatatatatatatatatatatatatatatatatatatatatatataaactgcagaaagttttaggactccttttacaatatttcctttttatagaaaatacagtatcagttatggacttaaggtgtttgacaatgacggttatggattttgaaatggaccatctgcctagcagcaatcaacaaaagctgtcaatcttcaagccacaaataaaccccactatttctggtaatgatgaattgcttttcttattttccttgtgctgttattttctttggatgcacatttttttgtgtctaaaccaagtaaccacaggtgacatataatatgtgaaaatgacattagtagtgtatcgtggaaaatacttcgatgcagttatattctttagaaaccatgtcaacgtcctaaagcacaagtaaaaactaaaaaggaatcaaggaatatatattgtataccattgcaccaattctgaaatggcatagaaggtactaggataagttccacaccataaggaaaatgctatagcatacttttcctttttttttttctcttcaactttctagccaactcccaccttccatgtcttctgagagccacaaaaggttgagacagtgccttagtacctgtcagtctgcgtgcttatactctactaatcagtttgtggcatgtttgggatttgcttctccaatctccatgtgtcacattcagaccattctatttatcaccagatgcgcatcatcatcaagacattaacccccaccaaactactagtctactgctacgatttcatatcgctagttgaaaatgtcatcgtcaaaggtgggtagagagagaggagggattatatcaacataccggccaggtcgccggggcagagcagtttcagcagatcacgaaaccacttcatctccatgtcgaggtgcacgatgtcagccatgggcacccctctcgcccggaagaaggccgggctgagcgccgtggcgccgcccaccgcgaagttggccccgcatgcgaagtcccccgcggtccgcccgctcaagtacggccgcacgaacggcagccccagcgcgtccgctgcggcgcggtgcacccaaatttcaaatctcaggttagtcgggtcgttcgatcggtcgaccaatcgatgcaggggaggagggggctgaaaatcgccgcgagcagagtaccgatgaaatcgacgacgaggcggccgtcggagaatcttccggtggcgcggtggaagaaggtctcgccgtagggcgggcggagcgccggctcgcgggagtcgttgccgtagatgaaggcgaagttgcccgtgtccgtcagcgagtccccaaagctgaacagccgcgggtagcacggctcctccgtcgccgcctctgccgccgacaggagcaccgccaccgccacaactaccgccgccggcggcggcgagaggaggagtcctcctcccttcctcccggaggtggaggaggaatccattcctctcctctgctcgagatgaacggagaaaaggagagaaagtcgtcgcggcgatgctttgcgttggtccaagtctaacgtggcttttataaacgctgcggtagtcactgacatgtggggtcgcggtgacagaggcccacgggtcagtggggccagtggtcgctctcacgtgtgacaagtgtgctttctaaccttcgagaatgatgagatgtgctcagttaagaggccctctttgaagtacacgtcgaatccattattttttgcacacaaacatatgttctttttagtattacttccgtcccaaaataaatgcattcgtggatatccgtgccccacgtttgaccgtccatcttatttgaaaaatttaaaaatatttagtcacacataaagtaatattcatgttttatcatctaatagcaataaaaatattaatcataaaaaaattttaaataagacgaatggtcaaacgttgaacgtgaatagtacaaaactatatttattttaggacgaaggaagtattaattaaggcaaaggttttggatactctacgtctacgtgacctggtgaaaccggtaaaacgcaacaaggacgtacgaaaattacgtattccgaatggtgaggcacttccgtatgatgaaaaccgtgtgtgagtgaaaatatgttttcgtcatctcgcttctcccatgggcaaacggcccaaagaacaataatacgaagctcagcacgcagaacggctcggaggggcaatccttataaaccaaaattaaaatcttacaactttaatctagcgttgtttctttgaatctttggttttctcatcgtagtttattttacaacattattttaaaaagttcaaaatttgaaatatactcctaacttttaagaataacaaacttagagcatgtcaatggattgtctatactacttctaatataaatattttgcaggttttttcaaaaaaattaacctcccacaatagccctaaacaagctgaaaacatcatccccatcaccataaatgtctctccataagtcgagggagggcctcaccccggatagccatcaccgaccgattcacacgcttaggagtcaaccgtgggagtacaagaaaataggtctagttttgtctgaagtttttttatgtagacacatttttattttgagaagttaaattgggctatctcttagagggaaaggatatttttatcccttaaattccattagagattaaaaaaagatttaaggagattgaattttggcaaaaatgttagtcatgctctttagcataataactcactaggttaaattacttgtaataaaacctattcacatgggttcaaaccgtacacttgacatcacacggatgcttgtatttaggtttattattctttatgtgacatggtgctcgtatttaggttatgatgactttgtcaatccacattcatatataatatgtggactgcttctaagtttaataaattcctggttctcaaaaaaaaatccacattcataatgtgacaaaagtgggggaacacatgttagaagaaacgacaagtatagttcaacgagaaatgtgtttttttatatgagtaatagtttgtcatatactcctatatatgtaagaaaagtataaaatgttgtaaagttgatgttgcaatgatttgacttaattgattgatataatttgctcgtgactgtactatttatccaacacttccaaaattttgaagtgttctaatctttttcatttcttaaaacaacattctcgtgcattctttgagaggatattatttatgggctatgccacttgtcaggattttgtggatacaaacaagagcagtcatactcacccaaaaaggagaaagcaaatttgcatgaccatggtttaattttttcaatctcatatatacacaagaaatatcggcttctcataaaatctctaaagcgttaccacgcagtgcggtgatatcatactaccaacgtctaaacgtgcactcaaatgtacacaaaaatatgaaaaagatttaaggcgtacggagctcaacgatatgtacactactcctaagtactaacacagcaggactagcaggatccttgccaagcaatgtgttcttggaggtagagagttcacgaaagtatatatatgcggtgttgaggcacaaggtaacaagttagcaagtactagcaacaactatggtgttattttgtgtactaatctcctctttgtcttactcgctccgtcccactaaataaaacacttaaatttatcagtctccaaaactaatttttcatatatattttttgtcaaaaaaatttactatgtttataagaataaaatcataatcatatgaaagtaaatttaaatatcaatctagtaatattatttttaacaaataaaattttatttataataaaatagttactgatcaaatatttaaaaagttgaatctttaaaatatgtgtgtgccttattcttcagtgggacgaagggagtattagttttggtcggcagatcgccaccatgagacggaaaaaaagatctgtaccaacaaaaaaatcaactcaaaattatgtatacacggtaaaaaaggacaaattcaaggaccaaacagtacacaaataatacgtcccatcattattggtagttacagaatgcactgtttttcatactcatatccccatgtataaaacattttttttgttatttttgcatataaattatcatgttgcacatcttgatttttttttctttacacattagacacacatgcacatatcatcacatacgcaagaccgcaagaccgcaattacacacccacaaatgcatccactgacacacttttgaaaagaaaaaagaaatagtaacttgttcctgatcttagtatattcttgtagagtgatgcatttttagtgtactttggtgtaccagacatccagcttctaaatttagtttcaggagtttattttgtgagagaggtttacctagctccgctctcagtttaattagatggagctgaaactgtttggctgagttccagcttacgagagatggaggtggagctgaagctatgccaaacaggctagtagtacataaagattctcttctccatcgcaccaaacattgtgaaagagaaaagagcaccattttgagattcgtttatgcactattactattttgaatattgcgattcaatcttcacaagtcaggtgcaagaactgaatgaaaaaaaaaggaagaaaattggaacgcgcgctaatcttttgcttttatagaggaccgtatcagatacggtcaaaagaaaaaaaaactcccatgaacataagtaatttgctttacctcatcagcattaaaagcttttaagtgtccccttcagaatttacgaatcacccagggatttgacacttgcaagccacattgaattgttcaccgacgggttgccgctcaccgagaatattccatcgctggaaatctcctatctaaatttgctttcaacttgagtagatgaacaattattccaagtgggaaccacgaatcgcatatactagtctccacatttgatggctggtgagtggtgtgacttgttaacagcaatagtctctcttttcactcgtcaaattcaaatgagtagtttgtatttccagaaattatagttttaaaactggctaaagcagaacattaggccagtgtcaacaaatgctaaggcaaaaggtgcataatccaatgtttgtccaatgtaacaactcaaaacttgacacaaatagttcctctcgtacaagttttgttctgtttggcattaggccgccggattcttattgtaaagctcaaatcctcggtatcccaacacaaggggtagaaaaaagcataaatcaaatcaagagaagcctcatctacaggtatgagttgctagtctgcaaaatggcctaactacgcatttgcaaatttgatacccttctcaattgaagccttgagctcgcccttaagattctccagtccttccttctcaaagtctgacagctggcccaacccaagaacttcctcaactccattcttcccaagcttcacctgtaacatcagtgaaggaacataaatatttcagcagcttgaccataaagtttactgattgaagatttctaaagcaaaaaccagttttgaaatgaccagatgatagaatcacattcacgttaggctaagcacccactacgtctatgtaatatgtaaataatgtcaccatgagcacaacataaagcaaagcagcaaaccacaggaaatcttactgcaatttgcatacatgatttgctatgagatttggcatggcatatttgagggcatttgtatgaccttttgtacaaaaaaaaaatgcttcttttgcaacagccttacagtaaccagcctataatataggaaaccagatgaaccgtaacttcttttgcagcagtacacggatgccgtgcacaatatctaaatttgcatggatggtctcaggttcatagaatcagagcaccaaaatgcacacttccacagttcatagtaatagatgagccaataaaatgaacacattctgaaagtatataataaggtagcaattccataaatgaggtataaccattaattgcaaagtaaaaaaagaaagaaagtatctaaccacacaatcattcaggatacaggaatctaaccagagacaagaaccactattatataggatttagtatattaatatatatctttctatgcaataaaaaatttgcatggttcgatcctgtccatcttctaacatttttggacagcaagaggaggacgcaaataaaacaatatgcatacaaaactagagccgcacattagaaaaaggaggaatagaataaaagagatatcattaagatgagaaggaatgtcaaatactctagatttactccaccaaatgatatagatcacaactgcaacagacaaagaaagttgtgaaaagaaaatgtaccttggaggcaaagaatggcagctctgttacagttgattgcacaaaagagcattcaacaacgtccggcactccattcagaccctttaagcaagcatttgcgaaaacagcaccagcatacctgtcccccaatagaatcaaatgagtaaggataaaagcactaccattagccataaaagcactaattcctcactctgcacagctgttatgtttattttaacttacgccatggacaaggttgcagagccctttccagcctttgcttcaacaacttcagtcccaccatcctgtgttctcttggtaagagccttgatgtcttcatcagacaacgcattagttgcaggagttgcctacccaaataaagagttccttcagttggattgttaagttatgagctcataaaagcatcatctgcttcatatttttgaacagccaaaataacacagttatatcttatatattggtcatgtttgtgttcttatttgtaatccaaaaaatgattgtacacttcatattagactatgttagcgatgattctataaagataaaagattcctatacagaaactatgtcaaccttgagcgagaaaatataacaaacttggttattaacttttttatcataataaacatgtgcagtttactacaagaataagagaacacatgaacagtaattcttaagttagcatgttttaaccatagcatgcatgatatgattatggtgccataacaaaaaatatatatattgtaggcatactccctccgtcccaaaataaaccaacctcgtactaggatgtgacatgtcctacgaggtttggttatttcgggacggagggagtaccaatctgataatcttatttttatgatatgtaaatatggatcctactggtatgacattctgagttatgttaatcaaaagtcaaaatccatacctgtgagaacagtggcaggatggtgatacccgcatgaccaccaacaactgggacattcacatctgccaaaaagggagaaacaaatccaacagaagataagagagaaaaaacaccaaaaccctactatatcaattctcagtactcaagtgactctcaggtcattaccagtaactggtacattggcctttccagcatagaaagtcttagcacgaacaacatcaagagtagtcacaccaaacaacttcttctcatcgtaagtcccagccttcttgaaaacctcggcagcaattgggaccgttgaattcactgggttgctgatcatgttgacaagagcctaatatacatgaacgaatttaatgaacgtgttggtaattaagcatgtaataccaatgaacatgcatgagtttcaaagatacgaagactgaaaacaaaattgatagaacttatcaaagataagcagataacaagaagcaataagtcagggtaaacaatgatattcttctgatttgtccaggttaataaatgacccgtggggataaaaataattgctgcaccaaattatcagcattcagccagggaaccagattattcaacaagagatatacaatgagtgctggatgctgatacacgcgtgctggggaaaagtttggcgccttttcagtaatctagtacagcttttttcacacctctaatcaaatcatgtttacgattccgttactagacctaattgcagcgagcaatacccacaagcgaccacaagagctacaggcacaagagctgcagatccagagtgctgcgagtgagggagagatcttacattcgggcagtacttggcaatggcggtgcagnnnnnnnnnnnnnnnnnnnnnnnnnnnnnnnnnnnnnnnnnnnnnnnnnnnnntccctggtcatgccgggcttcctcggcacgccggccgggatgatcacgatgtccgacccctccaacgcctccccgagctggtcatcccccatgaaccccttcacctgcgagaaaccgaaacccccaaaacccaagcgcccgcagcgttagacagatcccggcggaacgggaagaggggacggcgagcgatgagagcgcgggggaggtacctgggccggggcgttgatgtgggagacgtcggcggcgacgccgggggtgccggcgatatcgtagagggagagggaggagacgagcgggttcagcttcatgaggagggagagcggctgcccgatgccgccggccgcgccgaggatggcgaccttccgctccggctggccggaggcggaggagtagccgcggcggcggcggaggacctgcgaggcggatctcatcagcgacggcctcattgctgctctcctctgcggcgctcgagatctgactcggtggaggaggcgaagggcggagagagagaggaaaatgcaaagcggtgtgactttgtagtcgagcaaaggggatgtggatgggattgggatctactccaaaaggttgttagcgaaatggtactactaacttgtgcggttttcttgctcgtgtcaatttgatttttctctctttgatttcatctctctttttctctgtgcgcctcgttaatactatcatttctgatttgattaatcttaatactattatttctgatttaatcaatctgtttttccgtccgtctggtttggttaataaaggtgtcatggtttaaaaactagtcacactcaaaactgttctaagattgagacgagtatatgacaattgaaatttactgaaagtcagctacacgaagcgctcggaggatacggaagggcggaaggcttaaggtgcttacaggcaaacaattgtagttcatgtgtaaattagcaagaaacgaactaaataaatactcccttcgtttcacaatgtatttattttagcatttcccacattcatattaatgttaatgaatctagacataatatcaatatatatgtgagaaatgttagaatgacttacattgtgaaacgaggaagtaccaaacatagccttctaagttctaacaaccaacaattattagacaagcctatcatttcttccataaactgcactcgccatttttctcaactgagacgttaactcctcatagaaaaacaaagctgaaacagcttgcagtaatatgcagttatgcactcgccagatacaaaatttgacgaggaggttaaagttatatgttatgctattgatacaagctggcttgacttacatcaagatctgatcctaacactaaggcaatcatattgggagcgaatcggagcttctaccaagtgaagagcaacaactaattccaggcacagcactacaacaggagcaaccatgatttgtccaacttcgcgagctcctaccttgtcaggctgatcatgaactaaattaaagaagagcgcaagtaaatcagtcggtcatgatatcactcccatctgaatgctcagaggcatcagtaacgtctcccagctcttggctctcctcgtcagtttccatagcatcaacttcagattcttcatcgtctgtgtccttgtcctcgtatattatcggtggaacagcgtcctcctcatcagtttcaccgtcagaaacctggaaaagttttgagttactgcagtgattaaaaagaccgcgccatttggaggaaagaaacttaccccgctgaaaagatagtctagggtagttgaaagttgaagtgctgacttgaaggttgatgttcttgcatcaataagctgcaaaattggcagatagtaacattagtattcagaactcaacctgactcacaattgccattcctgtctgtgcttgtgccctaaaaatttgataatcaaggaagtcaaaacttcaaaaaattcctgacacatgacatctaaatgcagcattgttcaggaacgatgcaaactagtaatctaataatcttaatcagaaaaagcataatccagtatagatgatgccatgccacttactgttactgcaactgcagcagaagatggtactaacctgatagagtgagtttagcaacagtagagaagattcctgagacactatgctgctcatgtgccgacaaagtaaagcctgaagccatgggagcatacaaaccagttttgcacccctgtggagaggaaaaacatatcatgtgcaacctttccaccaaattgtaatggaaatattagagatttacactaacagaaaacctacctggattgtattagcaatacaaagaacttgagaagcttaacgacgtctgccggtgttaggagtgatactgactttacaatgacctggatgtaacccagccaacaatacaattatcagacaagaggaaatgttccatgaaattgcaacaggaaaattcatatcaatgcattggaagactgctgctaggaatgaatactattagattggttatggcctcatggagaaaaggaggccagtttttagtttagtaaattaggctaaccaagtttaattgcaacttacaaagcagtccaacaagactggattaagaggttcagactactttgtcttttctttcattctgggctacccttctttttattttcaattttacttgctatgtgaaatatcattaaaaatggcaataataagaaataagaatccaagtaaccatagcctaagtttgacatagccaagcgtaatcatgtcttgttctacatgttttcctaatcatgtacataaccatcatagcccagtaaaacaaacatccaaaatcaaattattgtaacgtcaactaccttgtctgagccaaataaaaatgatgaattatacggaaaaattgaaagcagaataagattctaagtgagactgttttcaaaatatgaaaaatgattgagtgaagataaggggcgacagaagtctcaaccacacagtgcacaggaaaaaacggagccataccttttcatctctattgtacaagcattttagcaattcagtgtgatcatcagcacgcaaagcttgcttcagcaaaacatggactgaatctgcacttggtggcgctaaagagggtggttgctcttcagtaatttcagacttgtttagcaaattcagacttgcaagtttttcctccatggtcggttcatcaagattgtactctggattcacttccttggttgtgtctaaacatcccaaataaaaacaaaaattagtgatgtggtaataaaaaaaacaatatagagggcacccttaattctgtcctttcactatttagaggtagaaaaggtaaaagaaaatgttagtgtaaggttttggaggtaatgtaacaagcaatgtctcaccattagtggaatccaaaacggatgatgtccttttctttgcttttccttgaacaggttctgcatccttgctatttgctgggcaaagaaataatcaatgtcaggcatctagacaaagtatataatttgcaacttgattatcataccatatagtggagggtaattatggagagcaattccaatagattttttatcagttcgaaaggtgcacgatatgaagttagcattaaactagtggatggctgaaatgaaactacatacatgccattagtgcttggtggagtgcaccactaggcactagtcataaataacatctacattacttcgatctcttggctagttgattaatccaaatcattatccattagttaagagcagacaagctgctgtctggattggaattcatctgaacaggaagaaacaacagttcttgtcattgcagagaaaactaaaacaaggttcaagcagagcgatctggaaaaattgtgaaaaagaacaacgcggatcaagtagatcagtcctaaatctaaccgtgttttgactaactaaagctcaatgttctgtttaacaattgagaacatttttgaaataagaacttattgcagatatataggaaccagcaacagtacaaagcagctcaagaatgatggcatgccttttccattatgcaaaccgggttatttataccaggataattctaacacacttaactattcaatttactgcactgataatgattataagagcagcaggcagatacaacaacaaacctttagcttcttgctccaaattcctttcctgcggagacaccatatcttgtttagctagttcatcatactctgcaaccaagttgatgtccttgcaagtatcatccaattctacaaccttgaactgtaaaaagtttggtgatccaaatacaacatgaaccttaacagtattgtcttcattggtgtcacataatttagctgaaattattgggatacggccttttttatcgagtgaatttttgactgagatttttgtgggcagtacttcattttgggagagggtctgtaaatgccagacatgagcaacacctttcttcgatactgcgagaacaatgcccccatctccatatgatgtgctccttgtacactctactatctttggctgattttgcattgtaagggaggctgtagaaacgatggtacaactattctgatcgcaagaccacacttgcacttccttattattgtcaacatgagaaaccaaaaaacgtccatcatctgatacagacatcagctggacaggaccctgcatttgacaatagcatcaataagagttgaaagcctctattgagtacatgacatattacaaattcatctcgtggggtgtatcaacagggagagaggagcgcaagtttgagataatgacatacaacatcagaaggaatcctcaagatctcttttttctcactcacactaaataatcttgttatcttacttgatacacccataaacttctcatctgcaaaatacaatgccaaaagtttagttgagatacacaaagaaatgacaaagaaagaaattggcaataataacataagatgtcatatcaaagaaagagttcacattcaactcattttgctgaaaccctgggttatgtaaactaaatttcatttgaactacccgattggcaattaataatcgaaagatgcgaaagagattaaaagaattagtgttctgccagctccgtatgttcttgatatcccatataaaataattggtacatgaaaaattgtttttttttacctggcaattgcatatgtgttgtcatgctctatcactatcagctactacactactacatgttaagatcaacaaataattagaaatgaattttccacttcatgatacatcaaaaacaagccatccatttttggtaaaaaccttctattaacataataaacatccggaagactggattttaataaaggttttttcaagcatgcatcaggtgaacagatgaaattaaagttgcgctcaccatgagaaagtgtaaaagaattaattggtttcttcgtagctttaatagtgtctttggattccccggtgcgagaattcaattcacatataattccatccatgccagcagtataaagaacacgcccatgtcttgcaaaatgaagagaaacaaccttgctagtagaaaaaggaaagcatgttaaggtaggcatggaattttcacaataaagttacaccagagacatattgatctaacttgttttgttctgcagcacagactatgactcttttcttcagaggcaagttggctcataacataaatcatcagaatggcttgtcaaaaatttggtttacaggccatgggatgcttgtaataatccaattaagctcatgttgcctgcttaagtgtgttccaatatgaatatctcgttatttagttaaacaggaaaaattacaactcttccatttaggtgataaattgaagcttgagcttcaagcacagaaggaaagaaagaaactgagtcttgagctacaacaaatacgccaaaagaagtttttttttcccggcagagagcagcatatccatgcagaaccagccatttagattaaaaaaaatacttgtaagttcaaatattgttttaacttttaagcaatgactaagatatagcatagtacacgtgataagcctacagcgcagttaagtaggggaacaaagtactgaatgttatgtatgtttatatcgaagggagaaatggccaaactccttgtttcaaaatgccaaacattctagtttgaattagaagtactaaacgaaattcagaacattgcagaagaacccctatcagtcaagttaaaggtcaagaacatcaagctcatagatcataataagattgcacctaccaagtatgaggagcattcttccatatgacaccagtagaatcgagaactaaaacttgaccatttgtagtaccaacagcaacaagaataaggtttccatcctttttatgctacaaaaaaaatacccaatcaaaaacagcaaattgtaagacagaaatgagacagagcctaatttcaatcctaaaaaattacctttttctgaacagagcaacatgcaatacaactgtatgaatcatctggggctgaaattggatcagtccatccttctattatttctcctcctcctgtacgccataccttctcaattagaaaagcacaagcagaaaaaatggataggttagcatacatcaaagctacaatctcacaatttggattgatgttttgagcgaaggaaagattttaatgctaaacacatatccatccgaatttcctccatcatgtaaagctcaacttttcaccctctttttgttagtagtagtagactttcacctctccgaagtaccatttctaaaatagataggctatctaccattcacagatctcagcttttaacttctatcactctctacaaacagcttataagcaaaattatatactcttgagtcttgaggtagacgcccaacgtatttaaatagtgatacatcatgaaaactattgcctacaaccaagcagcacttcacccggaagaaacaaaaaccaacttcaccaaactcccctatttaatcgccgtgagagagcaagcgttcgaacctagttccccaaccatacagcaatcactcgcgagccacgagacatctcgaaaaccaaaagcacactactacatcgtagcgcagcgaccgtataacgctccagcagcggaagtattcccccctaatcaacaacgaccgaaggacgaggggaacagcgcgtaaggaaggggggattcaggtgacgggttccgagcgaggacctggactcgccgatcggagacggcagcgaagagctcgccgtcgggggagaaggcggccgcgtctggcggagggggcgccgccgtcttgtcgcccgccatggctggttgggggggggggggggggggggaaagtaacgccggcgcggggcagctcggaaaggaaggacggggagaagcggcgagggttttcaggttttggttctggcgtcccgggtttttgctggtccgagctgctaaaatggaggcgaggccgttgggccgacagattgggccagaaaacttcggctgattgcagtgggcgtggcccggtgagcattgtaaagatgggagttcgcttttaaactctccttccagaccctcttaaaaccccacgtcttccagccaaacaataaatttaacaatccccaccctgcaactcctttctccctaataattcccccaaccaaacagctgttaggtctttgtaagagtggtaggtgaagatttagccgtggaggttgtatttctttggaattgtaagaaactgtcgtaagtttttttaaaataaaactttcaaacttatggtagttctttacatggtctcatttttttttcagaacaacgtccaccgtatggtttagcgagttagatttgattggaggttaagagtttggatctatggttaacgaggtagaattttggtgtacttagaatgcttatgaaatttgtagagcaattcgatgatttgaggcatgattagaaattctagtggatggaccatcagtatattcaggcactatatatgtcagattaactagtcaggtatatcaggtattccctcctgttgttaatatttgatgctgttgatttttcttttaacggatgccgatggaagtgacaacagtgaaggctcgggagaacgatgaggcctgtggcatgcagctctggtgctcgtctctgttgctcatcatcatccactcctcgttgcgtcgcacggcggcccgcagcatgctttggtgaccacctagtagatctgtcgctcgggaattcgacggccctgggacagttgcttgggctggatagaggttgctgtcgtgtgcttctcatctcactcaccggcatcccgctcctcatcactcctctcaccgtccctgcttccttctgggcatggacgcggacgtcggtaccagtgcagacttattgttcggctcgtcggtgccagacttgcggagaagagggaggctgagtgacggctccggcaacttgggccacttcgacggacaacggctgtagaaggacaagactatgggaaattttgtcaggatagtattttagggtgtaaacctggtaatttagcaaatcctaattaggccttattcggtttagaggggattaaagagaatcgaagagaattgagggggaataattccacaatacaataggtgtagaataaattctctctaatccctccctcatggggattaacgaaaaaggccttatggttagcgttttgaccaaacccctccctgacgatgacataatggcaattttctcttatgtttcatataaaaaactcaagaaatttcttatataccactaaaaatttaccagttttcttatatgacagtggaaattagctctttccttatatgacattacctcaaattttcatacccttttatgtcactactgtgttgattgtgtgttactgttatctccatagtaaaaagacgcatttgcccttatgggatttactgatgattataatatgagaactatttgaaaattacggagatagccagcatattaaaaatacatatattttttatatatccagcatatttaaaaaatatgtactggaaattcatgtggatagtatgtactgcaaatttgtatgatttctactgctttttatttatttggcatatacatctattgttggaggtatgtactgtttattttttacaattcggtatacactagatcacgtaatagttttcagaggtatatgtactgtttctttttttttctagtattcggtatattactagtggtggtttttgttttactacgtccatatatatatccacgctcgtcctcaccatgtagggatactaatttcattgatacttttagttagtactaaggttatttgggtcatttataaaaaagataacagtttgatcaaagactactgttagtcagagtgatggtaatggcataaaacagtgtgtaaatttgatctaacagcatatctcttatctactattataaaaattgaagatgtttttgtcatgaatttttgtatgtcgctcatacatataacttggctatgtttgactgctcttatttttactgtgatgtagccaacaaacacagtattttgtttcttttggctgtggcagcgcagcggcggtacaaagcagcgaacaggccacatatcgattctgatccatgcgtccatgtgttttatctgtcttgcgaacgattgcgttagggcgtggcctgaatcgttttctgtttcctattcgatccacgcgcacgattctcacacacaatcgccccattgtctcgtacaaggaaggaacaagatgccgatccctgattggtgtatatacgcacgagccggcgaggagagaaagaaaggcaaagcatgtcgtggacacatatcgataaattacatgcaaacattgattatggctgctcttcgattagccgcgacgcgagcaggcaaagctcgctttgatgtctctctcctatatgcctgtccagaattcaaatcatctgctaatcgcaaaccatcaagcagtagcagcaacaacaaggtaacgagaggctgcatacgtttatctaatccaaaggattaagtaaattaattacctttattatttaccaatctatgcttgcacaaaaatataatttttattatgactaggattgctggaagttgctcgacatgcttatatatatagagcatcatcgtgatatatatatatccagaacgacaaaaaatctcaatatttatagttgctgaatatttatttatatatattggacaaataaaaattgtaaactaggaacaaagtgtataacttaaagatcatccaattttaccaagaaaaaacatattatcatcttaaaaggctaaatagttcctcccattataacacactgacattttctcagtaagagaacaaccaattttaagtgatatatcagaaaaccaataaattttcagtggcatataaggaattctctcaaaaatctcgaacccaagatacagtcatacagctatacggtgccccgaatcaaaatactacctccgttttttaatagatgacgctgttatttttttctcacatgtttgaccattcgtcttattaaaaaaatacgcaattataatttattttgttacgagttgttttatcactcatagtactttaagtgtgatttatatcttatacatttgcataaaatttttgaataaaacgaatggttaaacatgtgaggaaaagtcaacagcgtcttctattaaaaaaacggagggagtgtgatacatgtatccgaaccaagctagtataaatactaagggcccctttgaatcgcagggtagaaaaaacggaggaataggaaaaacacaggattctgacaggaattgaaatgtaaaacagaggattgcaaaacataggaaaaacacaggaatggtcgtttgattggagcgcaggaaaaacgcaggaatcggatgagagagatagactcaaaggaaatttttcaagaggttggagctcttgctaaatttcctccaaaatccacatgcaatgtgccattccataggaatttcataggatttagaaagcttcaattctttgaatcaaagggccaaataggaaaattttctataggatttgaatcctataaaatttctaaataaatcctttcattgaaaggggcctaaaagaacaaattaaaggactagcgatgtctagacaaacctaccttccacggtaccgaagcgacgctgctactagatgggtgccgcgagcgagcgaaagtgcacggcgtgcggcggcaccggtggcgacgaagtgcagatcgacatcgatcggcgaagaagtgcgcagaccggacgacggcaatggcaaaatccctccacaagaaaacccatgtagtcccatgaccatgctcgccgtcgcctgcatagtgctgttcagcgtctcactggtgctcctcctggagtacatcatccgcccgcccgccccgaccccgttcctcgtcctcgcccgcgccgacgggctcgacgacaccaccggcgcccccggcgttccgcctcgagatgggcgtggtcggcctcgccgagaactaccacgcgtgcgtcggagggggcggctccgtgcttgaggtgtcgtaccacggcatggccgtcgccatgggccgcgtgccgcggttctgcgtccacgggaagcgggcgggcggcgagcgggccgacggcgtggccagcgcggaggcgacgtcggtgcgcgaggagctgcgcggcctgatccggagcgagcggcagatcgtgggggcggccgagttcagcgtggaaggggagatcaagggcttcggctatctccgctgcaaggcgctctggttccgggatgacaagcggaggagcccgatccctctgtgccaagtcgaagcctaaagtgtgtggcacgggctttttgtttttttgttttccttcgtatagcacgaatcttgaggctattggatggtccaaaaatcgacgaatcttgaggctactggatgatccaagaatcgacatgtttttccctaataacatgtcatcacttttttagcagcttccttttgtttttttttcttcgtgtagcacgaatcttaaggctattggatggtccaaaaatcgacatgtttttttcctagtgatatgtcgccacttttttctagcaacttcctttttctttttattaagtggtgataatcggggcacatgtgaatgatttagtgtttgggtacatcgaaacaaataaaactgattgtgggttagattttttttcccaactcagttttcaccgttgttatatcgtaaaatatcaggttgtaaagacatagagtcaaacaatcttactagatctgaatctaatttgagaaatatccataaacgacttaaaaaaactgtaaaacctcaaaatcttaaaaaaaaacttccaaatatatattttagataacttccaaccttgatagaaaaatgcttaagaaactgcttgatgacgtagtagcatccgatcccactatcaccgatgaattgagcggtgaagcagagcatgctgccgtatccacgtgactagattgcaggaagggaaggatacgttatatccacaaggggaaaggagatagacgacctatgttgagtttggaggtggttcttatatcgaagtatatctcatcatcattaaatacaattctactatctccgtttcaggttataagactttctaacatcgtccatattgattcgtctcacaaattaacctatatccgtgtaattaggtttataattagtttatatttaatactccaaattagtgtaattagatttataattttaaaacgggagtttggaggtgcttcttatatcgaagtatatcttatcatcattaaattcaattctattaaatattttaaaacgagatttagaaaatactagaattttaggtaacttttggtgtatagtttcacacttttcacagctgggccctggcaccgttcgccacgagaaattggacattttgccactgtcaaaagagggtttcgctatagtgccattccgccaattggattcattaaaatgccacctccaagtgatgccaaacatttcttttgccatattcaccattttactctattttcaccaatttttgtacccgggctgaccaaaatacccctttgggttgcttcttccagctcagcccttcttctagcacattggcgccgccgtcgccgcgacgcccgttgccatgttgatctcccagtcccagtggactatatcgcgcgttttttggcggggagcgaggcaggctagcttgctagctagccgcgagcggtgggtcgggaatggcgagccgccgccgcatggtggtgctggttggggtggtggtggtggcggcggcagtgttgttggtcgccgtggcctcggccggcgcgagcggcaagtcggcgcggttcgagctgctccggccgacctgacgcgcatgcaccgggagcggatggcattcatctcgtcgcgcgggaggcgccgcgtggcggagaccgcgtccgccttcgtgatgctgctctcctccggcgtgtacaccgggacgggccagtcgcatcccggtccgccgtcgcatccgccatcgtgctgagcacatcttcaatgtttctttctacacacgcgtacatgagttgtgatctggttgtgtatatattcttcatggacaagttcattcttttatctttctttttgagcggaggttcgttcttgttgttgcatgtatgttcatcatcatcatcataggatttaataaggcaacaagttaaatttcccaccggaggcggctggatcccctttcctcggcttgaaaatagagtgagctgagctagaagaagcagcagtcctaaaggggtattttggtcagtccgagggcaaaaattggtggaaatggagtgaatatggtgaatatggcaaaaaaaaaatgcttggcatagcttggggatggcattttaacgaatctaatgggcgaaatggcattatagcgaaaccctcttttgataggggcagaatgtccaatttctcgttggccgcgtgaaattgatccacgattgaatcccaaaagccccaaagccccacacactcctcgttctccagccacctccagccctactatgcctcgcccaaagcgccgccggtcgcccttgccgccgccggcgccgcctggcttccccacggagcggaaacaccatctgccggagctgcagcctccagcggtggccgcggcgtctcctggcgtcgctggagttcccgccgatcttggcgacgcgctcctgcgctgcggcaagctcctggacaagctcctggagcacgaggacgggtgggtcttcgccgagccggtggacgcgcgcgccctccgcctcgtcgactactacctgcgcatctccgaccccatggacctcggcaccgtccgccgccgcctcgagcgccgccgctacgcggacccgtgggcgttcgccgccgacgtccggctcaccttcaacaacgccatgtcctacaacagcgcgggcgaccccgtgtacgagagcgccgccgagctctccgaaatcttcgaggccgggtggccctccgttctcgcggcgccaccgcgcccgcccgacgccgagcgcaagcggaggctcagtggtttgctcccgcggctgccggtgggtgcacaggtgacggtggccgagatcatgaagaagcgggacgggtgcctgcgggaggtgaacgggatgatggaggtggacctggacagggcggactccgcgacgctggacgagctcgaccggatggtcgcggagcacggggccgccctcgccggcgtggttaaggtgaagcaggtaacatctggcagtgtgcttttgctcttaatcctgctctttagcatttcagtgaaccccctggaatctgtactcatcgcgtctgtttatagcgtagcaaaatctttgcattttctttgcaaaaaggcagtccttttcgaatgttaatagcaatgatggatattgccaagttcgggtgggatgtaggctgtgcccgcgacgtaatttcggtgtgtccgatttgcacaaaggaggatagtgactgtggaaaggggcgttttgtgttgaaatgttatttgtagggtgcgttggtgatcactgatcaggagcacaatgcaaatttcagtggatggactatcagtctattcacagttgggctcctaggatgatggggataagttgatggcaacattttcctgcttggttatttttgcacctggcaatgctcagaaaaaggatggtgtatgaaaatggcttgcgtgcactgctaattgtgctagtgactatgttgctctgttgctggtagaaacttttgaggctttttgttctggtcaatggtgattaaacctttccttctggcaacactgattcccctgatgggatggcgttaggtattgcgcattactgaatgtggtgtggtgtggtagaaacattgttatgcatttcttctaatggaaaggagaggggtttcctccctctagctcaaataaaaaaaataaaagaaatatcacaaattgaacatgcagatcaactatttgaacggatcggaaaattttatttatgggccctaagcctggccccattatgtaacgtggcattccacctgtacatacttagttcgagcaagctcaaaaagtgctcaatcgtcataagaggaacacaaaataatgtgttgaactgagtattcagtatatcatcagattattttcggatccagttgtatatctctgtgtactttagttcctctccattttatgtttccaacaatatgagttgaacttctgtcgttcagtaaaataccaggctccaagtactagtttgattcactgtttgctgttatcttgaactgtgctggtctctggtatctgtttttgacatttttgttcacttatctttactcctttcgaaagaaggcaatgatggtggtagtgaatctgtcaccccaccaactctattgtgtagagtactattttaccaaatactccatgtttttacctactcttctttcatatgctttaatattaaaaatagtccttctaactctatcttatttcatttctacagcacatgtttattatacaaagacacatatagggacaaaattctccccaaaccatcaaactaatctgttccaagcaatattagcacacatataatatattttaatccatagaaagcacgagtatttagctagtgttgtgtaaaaaaactgcatgtggatagtggaccaataaatagttgtcatgaattcaggcagacatatcatacagaacactgagtcaggagagtcattttgtcattaagacgctcctctttcattgcattgttaatctacctttttttgggaatacatatcactatatatgtctatgaataagatctgatgttgtgtgcattccccattcaagatagtaagtgccttcaatttaactaatggaagtgccatttccattgcacgggtacatttgaatttctttatagttgtctttgttatacactgtagcactatagtacttgtattgtatctacaccactatattcttgcccaatcaaaatgattatagtgcatctacgcaactataatcttgcccaatcaaaacgattgtagtcttatactacctccgtcctaaaatataagcgattttgattgggtgggacatagcctgtccagactcgtagtattaggatgtcttgtccagacttgtattattaggatatgtcccatccaatcaaaatcccttatattttgggacggatggagtacattctattctcttgattgatcagtcaattaatttgtcagaccgtaagatttctagcactcgaacaaagggctgtattaatcaaatgagttatttaacctacttatatcattacattttcaaaatcactcccccttcctcacctttcaatgtgtggctttgttctgctcgacatatagttaggttcactatggtcctgtactgatctgacagagaacattcagtaatgcgcttgtccatatgactgcaaactgaatgccttgtgagcttcttgttatgcatggcattcctcacttattattttatttgattttggtgtggggcttcgggctatcttttttatgaaaacagtttattctgacacctatcacttgaactattgcactgaagtaatcaattttttatctattcatgttaggagtatttaataggacaccatttgccaactaactaaacaatgataagttgttatgatttatcagctatacgttgttatgaggtttctttctattatatatagacaagggtaaacaatttcagcatttctaagtgtaaaattttcacttgataccatagaattggtctatgcacaaaaagacaagacaaccatacttcaccatgtgtgtattcacacatgtagttagtgaagtctggctgcttttaatacccgtgtttatacttcccagctcagatgcttaacagttgacagtaataacatatatatccagtaaagacgtgtttatggtcttatggtgcagatgtagatgaatatatgcaaatcttgacgtcacacattatacagatagctgctatgacactaagaatcatattgtacattttttagcatcgtcatagatgagtctattcttccttcgattttctgttctatgtttgatctttatgctatctttttttctgaactgtaggagccatgagtggtggataatcaaatttcagaaggtcctgcaagattctacctcagtgtcccttttttgtcgaggttcctgctctgtgaactgctgatatatctttgtttcagaatgctgttggcttcaacaggacttcgtgagaccatgagtccataacaccgtagttatcatatcctagatatgtcaactttgcattttgtcagatgtcataccgttgtgtttgtaagttggaacaagcgggggttgtatgttgggatcagggttttctgatactgaaacgtttggtgaactagaaggggaaaatatgcaaaaatatgcagtgcaaactcttatgtagtgtaaaactgaaaactattatatgatacataatatatgtctgaaatgtctatgttattatgagtaattctttctcagtgttgtatgcacacataatataggatacataatataactcttatctcgctgtttgtgtgtcactcaaataattatgaaaaaaaaatcaacaaaattagattaatatgtgataaatcaatcaacaaacatgcaagttaaaatttaacttctaaagttgcaacgaaaaaaataaattaaactatgtctagttaacgcatattcacagttataatttttttcgttgtaacttatagaagtaaaatttgatcttgtatgtttgtgaagtggtttatcatatattaatttatcttattgatttttttaatttttttctcaactatttagatgacatgtaaacaacgaaatgatgtccctcaaaagtataaaatagttttcccacagggagaaaatgaagcaataatattactaatctaggtgttagtttttttaaagtaaagtacaccgccgatctttaaaattgggcaaggagttatttaaatccacaatcttgttttaatgaatcatcatgggttcaaagcccatccgactgggctgatatgcatacatggttgtccagtgtggccataactttgcacttggccccctccgtacctagtcgatccgcttcttcctcaaatatcatctcttcttcattgtttcaatttatggttgcggtagcggtgacaaggatggtagcggagacccggttagggtggcaacgatgaaggaggcgggtaggacggtgctaacaagggaggcggctaggggtattcctaaagtgtgccggtaggagaggccatggctacttgaagcagcatgtcttctacaagtgccaagagaaaaaggcccgatctctcgttgattgtgcccttactgccgcaagaataacacagtgagctcattgcaatgatgtatgctaatcgggtcgtattttcttcactcgtcctcccacaaggttaggttcatctcccgcctcgacaccaccgattgcaccgccatcatcaacctatcgactgccgaccaaacgtgctacccaaatcgcatctccgtccaccacagagtgcccatgatcgctgacatcgcccttggagtcatcacaatagtgccgagcggagggggagggggagtgggagctattgctatggatagaggaaatattttgagaagtgggtcaactgggtgtggatgaggctaactacaaagttgctgccacactagacgactacgtcaacggtcaatggtcaacacagtcagacatgttttaaactcgtgatgatttattaaaacaagatcataaacctaaatgtctgatttacaagatagtgaagctaagtgacacctcattctagctttaaggatcgacattgtactttacttttttttttaccttttttactataagattgagtcaagaaatcattcggtttttcatctagtgtctcacgccagatggcagccatcaaaccgttcatattttgactgatatggggtaaaaaaaaaacattcgaatgatcattagacagtcctatcgtgaaaatattgataacataagtgtgtaaaagtactcagcgatcattcgtgctacaaatagcaatatagtcgcataccacaaaccactcatgcatatatcaccggctcatagctgtccgcgcgcagctgacgaggaaggtgtctccgagaaattcaggacgaacaggcggcggcgggatgggggcgcgcccttcgagcatgtccacgacgtccgtcatgccgggcctcatgtcccggctatgctgcgtgcaccacaacgccaccttcacgacgacctccacctcctcctcgtcgacgccagccgcgccgccgccgtcgccgcgcgccatggtggcgtccaccacctccatgagccggccttcctccatcctgtcccgcatgacgcacgggaggaattccttggtgaaatccggcggcgcccgcgcctgcgaggcgcccccgctgcccgcgagctcgaagttccggcgtccgccgacgagctcgaacagcatcatgccgtagctgtacacgtcggacttggcggacagcgcgttgaccagcatctccggcgccatgtaaccgagggtgcccctccagcgcgtgtcgacgctggtcaggtccctcccgatggacatggagatgccgaagtcggagacgtgcgcccggaagtcgccgtcgaggagtatgttcgccggcttgatgtccaggtgaaggatctggttcttgcactcgtggtgcaggtacgcgagccccttcgcgacgtcgacggcgacgtggcgcctccgctcctcgccggagaagagccagtagtcgagcgaccggttctcgtagaatgggtacagcaggtaccggccgccgccgggctggaggcagtatccgagcaagcctaccagcgcgtagtggtgcacgctggcgacgatggtgatctcgctcaggaagtcggcctcgccgacggactcatcacagacgatccgcttgacggcgaccgccgtgccgtcgtcgaggacgcccctgaagacggtggcggagccgcctcggcccaccacgcagccgaagttgtcggtcatggcctggatctcgccgtgcgagtactcccggagcagcccgtcgatgcgaaacgcggcgcgcagccgctccgcctgcacaaggggacgccccgcatcttctttcttctccggtggtagtggttccgccgcagtagccgccgccgccgccttgcggcggaggcgacgctcgatgcaggagagaagtgcttgataaggcttccagatgcagtacaccacgagagccacgatcgtgccgatcaaaatggcgacgccatggtcatttccagtggttgcttccacactcacgaccactacagtaactacagcaaggaatgttccggaaaccgtcttctccttccagcttgagaaggagcagaagtataagcaagcagtggcgacgtaggccactgattcaacagctaactttgccccgacgctatgacgagcaaagccaaaacggaccgcgaggaacaggataaccacagttgccgtgcgcagaaggaacttccctgtgttgcctcgcagacaggcacagcagcagcagcttcgtgcttgaggaggatcaacaactgagccggcctctacgtctggcataatgtctacgcaccacaggcaaaagcaaatgcagcaaagcttaagctattggaaacgaacgaaaaacagtagagtctgaaaaagaggacaggagcacgagaggtacttattggccttctagatatcgccatctccaaacagaatgatgtgatctagcaagagggacaagttgtggcctatagatgccgattttgaagtcaaatgagcagttgttggaaaagtagatgatttaacatacaaagaagcaggtgtcgttgtagactgagcgcgctggcatgaagtgagttatataggaccagttcgaatgagcatgcaatgatgcaaatatcaactagagttgacatctttccgcatcgcggcgatcagatcggtactagactacggccgtgtttagttcaccctcaactaccaccaaattttaacttttcatcacatcacatcgtatcacatccaaaactttcctacacacataaattttcaactttttttcaaacttctaatttttttcaggaactagtaccttccttcagttgtgtgggatagcggcatcggtgcgtgatggtggtgttatttttttcttttcctaactttaatctatcaggttatagtcttataattttttctactatattcaatgaaactttgcattaactaattaagtgtcggtttcttagaatatctttctcgttttcctttagcacacttttcaaacaattaaacggggtgttttgtgccaaaaaaatctcttagaaaatcaatatatatatatagttcaagtttataataattaatatttgactaatcatatattattttttgagggaacaagtaaggagctcctacaattcacggtttataaggaaaatcggatcaaaaaccttacgtcggcacggtcaatttataaataaccagcgaaaaccctcacattgacataatgaacccaagaacagcagtccaacaagggaaaaaaactcctaaaacgaagcattcaagaaggttacatcgacagaacggtgacaccgtccgatccaaacgaatctaaggttttcacccggagaattcccttaaaatagagttgaagctccaatagcaacacctataagaaggtgaacgacgttcgagggcatcgctgttgctagcactggcaagcagagcaaagcttttacctcggagtcccattcaaccatagcaaccatagcggaagccaccaaatgtcacctggctattcacatcacctgcacaatggcctgactccaacgagaggcggagccggactgacggcgccaacagtccggctccacctaacagccacacaggccgcccaaactccgtcgtctcgccgccaccatcgggggcccgacctcacccgaccccgactgaggacgcgtcgggtctggacctagaggagccaggtccggccatccccctcacaccaccaccaccggccgatgccataacgctgccacaacaccggatgcagggaggcaggccaccgaagccggaggtgactagagacaccccagatctggccggaggagaggaccaccggccatatccagctgtccccgtgctgccctcgccgtcgtcccgggacaaggaggccgctggtgccgagtggggaggagcagccgtcaccgccggaaaccccagatccggagaaaatgagggagggagagaagagaaaggaagaagaaggagagaggaaccgccgtcggcagcggcgacgcgagcggacgcggccgggaagcccccgcgcacacggccttttcgcctcccgtgtcgcctagagtgagtggcacgggagtcagggaatcccaaaagtgactaatcatatattagtgacttatctcgctttgcgtgctacaaaatttttagcagaacagctagctctaactcattcgatctttccattttttagtcacgttcctgtcacataaattctacttttgtcgccgataatctttccaatagtatgaaaaatgctacgtatatacgacattttgcctacgatcttcgtacagtcaacgtgtacgacacagggtaaataacgtcgagcgcgcacacgctgcaatccaagagcgccctgaagctcatatccatacttgaccttgcatggataaaacttgcttaatccaagccaggcccggtcacatgagaaatttaatgttaaacatctaagtacaattaccatataaaatcgactaaaaaaattactctaggctgtaccatgaggcttacgagatgacatgccaagacgtatgtaatgagtttgagctttggataagggctcccatttttacgtgggaccaaaagttgcaactgttacactaaggctgggagagggaaaagtgtttcattgtataatgaaaagattctagaatgttacttatcacacaataaaaagattctagaatattattatcacatcattcattcatcattcatttttttcatattacacccaactactttctcacccctaactatacctcatttaatgagacatcattgtcttttttttctttctccttattttccaaaacaatctaaaatctcataattatgggacacattacatcatccatacacacaccccacagtaccacacacacatcgatgcccataattgaatgttactcacttcatctacttttgatagttatatttcatcttggcacaattgaccgatgataagtaaccatttaaatatgctactagttattcctcgtaaacaaacgattcattaatatttacatttttcgatgcccatgtagccaatattgtgtggaagaatatatagtcacacattaaattcaagaaagtcattaagaggataggtggttggattgaaatatgcctatcaaaagtaaatttttcaaatttgaaaatatgtctatcaaaagtatatggatggagtacttctttcaataatatatttattgaaataaaataaaaggtatttataaaaaatctactaatatcaattttattatattatgagttaaaatttatcatgtttgattacccgcatgctgaaaatatttttatgggctaaacaaaccatattaaattaaataaaaatgattataaccctattttattagaggagacaagtgcatgccaacacaaacaaggggctccatatcatataaatggtgcgagagatataagcagacaagccttgttgtaatattagttgttctgacgcataggagtatatgaaatggtgcaaggatttgcgttggttgtgagttgtgatcttactgagttcattcctacgtacgcatgctctcgttaaccgtctaattttacaaacatcctagtataaaatgatgattaatacatgccgaacaatttaatgttcatatacctattcgtctttgtatttagttgtctttcatataaacctgacttaggtgccagaaacaagtctatatggtgaccagttcggtgcaaaggaccaatcagcgatgagctatagtagatttgtaggatattgaccacatcagatctgaggtctacgactttcatttctacagcattctccaacctgctacctctgctaaacaggatggagctgcaatcaactatttttgtttacttcggacgaattaactcgttccaaaaacttagaaacaatctgatacagaatctgcgtcactattgtgctatggccatcaccattcatggctacaaagagtaaagaaaatgtctgactgccctagctattctttcatccacgagcattgatatcgtttcatcttaaatctcatgtatcgcattaaattttacacgaatattgcaaaaccttaacagtgagcatgccctagttggtccggatattcattttctgatatagacttctgaactgctaagtcaattgggtgtgctcgggcaattggagcaggattatttactctactccacttgaattcatgggtcaacagactcatcagagtcactcctctctgcctcagcttcttcaccgtttgcagcgggtcgttgaacattacgcttggttgctggagcaggtgcagctttcttgccaccttctcccgctccaattacgctagcattctggtctatcaactgagtcaaggaatcttgcacatacagtgataggaatacatatagcaaaaattattttcatacgtaaacatggcatggaatggctcaacaagaaccagtcaattagtgaaccagaagcagtcagataactagtagcaggtattgttatttcaacataacagcctaccaagaaaatgatgcttgccttccaagttccaacaatacgagatgttgaagtttaggctcggcaccatgctcaaaaagttcatggtattaccattgtcatcaagataaggaactcattattatatatagtttattaacttctgattaaaaagcagtaacttcaagcaatggttgttcatgagccaattacaaactaaacgacaaaaaacctgtcaactaaagatatataaataaaaaacaattaaatttttactcaactgtaattaaggtaacatatgctataatttgataaaaccatcaaaaccaaaaggatactgacagatactccatgcataatattcatgagatgcttttcaactcggtgaaccagttctgcctgtaaacatgagtgaatggaacaataacagttatgattgacaaagtgcttccatgaggagctaaagggaaggcattgaatacatttaagtcaggctctctccggaaacgccgccttcgtgcatccctcattggaggagtaagaccatgtgtgtattcaattccttctggagcaggatcatcttcttctcttaccataatcatctgttacaaactcaatgtaagattcttaaaagcctacaattgataaaacagatcttaaacaaatcttatccttttacctgaccaatatcagctgttttaattagcactgaatcattgtatgtcttgtatgactccataacagttgggagatctaagagagatgctggaaagctttcatttccaatcataaatgtgccacttcttccatcctctgtagcacgaaaaaagaacaccaatccacaagtcaaaaaagattaactgaaaatttcagtgataacagtactagagtattacaatacaagttgtatccatcaaacagaaatagaccattgttttgaaccaaaattagaagtgagtagagaaactagacatgcacaaatagaatgctttagaaaatattagcacaaaccacatttccagaatctaaagagtagaacctgtcgagtaagaacattgcattacaccatgagaagatacaaattcttcaaagtataattactggactttagtcattttttatattgctaatagtgattaggcaattggacgtcttagaaagtaaccgtagcaaatattacatttgtggaaaaaggaaacgttaagagaatgatacaaggaaacaagatttccaaaatcgtaaagtgtgctattatctgcattcccttcataatgtattatttaaatatggcatctgctgctaaatggattactcaatatgtcatcattctcagatctctgcaggtaaagagtaaagagcacagagatcagatccccgcaactggtaacccgcatcagaaaccacaagcttgcaaagcattgccctttaatatatgtgtacaggaaagataattcttgctgcgttgaaaatacagtaccaataaaaaaaatctaccaacacgctatactgcggacttatgacctaacacctatatgacaacacaccagcatatgtccactcaagtgaggaacaacccatcggaagcgttccctggtgtacccgcacttccacaagcacagaacggaggttttccacttgcactcgcacagcataaacggtatgcgcatttcgccgaacagcgtagggtcacggtacctcgctagcgaattcccaacaaaaccatagcttttgacgcgcagctgttatacgacaggcctacgcgcatgcggaagctaaattctactgacagaaagaatcacctgagaaggagagatcgagggaggcgtcgtcggggttggaggatgacgcgccggcggcttggttcatgaggcgttcgatccgctccgccacggagggggcacacggaggatgaactgctgctccatctcaaattcccaattccgccgggagcacagcaccgcggcgccctccaagattgcaaattcgacgagcagccaatttacggtctcttccgccgttctctgaatttatcctggtggagagtagttgccgactatatattggtttagtcggtaaaattgagaggatcactagtgggccggaataactgaccacgggcccttcctgcggaggaataagttcatatgaggtcccttaacttgtcaaagaatccgatttacgtcctagactagaaaaccggacacaacatatccctcaactatcaaaaccggtgaaaccggtgcagattaggtccctcggcggttttgagggtggttttggctaacgtggcgcctacgtggctcacttgactcggtcttcatctgacgtgtcattgacgtggcgcttacgtggcaattcgatccggaaaaataataaaccccgtgggccccacatgtcagtctcacacagaaaataataaaaaatggtgggacccacgtgggccccacatgtcagtccaactcaccccccttcttcctcctctcctcatctcccctcttcatctctctctcctctcccctctccaagcgacggcggccgctcctctcccccccacttaggggccgccgcgcgccgctcccccccgctagtccccgtgcgccgctgctcctctcccgccctcccgccgaccgccgacgctcgcgcaccaccgctcctctccctccctcccgttggccggcgcgcgctgcctcctctcccgccggctgccgcgacgagctcgcttcctccctcgcggcgctcccatctgccgccctctccgccggtgcggcgcgcaccgccgctcctctccctcccacccgccggatggagaaaatggtttggcggcggcacggagctcctggaagacgacgacggctcgatccaccaatctaactaatttgcatgtattttcctgatgttagtgaggtctctagagtggtacaggtgcaaggaatcaacgcgaggctcaccgaagcagcgggaatcgaaaattgatgccggcggccggagttgaagaagatggggtcgatctccctcttcggcgctccattcttctcggttcttgagggctattgattgcactgatgaggagaggttgttggcgcgaggatttgatctgcggtggtccacagcggtcgggacggcgacgatgtcactgcggcggccgccggatgccatcttctaaagcaaaagaagaaaaagaatgaaaaagaaaagaaaaggatagacaaagagaggaggggagcagtgaggatgacatgtgagggagcggtgcgcggcagtgccagcggggggaagctacgcgacgaccacaacgtcaccgagctcgaccgccgccgctcctcctctgctgtcccacttgagccgccgcaacaagggccacctcccgccaccgattcctcttccgcccacaaccgccggagccgtgcctccaccgctgcgcgccgctccctcctcttccgccggccgccgcgtgccgctgtctctccgtcgcctgggagaaaattgcatatctaccatcgcataagattggcttcgtagaaataccatcacttaaattggcttcgctagaataccactcccaactagaacggcttcgccaaaatgccattttggacaaaaatgaccctgcatccgtctcttccacctccggcacgagcaaacggcaatggtgcgcagtgcagtagtgacgggtgagatgaggaaaggtcgacggtggtcttctccgacgagttcgtccgcctcacctagctgcgcggcccccaacgccttcagtctccacgacgcgccgcctccgtcgccgacgagttcgacgaatcatccccattgccggcgagttcatctgctgcctcgacgcaccgccccatcctcaacgagttcttccgccgcacctcaacgcgttaccctcatcgccggtgagttcatccgctccgctttcgtcgccgatgagttcggccccatcaacgttgatggcatcggctacggcctcctcctagcgcggcgggcaggatgaaaaggtagggacgacgaggatggcagcgcccccatcgtcgccggcaaggtggcaccggtggctgccgacgagctcctccggcattggaggaagggagaagaaccagggtcatttttgtccaaaatggcattttggcgaagccgttctagttaggagtggtattctagcgaagccgatttaagtgatggtatttctgcgaagccaatcttatgcaatggtagatatgcaattttctcgtcgcgtggagagaggagagagagatgaagataggggagatggggagagagaaggaagaagagggggttgagttggactgacatgtggggcccacgtgggtcccaccattttttattattttctgtgagactgacatgtgggacccacgtgggtcccaccattttttattattttctgtgtgagactgacatgtgggtctcacgggttttattatttttccagattgaattgccacgtaagcgccacgtcatgccacgtcagatgaagactgggtcaagtgagccacgtaggcaccacgtcagctaaaaccgccatcaaaaccgctgagggacctaatctgcaccgattttgatagttgaggggcctgttatgtctggttttttggtccagggacgtaaatcggattctttgacaagttgagggacctcagatgatcttattcctcctgcggaaacatgtggcttttctgggccgttcagttctccacatcaaccttgtctctcgtaggccgaggccctggagaagtccacatctcgcgttctcgtggacgcacgccatcgtggaaatggaggactaaaagcaaacctcggttggtggcccaggcccagctgaaacgtcctgaagtgagggcgaatccttcgccgtcacaccgcgtcagcgcgttgtctcgaggcaggtatatgcaagggtggaaggcaacgggtgctctttgatctgatgatgccgctagctagggctcgccctacgcgattacggatatatagaagtatggtctgcctctgtccatgcctacttattggtatgggctactttggcctatccggtcatcggctaataatgtatggagggggctagctacctccatggaatagaaacggtgtcatattccctgtaaccgctctggccatctcgtcaagtagcggctggccagattgacgataacagatacgttggcatcgtccctagttcatggaacctatacaaccgaacttaatcagctcaagtttggttcatagctcgaggggtgccaatcatttgtgcccaagtggaaactcgccgaagttgtaggcgtaacaattcgagctatggtataaattgcacaggacaatattgccacaacgcgaccagtgttcatatgatgtatgaaacctagttaaaactatgtttggcatgtgtgatattatacggggttagtacgaaaacggtactagctagtaccatttcgtagagataataacattccacgattccaaccatttctttgtgacccctattactccacccatgcacccctcgcaagtcgcaaaccgtccagacatcggcagcgccaacatggctgcaggcccctgattgcgccgccagagtcgacacgagaacccgtgcggcatcacgtcggtccgggcgaaacgggggtagcaatacaatgattgagccccccgccagcggcacagccaaaaaagtctagccgccgcatggccagcccagcgcgtccccgtccccgcaggtcgctcgccggaaaacgaccgcgcgaggaggaagggcgcgcgcggaccgaatcagcgaagaccaacgagcgcgcatcgacaagccccctcgtgacaatcaactgctctctcgatcgagacgcggaggcgctgttgcacgtccacgtacgcctcgctcgctctggtctccgcgcagaaacggcgacaccctctcgcaaaaatcttttcctcccgtcaggatcagatcgaccgtcgcggccagtctctgatatcgatcggttggtcgactacgacgtggctgatcgactgatgagataataagagaatccccctccgcgcgcgcgttacgcgagtgtgcgctcctacaccgaggaggcaacgagacgcggatgtggtatgggtggtgggtcggtctatcgacgactcggtgtatacgatcgttgatagaaggtttgacaaatgcggggcagaggatgaatgaaagccagggggcgagcacgcaacgaacgcaacgcaacgcagcggtgcgtgtgggccgcagcacaactaccacccagatgctaacatgatgcatccgttgcttggatcgggccttcgcttcgggttggctgccttttgataacgacccggttgaatcgagcgaatccactaaaattatcgcaaatggagatggtggctccattattggacgaaatcaattttagacaagcgtccaaacacatatgtggtgtttaatacaaaccaaatcgtacatgaacaaaagaggaccgagtggagtgaaaaaaaaaatatggaatacgcaacgcaggacgtacgttgccagcggaaagtagacagtaatgcgtttgtctgaaaacggatcacattttacgtgcacacaacgaatgatggtggtatatatgtagattaatctagcaaattaaatttaatacagcatcacaaatagaaagttacacaagaattataaacaccgtaaaaagttcgaaatgtgccactaaatcctttgggcggttcacagttctaacggccagagacggggacttgagccggcgtagctcatgtgccccctgttgttggccatgccctgcgtacgtatgcgtgtacctcaccattgtgattaaagaaattatgtggtggttaacgaaaggcctctgaaattcaacgccatatatttatgtacaaggctcctttgcaacatgtagcaagttgacagtgtatagtattaattactcccgttaatcatcttgcagtacgactgtaccctgaggtgtacgtacagtacacttgtggctgacaatcataccaacggctattcgggcaactagaatgccaaaactggataggtgtgtgagcttgactgccatgttataagttgacatttcccgttagtgaaggtgacctgcataaaaaaaaagtgaaaaagatataggtaaaaaatgccgctatgtttcctcaggcctcatcagctaccatgcgcaggacacgcctgcatgggtcggacaactatagtcaacgacagatcaggattaatctagacatgagtagcactcattggacgtgtttcattttttttatcctctagttatccaattttgattggagtcaactgagtaattaaccaattagttttaggccaatcatacaaaaaaaagtaaccggaaatcaaggtcagtgtcatatattttagctcctcttataggattactccctccgtactcgcgaaggaagtcgcttagaacaatatttaagtcaaatcttgagaatataaatcataaataactcttaatttgttgagtttgaaaatgtaaaaaatatatgaatagatttgtcttgaaaaatactttcataaaagtatacatatgtcacttttcaataaatatttttagagaaataaaaaaatcaaagttgtgttttggagaccgtgtcgctgtacaaaacgacttcctttacgagtagagagggagtactatttttgcttggcctagctttaatttgctgatgtgtttgcacaagtgaggtcacaaggttggacagcagggacgtgtatgtagctaacaaactaacactccctccgtccccctaatataaaggattttgatattttattggtactgtttgaccattcgtcttatttaaaaaatttttaaaattattatttattttatttgtggcttactttattatccaagatactttaagcacaaattttcattttttatatttgcataaattttttgaataaaacgagtggttaaacagtgtaagtaaaatattaaaatcccttgtattaggggacagagggagtagtacgatactgtaatcctatttacaatggaaattacaaaactctaatcagtgccggttagtaaggggttgtttagattgaagacaaaataaatcttactaaattttggcaatgccaaaattttgataagttgacaatattaccaaaattttaacatgatttcttatgtatttatcaaagtttggcaaaaaaaacactaaatgtatgcacatctttggcaatcttatgaggagaatcatcggtagaaccgacacttatgggcctccttggctcaaaagaaaaagaagccagctcatcaagcccatgctccgagcagcccgaaccctcatctacctgttgacgactaaatttggtaagatgtgaaccgggtttgacattgagatcgaggcggattcgataaagagatcgattcaaagaacagagtatgcattggctgtgaaggcattggctgaagtgtgcatcggctgggatggatcggacagaggatagccgatacagccgatggaggtgatgcagccgattccaatgaaggtggtttcagggctgtttctagactcgttcaaagtatttcatagagattgccacgatggggataaagctcttggattaggcaattgtacctattaattaggatatttcgtgtaatttccttagagatatgtttgggcaaaagtttgccgcaaagacttatggtatcttagagtttgttagagatgagtgtcgtgtccggcaaggacatatcttgtatctcgggtataaataaaacccgaacccatgtaatcaataaacaatcgttcaatacaatctcggtgcatcgccacccttttttactttcgtttatttcgacgagttcttactttcgggttgagctgcatcgattcgattttcaactagaggtaaaacttgttatggcggcttgcgttatcggggttaatgcttccatctttatgacactttaaccctgtttatgtaattcgtcgagttatcatatacacgttgtaatctatgttggtcgcgctatataacttgttatcggttggttcttattgtaggaaagcaatcaatagagttatgttttgttattgatctagattgcattgtgtatctaccatctcttgtaggttttcatcatctcgcttagatatcatatttgtctttatgcttaatgctgcatcggttgagttcgatctattaagtaatatctacaactatgatatctggattgttttatgatcatcgagagagatagtatcggggtttcagccgatattacctgatttagctttatgttttatatgcttaattgatatgctgaatctgcctgttatattaagatcttatcgcaataaagtatattaggcttctgtttgatatattctatccgttttaatatcttaacataaagtggtattggagtactagccgatacatgctagatctatctgatcagctatgctatgagcgtttataatcttcacgttaatgtatatttcgatctaagtgatttatactgtctcagcatgatgaccgatctatcccaatcacttggtttgaatatacattgacagaaagattataaagcgttaatatctatagccgataaagtagatttagttttactttgcttatttataactgccgatcgattcacatatgacatcggcttgaaaataaatgacatgtcatcggcgactggccgatcggcttcgtttatggatttaaccgcggtttcttttgtctttatttcttgttgattgtaggatcaaatcaactggcacgctaacaaacctaaaggcaagattttggacctgcactgaagttaagcagatcttccaggccagtgtgtatttttcgcatcaacactacccccgatccccaactttagatcaagaatccacattcatttccctgatccccaatatcagatcaagaacatacaaaataaaaaatccccccaattcacaaataaggatcaacttcatagtaatctcctaatctatcctgaataaaaaatgtcacatatcaaaagaacatatggtgagttgagaagtccgtccatgcgtagatctggctgcacccaagggaggaagacacaacaaccagcagcccaagtctcccatgccatctcccaccgtacacccaacctcatccatcgtcgcgcttgagcccttaattgccaccaacttggtgatctccttctccttcgccacattggctagatccgggatcaacaacatgaacacaaaccaaataacgttgtcgaccccattggataagaaaatagcaacgaaggttctgaccagccaaccggatccatcggcggggaggccggggtcgccagatccggtgtccccggcctcctcgctggacgattcggtggcggcgatggcgcagctcttgtgaggatgcatagggagagacgcaccgacgcttcgtggcgaagcttgtgcttctctagctggaaggagtggcaccccccttttgggattca

SEQ ID NO: 10380 - DNA, 9775 bp, Oryza sativa
gggggggttggggtgctggttatggctgcccgctcggcgccggcgttggtggattcctcgtgtgcttctttcggattgatcgatcttgttggctgcccgctcgggaaatggcttggtgcgtttgcgtcaggagtggtcgccggctcggccgggtgggtcgatcgagttgtaggggccgccggccgcagcatcacatgctcgcctgctgctttgctttcatctgctgcgcagaggtaaaggggttattagtgaacggacaagatctacaagttttcagtcatgccggcacggactttccatcgggcctggtccagtaaaaaaccaaaaaaccgcgggcctaaccgcctaagtcatgtatgcaatcgttgtgtgggctagaaccaaactcctgcgctttcgaagcccaataccaaccgaatagcagcgacgacgtaacgcggcccgtacgcatgcggtccgctctcacagtcacagcgtacgcgagcggagcacctcgcggcgcggcccaaaccaaccaagtgcacgttctgcctgcgtcgcgtctcctacacgttgccccagctgtagattggcggcccacacgcaaccggcggccgattcggtgtcacccgccagttcgccaccgaggaggcgtcacgagttgcaatgaacgatgcaatggatgttgacgttgcaggctcagaagatgcaacgagttttgaagttttccggtcgcgttgcagctgctccggctttgctgacgcttttcttttgctactcgcctgatgatagaaccttataggttgacaacaacgagagcgaaacaaggtgcattgttgtcggttgtccgcttccggttgtctacgacgaacaggcgctgaaccgtggtggattcatcaacacgactacagtaccatctcacttcccttacgcactgcacagtggactctgccggcgctctctcgcaaagctggactttgcaacagtcgcaaactcgagtacaaatctggacttcagctggtgcaccgctgccgctagatctgtgaatgcaagtctgcaaccacaacactttaaggccctagctatcggtctgaaacagagagacgctcattcaactataccctgttactattactatatgtctcaactctcaaacttgcgtaaacttatcaaggatgtgcccacaggtgaacaggccacagtctacagattcttgtctttgtccggttaacaggccccgtatcacaaacgggtcccggtggggacaccgccgcagccgtcgatgggagcggatgaacggctaaaatgcatcgtgatccggatctcggccgggaccgctgctgctgctgcgagagttgtagtaaaatccagcggtcaggagctcaagaagcgaaatacccgggcagcattcaattccgctgtacgcccgcttggcagcgccgctgctgcaccaccccgcatccatccgctgcggccacgagactcggtggcattgcttgctggctcgcgcgcagatctggtccggtacgacgcgtgcacggtggtgggggcgacgcgtctgcacggtcgcgcgggctcccccaccacgacgcgcgcccgcgcccctgcccgatcgagcgccgggacggggacggagacgcgattggctcgtacgcgcgcggggggcatgcgtgtgcccggcgccccggcgcgcacggacgcggagacgcaacattttgtcccggggttcgggacgtgacgtgctccaccgatcggggttcttgtcgctgaatatcggtgaagtgtcggctcggttggagacgagtagccccggtgtcgagttactgttcctctctttggatttactctactggctatatataccgtgttggctgtttacccgccggtaattggaggtttgctacgatgcgtacaactactcaagcgagtaaaaacaaattcttttaccagtggctgcatccatggttgcactgcatcaaacgttcgtgcataaagctgagctcaaatcattacgtactccctccattcaaaattgatctacatatttcataggtacactaagaccaaaaaaactaataactctctcatactatatttattctagcaacaaactctatgcaccatccctactattttcctagacaatagcaaatcaatatattgcatgtgttataaatacttataaatacttgtgtgcatagatgcatgtatcaatgttcatttactccaatgcacaaataacgaatagacttaatgaatgaacacaaatatatagatcatttagtaataacctcaaaaaaaactatatgtagatcaatttggaatggagggagtagtatgtaccgctgtgaaactgtgaccactcctcatcccgagaggcgagagtcacggtcatcgtagggtacaaaaccacaaatcacgatgaaaaatgcgtgtgcatgtccgatgaaaaggaaagaaggaaaaaagaacgaaaatgatatacatatgaccctgttgtccggctactgtgtatgactctggtcacatggaaagacacagacggtaaaagtctcactccgtaatagaatctgacatacgtagtgatgccataacggagtcggacgctagtcgaacgctggattcgtatgtatagcagcgttcaacaaagaaatgcgtgtgcacgttcgattttaatcagcgaattattggtgtggaatttccgtgcctgaaacatgggcacgcatctgttaaataattaatcgactctcgggctcaccgctcacgcgaatgcaatcaagcgccaggtgattaacaccgtacaggggcagttagcacagcggagtacgtcacgattttaattcagggcttaaatgaggttctgactgccagcgtggaatagtactccgtgcttgtgagttttgacgtggagatggaagcttcacaagctagccttcgattgcttgtgcctggaagagaaaaaacaatttcagggccctttgaatcgtaggaatgaaaaaacagaggaataggaaaaacacaggattctgataggaatacaattgtaaaacagaggattgcaaaacacaggaaaaacacaggaatggcagtttgattggaccacaggaaaaacgcaggaatcagatgagagagatagactcagaggaaatgttccaagaggttagacctcttgctaactttcctccaaaatgtgcataggattacccattccataggaattttaaaggattggataggattcaatcctttgtctcaaaggccttcataggattttttttcataggattgaaatcctccaaaattcctacatttttcctacaaatcaaagtggcctcattttttggccttcaacctcacaagagccacagttacgtgacatttcctgcccactctctgccttgatttgatgttttattcgttcttggccttttcttaatagtactagaaacggttcctttaatggagtagtatagggtgtgttcagttgacgctaaaattagaagttttgttgaaattgaaacgatgtgacgaaaaaattaaaaatttatatgtttagaaaagttttgatgtgataaaaaaaattaaaagtttgaagaaatagtttgtaactaaactcggccacagccgatcgatcaaacaaggatctcgtgtagtagtgttgaatctaattatacattctatacacgccaagtaggaatattgtatagtgtagatccacggctcaataatgtctccatacacatatataaaaatcgattagtagtactaggtgcaacgaatttccacggcgcaacatttacacctgatgttcatttgtaacattttcccggtccacagagcagtaaaaactcaggctatgcacttcatggcttctttatttccttgctccatttgggttgccctcgcagcaaaaccggcaagtagcaacagtaacctagacgagagcagcatgtctccctgtaataaattctgcaagcaaactaagcacaatatgggctctctcgcagtagatgagctctgtggcttgcatgcagtagtatatttgccaattgcaatgcaagcctgcccatggcatgcgatcatcttgtgcagatgacacaaacaatatcaggtcgcccttgaagcaattgcgtgtactaaaaaatggcaaggctgttccgtcgaggagcgaggaatacgtaagaatctactcctacgtacccagctgccatgctgctgcagccatgcagagcaacagaggggctagttgtctcgtccatccatattcactgagcggccatgaagtactattcacttctcacgataaattacacagaccgtagagatatgcgtgttcatccagctagccttgcgtgcgtgagaattgtcagagacatatagtagtactattaagttatttaagtgtgtttttaggtgttaataacttgcagactggtcccaggaaatctatatggttttagggtgtgtcttagcagtattgaaaacagtgcgcttcttcttcttctcttcttggctgaccctaagctagcttcaaaaacaaaacagtggaaaggggcagtagggctagcatagcacatgcatgtataaaaacaggagtttaatttgtatcattttccaaaggaaaaaaatgcatttggaatgcttacggtgcatgatacgtatatgtggatgtcctgccaagaatcccgcacattacgattgatgccgtattgaccaatccatctcttggtttttggagctaacaataatgccaacgaaaaccggcagattctttttgcgcgcccgggcatgcacgaaacatatccgtaagcatgtgaaagggtatagtataggccaccggatcaacaacagtagatagtacacatacgtatatacgtcgattcgattattactgtggcattaatttaccacttcagcctcagtgtactgcaacagtgagtaaaaataatctcttcacactgagatgatcaaaggcccaagattaattaataaacacgagcatatgcactttgaggatttgaaaagtctggattttcagtttgttttccttctagttcattatttggatataattatgggctctttgaatctaagtaagaatatactagctagtagattatttaggttgtgttcttttattgaagttaccaactcaacaactctcgcctttcttgtacacgctttttaaactactaaacggtgtgtgtttttataaaaaaaaaatacgtaaattgcttttaaaaaatcatattaatctattcttaaaaataactaatacttaattaattatgcactaatgagtcggtccgttttaacgtgcatgaaagattagttcccaacgccttaaaacgaatacagccttaaagagctaaaattctaggagaatttgaggctgccagagcctagaatccctctggacacggcctatgtacttcaggaacatatcctatcctatatgtacacaagcattctcgtgcacactaactaataaattcccaaaaattctttaaaaaacacatatgtatttttatagtattacatctacgtgtaaagtttcatctttaaattcatcatacataaaatagacttatagtcttaaaattgtcagtttttcttaggactaaaatataataaatttaatgttaacatattttacacgtaagtataatattattgaaagtatatgcacatatttttctaaatttttcgataatatttattagttgatgtacgcgtgaagcttatgtatacatgatatattatcgtgtcactctgcacagatatgcagcagtactcttttgtctgcattaagtttttttctgcacgtatatactactccctccgtttcaaaatgtttgacgccattgacattttagtacatgtttgaccgttcgtcttatttaaaaaaattaagtaattattaattcttttcctatcatttgattcattgttaaatatatttttatgtaggcatataattttacatatttcataaaagtttttgaataagacgaatggtcaaatatgtgctaaaaagtcaacggtgtcaaacatttcgaaacggagggagtataccactaggagattactgtgccgagctagaaccttaaagatgagctagagtaagtaatcagtggaggagtattcactaatcagctagcacgggtgcaacacgctctcgtgaccacccccccatcccctctccttggctcccactctttaagcggcccttgtcctttcagctcctcggtccctccccctccatctcactcccttatatcgctcgctcactcgctagctcgcaccgcgccggccgggagcacgcacgcacgcattgccatcgccgtgcgcggaggaggagaggagatcgaggtctcgaggtcgttggttggttggttgcatggcgagcggtggcggggagcacttcttgcggcagctgagcgcgagcaacgggggatacggtggtgcggcgcagtatcagatggggcgaggggtggtggcggaggaggaggtggagctcggcggaggaggcaggaggaggggctcgaagcggtggtcgaagaagagggcggggaggggcgggtacggcggcggcggcggggggaagggggacgcggccgcggccgcggcggcggcggcggcggtggccgggaggaagcgggtgatggtggtggtggacgacacctccggggccaagcacgccatgatgtgggcgctcacccacgtcgccaacaagggggacttcctcacgctgctccacgtcctcccgtacgccggcgccggcagaggcgaggagaccccctccctcgccaactccctcggcacgctctgcaaggcctgcaggccagaggtagcgtatacgcgtatacgtacatcatacgtgcatgatgtttctttttttttctttattttttttagagggatgcatgtcattttgtgtgctgtttttacttttgtgctctaatatgtgttttcaaattacaaaattttaggcgcttcgattagagaatcatgtgtctgatctctgctgtctagctttggtcattctggatttggaagcatctgcttggaggcaatgcacgagggaattattactgctagctcacaaagaattagaaaaaaaagcttttgttagtgtactggctcatgagaacttgactaaactgaaggataaaaataaagtataatttactgtacggtttgtagagttatcaatcctgaaggtcacctgagagggatagttgtaaagtattatttgttgggggacaatcatacagtagatcagatcagatatcagaacatacatgaaaaggggatcgtattccacttttcatggatgaacggatcttgcatcttggcaggccaaaaaggttcgagtctttgataaaagttaaaaagtactacctccgttccataataagtgcataagtgcagctccgttccataataagtgcagccataagtttccgcgctcaactttaatcgtccgttttatttgaattttttttataattagcatttttgttgttatgagatgataaaacatgaatagtactttacttgtgacttatgtttttaaattttttcaaaaattttttaataagacgaacggtcaaagttgggcgcggaaaaccatggctacacttattttgggacggaggaagtaattagaaaagaacaatttgtggggctcatgctcatcccaggttctaaaaccattagtaaaatgcatcagtaaaatcctacctaaaccggccgtaaacaatggcattatgagatcatatcatcattccttccttgatttgcttgcattgcttgaatcaaaagtcagcacttcaatgtagtagtgtactactagtagtacatccctgcgtaagagcaacagtaccgtgcatgaagccatgaactattcctttgtcctactatagcatgtgcaaaggagggctcatacgaaatgggtgtgaatgtggtaggtggaggttgaagcacttgtgatccaaggaccaaagctggccactgtcctcagccaagtgaagaaattggaggcgtctgtgcttgtgctcagccaatccaagccatcccatttctgttggttgagttggtaagcatttctcacctcctaccactgtagctctatctttctcatccctattggatgtgttaaaaatgtgaggctcaggtcaactatgaatggaaactggcggggagaatatagtatcatggtgtcagtcagtccctagtgttattttaaaacaatgcccagattaatgcatatggctaggttccaatagaaacctttagttgtacatcattttttatatcgtacaagtatcagtttatcaggatacataattaccactagatctaaatttatggggagagatctggtcatcttttatgataagcaggcccactaacaagcaatgagtaaactgtttgggaaataatcctccttcaccaccgttcaatagcagggtcccctgcctttcgggaaaataacaccaggcagcagcctccatgtgctatccataaatcacagatgctttccttgtccttttttggtcacaactcaaccaaatgaaagcaagactcctacacttcactcacctaatttttgctacgttcacgtggacaatgtaacaatcaccatcaccaacacattgaagttgagtcaggaaaagttactttcatcttgtcgtaaactatagctatggtccttgttgagcaaatgcaaatgtctgcctgcgattttacagcatcctgcggagcagcagcgaggagttcgtcgagcaatgcatcaaccaggctgagtgcctgacgttggcagtgaggaagcagagcagggcgtcggcgggtacctcatcagcacacggtggcagaagaacttctggtcctggcttgacaaagccaaggactattcaattttctgccaaggctttcaagtctctacataatcatatttttacccccgtatatctgccattctgttttaactgagtgcgccataaaagcctccccgctgccatgttgcgtcaccgtgcaagtgttaccatccgttgtaaagcccaaaggagccctagatctgaccaaaccctacttcccatcttcttttcaagttcagtttgtgtaatcttgtgctgtactattgtgtaatgttgcataaatggccgttttctgttgtcacgtgttttacacttttactttcataacaactcctcaacttaacactactgctacaaaccaagaaatcaagagcaacatcaggttattttccataactgaaggtcgcatttccaatgcaacagctagaaacatgaagatctaacagctagtaacatttttagttcaaatcttgaactggagtgtggctactgaggggggacctcgcttagctctctctcacttaggagcaggagaggacgagaggtgcagttgcattggttggtttcaggcttgggcgtggtcctctttaccgctattctctgaatcctagcacacacctgcccgtggggcaccgccttcaatggtcgtgggcctagggggcaaacaaccaggcaaggatcaagatccccagtttgccaccaatagcctgatggcaaaaccaacctcctcaaaatattgcagctaatgcttatggtagctcatactagtcatactacatctcacacttctcacttaaggactggtaactcacaatttatgcacagattgttatacaatagatagtagatcattttttttaagaaaatggaaatggtttacatctccagattctaccataaggcgcacggccaat

SEQ ID NO: 10381 - DNA, 16694 bp, Oryza sativa
tgaactgaattcaaacttgcttttgttagattttgattctaggtatatagcatccaaacatataattagttaggtatgtaataatggattgtgaaataaagttaaatttgagttgttttgttgctaggtataggtatgaatcgaatacttataagtaggtatatactcacaatttgaaaattttgaaaaatttgggtgaatttgtgtatttcataccatggtgccccatatgagtgtcctatatatatatatatatatatatatatatatatatatatatatatatataatttgaaaatttttaaaaatttaagagaatttgtgtgttttataccttggagcccgggcaccatagagtcccatataggtatcatatatatatatatatatatatacacatatacatacatatacatatatatacatatatacatatatatatatatacatatatacatatatatatatacatatatatatacatatatacatatatacatacatatatatacatacatacatatatatacatacatatatatacatatatatatatatacatacatatacatacatatatatacatacatatatatacatatatatacatacatatatatacatatgtatatacatacatatatatacatatatatacatatatacatatgtatatacatatatacatgtatatatatacatatatacatatgtatatacatatatacatatatacatatacatatacatatatacatatacatatacatatatacatatacatatatacatatacatatatatacatatatatacatatacatatacatatatatacatatacatatatacatacatatacatatatatatatatacacatacatatatacatatatatatacatatatacatatatatacatatatatacatacatatatatacatatatatatatacatatatatacatatatatatatacatatatatacatatatatatatatatatacatatatatatatatatatatatacctaggtgtctatggcattaactacattgctatgtaggacttttagcttatgtggcactatattaattaagagagagagtgaagagaggaagaaactgggtctcatgcaagacacagcttcaacacgagaacatatgtactagacactatcaagttttgcattgggagaaaatagtgtctttataatagatgaagaataaatataattggtagaaaagagaaatgttgtatttattaatggcccactttaagaaaccataggttgtagagtgtagtttctattgtgatgtcttattaacatggcaccatagacactgcttatgggcactatggtttggactgccctaaaggaagtcgtttaggataatgtttaagtcaaaccttgagaatataaataataaataactctcaagttgttgagtttgaaaatgtaaaaattatatgaatagatttgtcttgaaaaatgctttcataaaagtatacacatataacttttcaataaatatttttatagaaataagaaggcaaagttgtgttttggagaccgtgttgctgtctaaaacgattttctttacgagtacggagagagaatgtaccaggaactatagtctatagtaggcaaagttgcggttttccatgtgaaaataaatgtttcatgtgtttctccgcatagaacgggccagttcttcaatcactacccacgtgtgtaattatccatttttattttgttattatactattaacatatctgatgatttatttatacatacacatgttgattgggacctctcacatggtggtacttctaaccacacaagaatgtgactaaaatacatttaaagatgaattccttatatatatatatatatatatatatatatatatatatgctgttgaaaatttacccaatcctttgttagtgagacatatcagcggcttagaaaagatttaggtgaatttccagtgacagagaaccagaaggaatgaaaatgatacgctgaactgacggtatcagaaaaggtagaattagtctaatttctccttttatgccatttgttttcctagtaaaactactgggctacatgctgtttcaccaagcaccttcacttaccaatgtttaaatcaagaagcctggaaattacgcacactcgatcgggtaaggtttcaatataatggaaattttaggagatttacttatttatgtattattggccctccatctaatcgagtatgaatttagggggcatacaagtagctagctatgtgtgtgcatatgttaatccaaaaagtaattttctaatattacacttttttcttttgtgcaaacttcttgtttgaatacggaataaaatctgtgaacaaaatatgaatgccgaaagcaacatagtactcctcttatggcctgtttgaaacattaatgcatgattaattaattgatcagtagcatattaatcgcatgtaaaactgattaactcattaatgcatgattaattaaatagtaactattgtaaattttaaaatagattttttttctatttttttaagagtactatagaatttctttacaaaatacactagttagagttgaagtcatgaagcacactgatgcatgtaccaaacagcaatatataatgccagcacgacagatatatatttggattcaccatcggatcacacatatcggtatcctcggaactgcaggaatgaatggagacatcatgcacaaatatactcataccagcagatttctaatcaaaagagccccggcaacccagcgaaatgagtaccccagctagctagctagccaccaaagttcagctaccatcgtcggcagagagaaaaaccacgccccagatcaatggtttcccagatgatgatgcatcaagcatagcagctagcagcctagcacatctcgtcggcgtagcgagtttggttacgttgcagctaccggtgtggctgtgtgctagctacgctggcctcaaatatcccccataacgagttgacgacatgagcgacagccacgacgatgctctggcgcgcgtagtggtggcggcgttttttctcagatgtacgagcacactgcacttgaatctgccggctggtccgaccccagtggaagctccatggacaccgtttctgaactcatctgaagccccacgtaaaggtccaataatgcaaaaagtctattcgtggacgtcctcttatttttatataacacgtaaaagttaataatttttttaaaaaataataataagataaattaatatgtgatatatcaatttaaaaaatatgactttaaattcaacttacataagtagaaaaaatgatttcgaatagaataggtaattcatagtaatatttttccttcaaatcatatggatcaaaattaataaaaatgatatatgtacaaccctaacattcgactcctctatacgagcagggctgagtcttattatcctcgtgttaaatatagcttatatcgtgatgaagcctgacatgcgcttgctagcgtggctcatgccattacgcagtcagataacaatcgtgcgataatgtcgtacatatatttaacaactttctaaatataaacttatatattcgtgaatggtataaatatatacaccatatattgatctatcttaccaattatatttaaaaaaaatgataactttttagatgatagaagacgtcccctcgtaataatgcataaattcatctcccaataatgcatctcggtcgatcagcttctctcaaccctctgcaataattcccttgctcagttatgcatgcagtagaaaccagaactctctgcgtcaattaggtgcctaatcacaatacacgggccgacagcgcagcacacacacatgcaattatgcgcattattgctagctaattgacgcaagaggagactttgagaggggagtgcaataatgcaccctgagcaacaaatcgatatctctcgggtcgtcgacggtcacgtcgatcgccacatgatctgttctcgtggggggggggagtcgtcgaagatcgagtggttactaccgctttccactacgggggagattcaggcggtgggtaggtggcgttgctcctcgtcttactcttgtccacggttggctaggccataggatttgcgacttttgacgggcagccaggagaagattgacacatgtgcgaactaattggaccagcgacgagcggcgttgcttggtagttagcgagtagctgctactgagctagtcttcgggcagaatcaagaggtcgactcctatttttgttgttccagtcggtagagtactaatgtatacaattcattagcatataatcctccattctaaaatactccatgcaattaattagtacctccccatcttttacttttttaaatcatccactgtcaaaatctctaatcccattaaatgcatacatagtatttattagagtatgattcattcttagttttgatgttaatggtatttacgtctaatattttagaatagataaagtactcacatgctctttctagcataggttgttttagctgtcgcacaactactctttaaatatgagttgtatcaaggctttttttttcgtatttttagctcttttatgtttgtacataatatttgttgtgttcaagtgtcgtatatatagtaccaatggctaagtggaggtgtttttttctttctaacataggagtataaattaagggcataactttggacaaccttttagccttttttttggacaacagtcgtatttggaatcaaagtgatgtagtcttgtaagcaaaagtatgctacttttatcatacaccttccggttgtccaaaatattcgccatcaatcttcccaaaagttttggtgtcatgaaaaacgtttgtaaattaaaattttgagaatttgtcaacccttatattatattactagcaaaaatccccgtgcgttgcaccgggtgattacagagtatgtatattgaccaaaaatgttgtttggtttagcaaaagtgcccgtgcgttgcaacgggaagcgtacatatcagaaaaatatgcaattaattaaaatacaaattcgctgaaatatttggtatttttaagtaggtatgtgtataattaaataaatttacaagtaaagcaagtgtgagaaataaaatgacatggttaaatttaattttttaattaagttctccatgattagttatgctctttgaaattttattggaattttcagagcttaattgctaattttaataatacaaacatcatttaacaattatttaattaaaaaaagcaagaaactacttccttttatgtttgcttcgaattaaacatattcaataactataattgttataatgcttcggaaaaatgaagtaccaaaaatgaacttcttctatttttcttcggcccgagggacctaaaatagacttatttctgtcccttccgattggcccacggccttttgaaaaccctaaccctaatcctcccccaccccctccccctctcccccagccgagccggtcgcctcttccactcctgacgccgcctctccccctctccctctccccaccggcgccgcttcctctcccctcccctccggcggcgctgctccctctccccatctcccgcctctccccctccccccagccggccgcctctcccaccaccggcaccgcttcccttcccttctccctcccttctcgccggcacggcgcagcgatggagggctgcggcggcggtggcggcgctgcccttcccccatgttagcagccgcggcttcgcccacggcgagcggcggcggctcccttcctcacgctagcggcggtgacggcggcggctctccttcccgtctcgccggcacggcgcagcgacggcggggtgcggcagagatggcggcgacggccgtccgtccctctctccctctccccgtcggcctcgacggtgacgatggcgtcggcttcgtccgagggaggatctgtcggcggtggtggccaccacaggcggatccggcagcagcgctccctccgccgcctctcttctcactctggtggcggtgttttttttttgcaatttttttccatggctattgctaaccgaatcggattgtgtatggacgaaaaacagacgaaaattagatgtgacgaccggaaaaatacgaatatttatattagttattgatatggtgtagcgcccgttccgtcatggcgcctagcgggaaaattatctcttaaaaactctatttgcgaaatctgtttccttgcttgttgtctagtgtccgtgccatctcagatgtcaaatcctcgatctatcgtcaagttcaatcccgaatccaaatccttcccaaatcaaatccctccgcaaaagtctattttgcctccctcgggttcgatgggccgaatccctctcggcccatctccctctctctctctctctctctctctccctctccgccgctctgcccgtgcgttgcacacgcgtgcacgtgagccgcgccgagccgagcgccctccgccctcgctgccgcttcccgccgacgccgccgaaatcgccgcgccgcccgttgcttcccacgcgcgcgcgcgccatggtggccgactgcctggtcgctgccgcgcctgcccgcgcctgccgcccgtgtcgccgctccgctccacaccgccccgccgtcatcgccgtcgtcacgacccggcccccgacactccacgcgctagcctccaagggacggaggcagagctcctcctccctctgccgcgtcgcccccgctccctcctccttttcccaaagtggcaaggggcaagctccctttctgccttcctttttccttttcccctccccgccggcgtcatccgcctctgtcaccgttttggccgcgagcgccgagcgccagctcgcgccttgaccgcccaaggtcggtttccaaaccgacatcgtcgtcctataaaccaaggcgccctcccatcgattcctcctcccgtttcgctcgccgccaccgcgccattgccgcccctctgtctcgcctccgccgttcatcgccaagcaccgggagagccggtgcgttcgtggacgcggaaggggactccgggagctcgtcttcctcctcttccccggcccgaggccggagagatcactcccgtgccgtcggcccatcgtcactgcgccccgtccgcacggtagtgcatctccccgttctccctcctcaatccatctcttccccttagtttttggtagtagcatgtgtagcctccccgtagctagccggcgccgccccgactgctgtcgtcgctcgccgtgtgctcgccgccgtcgccgctcgagctcggaagcgcctcttgtcgccggcctccctcgatgcgtttcctcctaatccggcgcaagggatgggttcccgtatccgagtagatgctctcgccgccgggaatcggcccctcgtgacctcatcgccgtttcccccttttctctccgccggttgccgccgccgcaatccaccgccgtcgagcatcccccggtgaatccgagccgttggctcgtctcccctcgtcccgtgcaacctcccggtgtgctcgctttcgcctgtatcgccatggttcgctccactgctcgccgccgtcgtccgccgtccgttccggccggtgtcgtcgtctacctcccgccggcccgcgtggcagccatgtaggcgccacgtcggcgccacctcggccgcgaccgggtcaagcagaccccggcccgccgcttccctccgcccctcgcgggcgcggtccaccgcgagccgtgaggctgcgcgtgggcacgccgcaccgcgtcctccgtgaaccgcgcgcctgcgccgcgcctccctccccaaaccctagctcgccccgcgtgcacctcgctcacggtgagccgagtcgccgacaagcgggtcccacccgggaccacgcgggatggacccggcccaccggctctctctctctcccctccccgcccgcgcgcgcgccttgggccgccttcttgggccggccggcccattaagctcggccgagccgccccattctctcgggccgcgccctagccgcccgtggaagtctaattttcctccctccttcttttcttttcttttctttttcaaaaaggatttaaataaatcctttttcctttagaccaaaaatccaataatcttagaaattcaatatcttcccaaccgtaagtctgtttgactccgttcaacttccaaaattcctcaaatctcgagatctatctaatggcacgcttagaggtcattaatagggctttattttcgccgtttgttgagttgtcccatttcgcgtgtagtttcggagcccgaagacccgcagtgcgaggatttcgaggatcaagctcaagatctcgagcaaggcaagccacctttgaacatcttgagcctatatttgaacttaattatgttgcttgaaaaatattatgcattgataggatcgcacttaatctgcttgtcccgtctgcaaggcagattggcggacctacctaatttgttgcatttgacccttccattgtaattgttataccatgttcccttgtacccacctagttgcgcctcggtaatcgtgcactctgcacgggtatcgacgatcaccttcaaacttaaaatctgagaaacatcttgggtaaaacttgggttttacaaaagacttggaaaacccgacacctgggtcggtgcttgcgaactaaatgaatttctaaaaccgcggaccggggaatgtaccgggtgtacggtttcccgctcttgcacttaaggaccgtttccttggaatttcatccgaacataagacaagtacgaccacatgggtggaatgggacacccctggctgagtaactagcttatcgggggagccatgatgctaagagacatgtggattcgccggggtggtgtcggggaggacccctgggcttcctggcacagtatggtctgggacctaatctggtgttggtctgggacccctctcgttggcatatggtgaacctgtgtcggctttcgaaatgccttgtcatgaaagccttaaggtctctagtcgtggccgttctgcacgggctggatgatccgggttagtaatgtcgtgtgggtaaagtgtaccccctctgcagaggttattaaaactgttcgaacagccgtgcccacggtcatgggcggatgtgaggtgattcctagcgtagttttgtttgactactgccttgtgaaatttgctgttgtggaatgggcttgatgtttggaaaatcggcggctgatgggatcagccaggcccgggtggccatttgaaagctgttggccgggtgccaatcttgatcaattcaaaagactgaaacattgcacatactccgaccggacgagacgcactgtctcatccgtgtcatttgagaagcactcccttagttgtttcggaaaagagtttaaataaaatcaatcgcaaaaaaaaacaatagcctttctttgaagcatgcattaaacacttatttcccatggcttgctgagtactcctgtactcacccttgctctatataaataatcccccccagttgctgaagaagatgaagcggatcccgctgacgaggagttcttccaggagcaagccggctacgatgagttttagggtttcggcctagttcccaagtcgcgcctgtgatgtgtggtccaagtcttggcttccgtttccctttcgtaatgcagttgtgagctcgggatctgtccgcagcccaacatgactgtactcctactctataataaagagacctctgttgctgtgatattttgtcttcctgtgataccagcactgtttcctgggactggtatcgattaacaggttaatttggagcgtcacgggctagttccactcgggactagttcggggcgtgacatatggtttggtatttcatatgtcaatgacatgtgaattatggtccatttcacaaacacacagaagtggcaaatcacttttatttcaactactgctggaagggcaaatctttaaatatccctttggaaatttgtcgctgaaaggaatttttataataccaaaatttaggtattatgtaaatctacaaaaatagaaggtcaaatgtctcatggttgaaccggttgtaatttatttttaatttttttagtaaaattatataactgtgggagcttccctacaatattttccttaaaataaatatgtcaatggatcattttccagatgcgtttgtggtaggcagaaagagaagaaaagatacttgtttttcatttgcatattttctgaactattaaacggtatgttgtatattaaaaaaattatatagaaaagttgctttaagaaaatcatattaaactttttttaactttaaaacagttaataattaatcatatgctaatgacgtaccttatttcacgtatcttttcaatcttttttctactccttgacacataacaggacaaagagagtaacttttgtttcttggcttattaaaaaggatatctatatagcatactccatccatttcgtaatatttgacaatttcaactaaccgttactctaatttgaccactaataaatcatttgatcacgatgaacatacacgctttatatatatattaaatagttttctaggttggcacgtgcgaattgaaccagcaagcagcgctgctgatctagtcttctggaagaatccagcgcggtagagtacaaatgtccaaattcattactccctctattttactagttaaaacatttttggttcccataaaaatatcctaatttttcatctactttctcttctaaaaaaaaattacgaaaatcatgctataaatcatttgaaatttaacattccacctcataagtctttttctttgcaaaaatacctcagtgtgcacgtgcttaaccaaatcagccgttaacacttagagaaaatcccctatgtacccatgaaagttcacctaatcccttctatatccctgaattttgttcaatcccctacatacccctgaattttagtttggatcccttccatgccctttccgctagttgaccgttagttgaccgttaaattcttttgaaaaagtccattttgccctttgctatgaagaaacataataaattaatgaagtaaattgttggaatataaaaatttatcggatgggattattatatttatgaatatgtgatgcaccatattatttgtgacaagtttatttttacatatgatataaaaagttaatacttatttattagttattaaaagttctattatgtagcatatgtgttttcatagtaatacaacaaatttgtttattactatcagaacacatatgctaaaaaaaatcttttaataacttaataaataagtattaattttttatgtcatatatacaagtatatttatcgtaaataatatggtgcataactatctcataaacataatagtctcatataacaaatttctatgctgcacaatatactctattaatttatatatatgcttctttataccaaagggcaaaatagactttttcataagaatttaacggtcaactaacggtcaactagcggaaagggcatggaagggatccaaactaaaatttaggggtatataagggattgagcaaaattcaggggtacagaagggattaggtgaactttcagaggtacacaagagattttctctaacacttatgtagagtccactgtaggctgagctagctgagtcaatcttattaaagtgctcacattagatctattcttcatgtttcattgatttttttcctgcatatagcaaaactgagtgcaacaacatttaagctctcatcagcaatctatttatgcaatctctaaaaagtgtgttaagactatactcctaaatgtatttaattttggtaaaagccacgtaaatgcctcacaatttttaaaaacatatcgattcaggtaagcacgtgtgcacaataatgatttttgcaacgaaaccgagtagggagttggcatttgcaacaaaatgatttatggagtggaatgtcagatttcaagtgacttctggggtggttttgcaattttccctcagtcaatcataatcttcttctaattattttcacatattttctcaattctcattaaagccttcataaatgcttatattttaatattgatgggagtagctacctctaccccgacctcatgttgtacagagtattactctctccgtccctaaatatttgacgccgtttaactgttgtaaacatatttgaccgttcgtcttattaaaaaacttttgtgaaatatgtaaaactatatgtatacataaaagtatatttaataatgaatcaaataataggaaaagaattaataaaagtatatttaataatgaactaaataataggaaaagaattaataattacttaaatttttttaataagacgaaccccactcccctccaaagttttgtagagtctgttacggtgattaagggagtatgttaaattaagagcaatgctacacgtactaaatttttcttactaaacttttactaacaatcatctcaaccgtttgatttaagtagatggaagttacaaaaaatctaatgcactcatagcatgacacatcagtgttagtaagaatttagtaagaaaaagttagtacgtatagccttttcattaaattaaataggatgtggttatggttatggagacgatagagcaggtgaaaaaaataaataaatgagaggggttggttgagatcagagaataactagagaagttgctattatgcgataaattttgcactaagctagctctgtgattgtcggtattagtccaagataatgtagagaggattggcttcttatttctctttgcattttctttgttttttttaaggaaccctattggctttgcttactattttgaattttataaataaaaagaaagtttttgttacaaaccagaaaagaaaagaattcaaaattttatatagccaatctatcgtttttttatcaatcgaaaaacgtgattctctttaaccttatttgcttctagattccatagctgcgtgattctccttctttgatgtaaagcagtaaaggcatacatacatacatacatacatacttacttatcagcgacacacgtgccagtttcatctttctctcatagactatggtatgtccttttctccaaccaaaattggatgaacttttagatactcgtggcacgcatttcaaattgctaaacggtacgttttgtgcgaaaactttctatatgaaagttattctaaaatataatattaatccattttttcaagtttgtaataattaaaactcaattaatcacacattattaccatctcgttttacataaaacacttaatttttatcttcatctccatcttcagaagattccaacaccacctatatatcactagtttacaccaaagttcatcgttgatgtagttactagtgtactacagtaggcgttcgactaatccatccataagttaattgattgggggaatttttttttccaattgcaatcagcttattgttgaatagtcctacattggttgtggaagggcaaaggacctaagatataactgggggagcccctcacctcaatggctagcttttggggtgggaaaggccctttacgatcctacaattggtatcagagccttgttttcctctttggatttttatcgatctagagtttttgccatggctactcccgctaggttttcaactaagcctcatgttttcgatggaacagatttttctcattggtgtagtaggatgcaatcttatattatggctgaagattatgatatttggagaaaagtttctcatccttatgtgattcctgaagctattaatactgctgctgaaaaaactgcttttgaaaaaaattgcaaagctcccaatattcttttgagtggtatttcttgttcggattatgatcgtgttgctcatcttcgaactgctcatgagatttgaactgctttgagtaatttcatcaaggaacaaataattttaaagaaattcgtcgtgatcttttcaaaaaggagtatattaaatttgagatgaaacctggagaagttttggatgactatctttctcggtttaataaaattttgagtgatcttagatctgttgattcttcttatgatgctaattattcacaatatgagatttctcgccactttttgaatggtcttgacatgtctatttgggagatgaaagttatatctattcaggagtctgttaacatgtctactttgactttggattcactttatataaaattgaaaacacatgagatgaatgttctttttcgaaaagttgattctaagtcgagtgctttggtttcttcttcttcctctttggatgttgatgcttcttcatctaagtcttcttttcttgctgtttttaatgccacctccgatgatcaactcgaacaaatcgaggaggaggatttggctttggttgctaacagaatttctcgagttatgaataatgccaggaacaggaaaagaggtggtccaaatcgttgctttgaatgtggttcaattgatcattttcgtttgcattgtcctaagcttgggagaggcaaaagagaagacaaagatggtgagaagaccaacaacaacaagcccaacaacaacaagtcaaagggttcatcccaagggaggaagctggacaatctcagaaaggcttttcaacaagtttgcgccgtcttcgagccactaagtgatgtagatggtgaaagtggagatgatgataagggaaagaacatctccgatgtttgcttcatgacgcgtggtgaatctgacacagagtatgaagataatgaggtaagtgcttttgaggaagctattaatattttgagtgaaaagaataagaagtgtgagaagatgtatagaaaacaggaatttatcattgaatctcttaaatctgaaattgctagattaaaatctgttattcctaatgatgatgattgtgaaaattgtgaggttttaatgaacgagatttcaaaaattagagatgttaatgctgcacatgatttgaaaaatagatcttctcttgcttgtagttttgctttggacacacgcactttggatgagttatttttagctaaaaagttgttgcaaaaatatcaacttgcttttcatgctagtttgatgtttaacatgatttctgctaaaaagttaaaacaacctcatgatgttttggattgctcaacatgtaatttgaataagttgaaattgaaagatgctttaggtcgtgttgagtacatggaagatgttgtgaaaaacaatgaagggctttcttgccccaaatgtcgtaaaagcaaaggtatcatggtagattgtgaaaattgtgctaatttggaaaaagaggtttcttatttgaaaaattctttgctaagattttctgatggtaaaaagaatctcaacatgattttggatcaatcaaaggttagcacacgtaaccgtggtttaggttttaatcctattgctcataattctagacatcctcctgttgtgttaagtgttggtgctagaggtggtgtgattttggttaaacctgatactaacaaaactatgtttaaatctgctggtatcatgtctaccttgaatgcatcttcttcaaaatccaatgttgtgcatgcaaaatctcctgttgttgcttgtgttgctaaatcttctaatgctaccaatgtgtcgaatcatcgtgaaaaatatacttgttctttttgtggaaaagatggatatattgttggtttttgtttcagattagctcataaacagaaaaaggagagagaaattgcttttgcaaaatcaaagtggcaaaaatatggttttccctcgaggaaaccggtcagaccgcagtgggtcccgcggtcagaccggcgaccggtcagaccggcttctaagcatcggtcaaaccgggcaccggtcagaccggcggtacagaagcggtcagaccggcccccggtcagaccggccactatacctcggtaagaccggcctcggaggaatttttctgaaaattataaaattgattttgcacgtggatatatgcctattggatcttctggtcgtgtatctcagtactggattcctaaatttttattatcatctaaccccagtactgaggcttcgacttctgcttgtgtgtaggctttggtggcaaggaaggagaacgtgtggatcgtggattccggttgttcgcggcacatgaccggtgataaaaattagttctcctccctaaagaaggcatccaagactgaatcgattatctttggtgatgcttctataagtgccgttcttgctacatgtttggttaaggtaaatgaaaattttgaattgaagaatgtagctttggttgaggacttaaagtacaatttgcttccagttttacaaattgttgatgaaaattttgaggttcactttaagaaaactggaagtaaaatttttgattattgtggtgattctgtgttgaatatttctcactatggaagtgtgtttaaagctaattttgaaattcctatttcacctgtgataacatgtttggttgttaagtttgataaagatgtgatgttttggcatcgtagacttggacatgttggttttgatcatctcactaggttaagtggtttggatcttgttcgtggt

SEQ ID NO: 10382 - DNA, 38781 bp, Oryza sativa
tcgcctccactcccccactccaagcccacctccacgccaagaacgttcacgcaccacctcgtcgacctcctccactcgccgctctacctcccgcgccgcctcaccatctcggacatcgcggtgcaccggtggtcgaagcgcaccgcggtggcctccgcgctcctctccccactcctccttgccgccatcaccgcgcgtcaccacaacaaccaccctccagtcctcctcaccatctcgctcgctggcgtcctcctcgccgccgccgccgcggccaccacggacgccgcctccccacccaagagccgctcatcccgactcccagcgctctggtcgtacgtgctcgcacgcgagctcgtctccctgctggtctcactactagaaaaataatttatcgccacgaaaaaaaatagtagcatcaatgctaaaattgtggcaatagatacacgttgctacaatcttaaaatcgttgctagccgtggtaataaatagcatggtaataggttattgcaacgatttttatttagttgtaataaaatttgatattgccataaaatggatgtggcaaaaaaaatatatattgcaacacgtcacatggttgcaataaataactattgctaccactccatgtgtggcattagttatacgtagcaaattaaatgttttcatattaatttatcatcctaattattttcttttgatatcttgtcatgtccaggatccgaacccaagatctctccctcacgcgcgctctctatgaccaactcacctacgcatcaattttgtttaaaaatgcatacaattccatttgagactacctaactaagatttgaatcatgaatttgagtatttaaaatatttcaaatgaaaattttaagtcgtagatctcatcgagagctataaatttcatataaaatttgtcctaatccgtgtccatatgaaaagaataagtcaaattacgagatgataaattttttattgcaacgaatttattgatcatggcaatagaaaatagtgaaaagtaccatgtactatgcaaattgccacaaaaattaaatgtgtggcgatagaacatgttttttgcaatagtaatgttttttgtggcgatagctcatttcctattgcaacaaaaatactgaataaaataatgattgtaaatcgttgcaacaaagtatagttatttgccacagaaaaaatatcgttgcgatagtataatatattgccacgaattgtttttcgttgtaataaattggtggcgatagctcaattctcttgtagtgtctccatcggcgtggcggccggcgggctgggcgcgacggtgctcgcgtgggggaactcgcgtcccacgctaccgccacgccgcctcggtgtcccgcgccgccacatcccacgccgcagccgctgccgcctccgcatcccacgctgtcgccgccgccgcctcggtgtcccgcaccgccgcctgccgtgctcgccgagagagggggagagagaggggaaggagagagagatagagtatatgacaggtgggtcccaccatcttttaaaaaagaaaatgttgactgggatgccacgcgtacgccacgtaggataaaactactctggattgggtcgaggggggtaattcgtctggtattaaaagtttagggtgaatcatgtctagttttcgggttcgggggggggggattcggtcgactgcgatagttcggggggtaattcgtactttttccaaacgcagttgtggacttgtggtttgtggctttgtgctcacccatggaagacgggatacgggcgaatatcacttttactctgtgtgaaaggttgatgccgatgtgtccggccatataaacttacgctctgcggtgaaactaaagaaggtggcgatggacagctatgtgcagtctgctgtaaaaactagaaaacttttcaaagaaacagctctctatatagtccataaaaataatatggcatttcatagctcactgaaaatggtgaaagaatcaagagtttttgcatgaaaaacgatcatggcacaatatttctgagattcgcatgtggaattgtgaggatgttcggccctaatatccccccggcccgattatggtgtttagtgttcacgtagagaaaagtccacttgtcatccctcatctttctatcaagtttaattgacatccccaaactataatactagaaatcctcatttccaacttataaaatcgggttaaactatggccctgatatttagaagtattaaacgtagattactgacaaaacccattccataacccctaggctattttgcgagacgaatctaacgaggtatattaatccatgatttgctacagtgatgctacagtaatcagtcgctaatcgtggattaatatacatcattagattcgtctcgcaaaatagcctaggggttatggaatcggttttgtcggtaatctacgtttaatactcctaaataacaagattctagagggctatttaatagcttagaggatccaaacaaggcctatgttctctggcagtactcataaaaaaccatgtgggtggcattactccgtcaaggtgaccagcgacgtccgtggccacgtgcacacttcaattgttgtgccatgtcacatcatgcgtgcgtgatgcagagcggtcccgaccgtcgccattcccgccttccttcccatgagcgcacgatcaagctcgacctcatgggggcgaactatcactgcaccacctcctccatagccagcgccttgctcgagctctttcatcttccaccacgatgaagatccggaatagccccgccaccaccgggggtagaagtttggccgctccctgatgaatgagaggtgggcgacttcaggaacgtcagggagggcatatccgacggtggtaggtggtcctcccgtccctaccgccagccgatggctagaagggtataaccgaaggtagcaccggtgtggcaggaccacccaaggcagatggcggggatgcgaaagggattgcgggggtagacatcagtataggaagggataccaagggcacattcgatggtgtgctggaggaggcgacgacttcgctagcgagggcagggaggacttggatggggtgggtagtggcggcaccaaggtgggatctaggtgcaacttgccggcatggagttgacaaggcgaagagaagggaggagaggagtagaggaagaaggtgaggtgggcatttacatatggccccacatgtttttttagttttctatttatttttttaatatgatgccacgtcaactagaaccatccatacacacgattttgctaagatgagatgaaaggtgaagttttgtcgtattacggtttaaaggatgcaaattaaactttacgtaaagtgggcttatttctcacgtttattccgtgcaacccattcggcccaacttccacttgctcgtgccggacggccactgtgcctcactgccctgtgcttgtgcccgtctggttggtgtgtagtgctatgctcccagcctcccacggtcccaccatatgctcgcagttttcttccaacaactgatggcatcgggtgcggcgggtggcatgcagtgcatgggaacgcatgcccacggtgttttcagttttctcttcgtgtgtttgtgtactccgctctgccggcgaaaacaaacatccggatgtgttcggcgtcccatcactgctcggtcggggtcaagcagggcaggccgccacgatcgcgggcgtacgcgacacggcccgacggtcaggccgactcaccggccacgcacaggcacgcccggtccagccccatgccgcgcccatgtgccgtcgtctgactcggccaggcgcgcagtccggaagctgcgccgagctccacaaatccaatgatcatgataccgtccgcgatggcggcggcgtggtctcgtactctcgtgactctctcacggcttgtggttttacgtgtgtttagtataacacgccgccgtccacacggcgtgactcccttcctgtcaacgcggtcagcggggactgggagacggttaactagcggtggtggcgcagccgctcacgggttcggagaagaaaagtttgagaggaagtaaaaacaaggagaacgtcgttaaattgccaaaggtactacctatatatttgtcgataaattttcttctaaaaatttgacagatataattatagtacaatcgtagtataattacactgtaacttgtatgtaattacactgtaacttgcatgtaactacagtgtaacttgtatataagtttcacgtaattttgaatcgttagatctattacaaaatttgttctggtgaggaagaaaaaaaatcacatcatacacatatgtgaaagaatttgttctcacaacctccattttaccgaaataaatgttatggagagatttttgaaagttacatacatgttacattatagttacagtgtaattacactacgattatactataattacatctgtcaaatttttggtggaaaatttgtcgacaaatatatagcatattcgattccaaatggcctcaaaacttctggctggattgggctcaggcccaggacggtctattcgattccaaacgggcctccacgcacgcttaccttaccttgatcagatatcgttagaccgatatatattactcacaccacagattcgtctctcattctcttgtagagacaggaatacttcttacatctcccagtcccaagtaatacgctgtactacacgtaataaaacaacagcataatgtctagctgtttaagaaaaaaacactcaaatcacaactggactaattgcccgacacacggaactaaaatctcagagctagcggcaagcaacaagtgacaacctgttcttgctcagcattgggcccttttgcccttacctgaagaatttcgagcaggacaatctgccccaacctgattcctttgcctgccccactgatgagacatgaacaagcggggggtgtctacggacaaacttgctgaaatcttggcttgcatctctcttctttacggacaaaaagttatcaaaggacagcatacttggatacataggccgttgggaacttaatagaatatcatgattcatattctcttctcttatcatttgcgattgagttgcggttgcaggagcagagaagattccaattgctccggttgctttgttcgtatgcaatcctaggggccaagacccaagagtggattcatgtaccagtgatgcaaaaagaagaaaaagaaaacaaaaggggctatgtttctttggaaccgccagtgttggatccatctaatcctgaattcctcactgatgttgagatctgaacgccgtattggcttcatccgcagatgacaaaattagcaaccagtttaaatgctcttggtgggaagaccgttcgggatgttatggatgtttgaacgcaacctgccatgttggaaggtttgcctgatcattgcctatgtcgatcaagaaaataaaattgtaagagcaagtataatagtaggttataagccggctaaatgctgaggtggaggagagaagagaggagagagaggagaagcgggctgtaaacttacagacggtttggacacaagaaccaaaaaactcagtgagagagacaagtggaccatgtattaattataaagagcaaactattatatagttaggttgagagaaggctacaaagaaccttatagccaacatatcggctgtattattaaccttgctataatgctaattctagcatttgggattttggtatgctcttgatgactcctttaccaaatggcatctcacacatcgatccacacgaccttcctgccttcctgactagaagcgttacatgaaatcattttgtccggttagaccaatgccaacttgtctaggtccaaatcatgcatccacttgacaaaacccctgatttgtaggcagtaggcacaatgagtatattcacctccccacatttctagcatctggccgtcatggctttggactaaacaaaccggcgctctttcctgggaaatcacccgcggccgcggcgcatgtggttgcatgcggccaaaattcggcataaagctcgtgctgttcttgtgcaagtagccaagtactcctcccaacagtatacactatacagggccatgtggaaggtagcctccacacaccatggtaaaatctccaaccaaccaaccacacagttcggttaagttcatgctcttggagctttgcattggacacgacaaaagaaattgaacggtatttgtagcagacgagagccagtgatttaattttgaagcaactaatttacaatatctactagtctaggtagacgatcatcacgattcagggcagttaagagcttctcttgtaaaggtgacatctgtagattatgtgtacaccgcgccgtacgcacatgtaacctgtgattaaagaagatgtggtacccagggctgaaattataagcaagaattttcaatatgtctggccgtgctgccgtcagttaattgaagcttcgtgtcaacttcagcaggaaattagatgcatggacggtctgtgcgatattcgcttgagttttcaatgttgcgtgatttagcatgggagaatagctactttagtccctaaagtttttctgtaggatcagtttagtccctaaccttttaaatggtccaaagaaattcttaaactttgtcataaggtctagaattgtccttgggtccaccaaaattattatatggatatgtcatgtcatcattcatgcaaaatctatgatgaattgtccaatttacccttacgtatatcgtagaaaaataaatataagggtgaattagacataaccataggaaaaaatacttatcctttttttcacccttttgagatatattttgctcttacattttaccttttgttttttattttcctatgatatatgtaaggtaaattggacaaatcatatagattttgcataggaatgtgacatggcatatccatgtggcgattttggtgagaccaaggactatataacccacatgacaaaattaaaggacttgtttggataatatgaaagattaaggactaaaatgacccaggaacgaaactatagggaccatattagctattctcccatttagcattgttgcaggtgttgcacatcaacagatagccggttttcaaatggaaaatcgatgtggcaggcttttcggctacatgtatggacaaatcttgttgcccgtcgttgttgattttacttagaaaatgatacgtttctgttctttctgagattttgttttcattgattccagctttatcttgttttgtgctagtgtaagaaaatttttaataggtttaaatgtaaacgccgggcttgaatggagcaagctcgggctggggcaatatattacatgcatcatcacgcgtagattatcccatgcgagcgatgacccggctccggtggaccagttttttcaggcggcgtcacttacggtccgcctggaatcaaatatgggcctcgtacagaaaaaaaaatatttctgtagtagtgccaataagaagcctaatacgtaataggcaatggctttgcttttactcatctttcttcagaacatatataaggtaacaaattcgtttaatcatatggaagacacgcccgcatagacgcctacgatactacgcacatgaaaagcaaattttattggcactgattttccaacttatgcatttattctgtttgtatactcccttcgtttttaaaataaataacactgttgacttttagatatatgtttgatcatcttgtttaaaaaaattatgcaaatgcataagataaaaagaatatccttaaagtactttcaggacaaaataactcaaaaaaactaataatgtaaaacttttaaataaaacgaatcgtcaaatgtgtgttcaaaagttaatgcattattaatttaagttgtggtttccattagtactccatcaaaatttattcgtttttaaattcatatttcatggatcatggtaaaccacaagaatacatgtagctaaccttgctttataattttgatggcaaagaaagcataactcaactggttaagttacttgtggtggaaccaatccatctagattttaagttctggacttgatatgagtgcttatatttatggctaattattcttgcagtggtaagcgtcgtattcatcgatagcgagacatccgtggtggcttcgtcaatctcaaaatatattgatctagtctttcagaggtgttcatagaggtagggtatgtgtggacgtttataagagaaagtgcgcgcgttgcgagcatgtgtgtttccaacaaaaatttatgcttgataacacatattatatcgattagtgtgaaagtgttttaatggcctaatatgcatcatgggttcacaaatataaacaggttcaagccaattaatgttcatgttggtccccatgatgaattgtatcttggtcccaagcaattactaatctgtacaagctgattattgccaagtttatgaccataataacatgtttgcaacatggtcgtttttttatgccacatttctcttttgctacgaagtgaaccaatcggtgccatgtttagtggactcaaggctccataaagtgatataatcctgccctagtcatggatccacggttccaccgatgcatcatcattttttagacacaatttgcactgaaagaccatgatccaacttcatctgtgaaaacctttaaacaaagaaccaataggatcaaccaaaaagataaatcacttttgacaaatccactctaattaattaattaatttcactgtccttgtaaagacgagagatagtataactcgatgagatgggttatggccgggtacatgggctttcattccaccaaccagttttagtgggcatgacagggcgatgatacagacacaatcttttcttagctgtccctgtatccaacatggcacaggattgaagattggatagaactactttagggctgatttatatgctgtttgtccagagtgtgctcgcttggcaagcacctaacctaagtttaggttccaaatacttaattaaagcttgacctaagaagaacccctcaatcgaattaatacaagaattaatggtatgaatttcatggaaaaatagttgttggggcacttcttttcatatttatcatgtcacatagcaacaatggtgccaaatgtcctccttcaaacaattgataccaaaggtcatcctcttaatttactctatgttcttacatcaatttttttttaattctagatgacacctcatttagtcccattgacactagttgcctaccttggggcttgccgaacaccccatagcatcgaagcacccccaacagaattgaggccagccagacgaccgagcaaagctccctcaccgttcaatcgctgttggtttgcatcatgccggtcggcctgtccagctgcacgctcacgtacgggcacttgttcccattggtccaacgttacgatggtcgatgatggctacattgcccccgcgatatgtcgagcagaggcgtgcagcgcgtcgcagattgagacgtgcggacgaatctgtggcgcgccgcgcgcttacgtgcacgagtgtacggcacggggcggcggccctgctccccgttactgtgcatctgtaaccggtacgatcgagctactcaccgtgctggcagcatgcgtacagcgtaccatatccctcccatccccgggcggctcgtggatcagcagcgtttccgtggcctcattgaccctgcatgcatcatgggctctctgatggcttaagccgtactgcttctactactactactaccacttggtgtcacggtattgggcatgcttaagtattggtaatgacgatgacgaccaccattggatccagttttttttttctttttttgaatgtttttggaaccggggcggaacgatcgatctggatctcatgcctgattgaccggtctttgtatctccatgtgcgagcaacggtcctgctggtggcgcgctcagccgtacgtggaatctaagatatggagcacagtacaaatttgcgtggtttcagggtgcggcgttgcgtgcgcggtgcgcccacacttgagtctcgaccgcgaagggcacatgccaccgatgcaggcactcgctttttggcccgtatggccgtatcagttttaccctttgacgcaacggcaatagaacttttactacgagaaatacgcaagtctgcaatgtagattactaccacggaaatgcactggcaaataggagtacgatgtgtaactgttttttgaggcaaagtggtggctgcaaatctgcaatgctcgagtaaatcggtaaagcaaagcgagtaaaaaaaaactagtactgtgcatattgtgggcctcctttcgcctttgggtgaggatccctatgtgcaaattgacagaggacctgacactgtcagtgagggcacctgtctttctctctttctctgttcggcggaagtttttttttcactttctttccacgcgcgctgccgaactcgtgactgccgttctctctcgtcgtatcttcactcaatggcaggtaggccccactgtaggtggacctacatgtcatgcacgtctagagtgagaggcgagtgaatcacccccctgtcatgccctgtccttcaaggttcccgtgtgcaacggcctgtacagccgggcatcgttagatttctccacgggtgacttgacttgtgcggcgggacctgcaaaccgggggcccacatgtcagctgcagcgctggcccctgggtgggcctcggggttgcagcgctggccccgtgcttttggccgttaccgttacctcgaacgcgccccgaggaggagcgcctttcggccgcgtccccacctctacctttccaggggcacgcggttgaagcctttgctcttcgtcgatgacttgtgggcccggaagctataaggccccacgttgtcagttcgatgccgctctacgggctagtgggcaatgcgtatatgaaaagacgagctttttccttcgggctccggtccgaccgcgattcgactcgaccagcccacccacccaccggccggcgcatactgtagtcgcacggtcgtttcgccgtccaaactcccggatgtacccttggcctattcttttcttgtactagtgcgagggtttcctaaaccaccgggccggagttactgagccccggcggtaagcacggtaaccgcggtaaccgtaaaaaaccgtatgaagccgtgtaaaatttattaaaaatttaaattatttttaaatttatttgaatttaaggaggttaccgcggtatttatattaccgtacccccgcggtaagcccggtaaccgcgcagagtcgaaccatgactagtgtaccggtgaggacaaatgcgctgatgagcctctcctaagtcctaatcgacaactctcctaattactctgcatttttcgtgctggtactaccacagagtcatacagacacgtagtgactattggcaaagcattggcaaagcataatgagcctgatgatcatgttaccgacggtaagtcgaaccatgactattgtaccggtgaggacaaatgaaatcgacaactctcctaattactctgcatttttcgtgctggtactatcacagagtcatacagacacatagtgaccattggcaaagtataatgagcctgatgatcatttagggggaaaaatggacatttttaatctgaaaatgtttcttactgaaccagctgctactactggacatggcattggatccgtgattagtggaggtactgctgcgactgaaaggtgctacagttcaatagttgatgctgaacagtcaccgctgggtacttccttttaggtggaaattagcaagagcaagctccgcgtgtgtggtacatctgttgatagctgtacatattttaagtaattcgagatttaaagttgtaaatgctaagtttctttaatgtgagaacatgaaaacaaatagaaataagacaataatacacatgcaaaataaatgactagtaaacatagaaaaaaataattataagaatgatcgtttggataaccgacaaggaaaaaaatgtacgagatgttaataattgagtcgagatttgaaaagatagacgtccctctaaactttttttaagcaaaattataagcgtgttgaggatcgaatatggaaccttaaattgaaaccatgtatctcttgtcactgcactatgcactatcaagtgcatctctaaaaaaaaccacagagccaagaattgtttatttaatagatgcaccctaagcccaagcatacagaacatttgcgctttgcttcaaacccaaacaccgaatagaaaaaaaagagctcaagatggatgctagttttccttcgaatttccctaattcatgccaaaagaaaatttcccacgcttttcttgtgctccaaccctacaaaaccaccggatgaacagtagcacttcacataggattttgttcatacgtatttccttcattaaatttcctcctacaactaactcacccagagctacaactaattaagcattttcaaaggagaaaaatgcatcaagctagaagcatcgcacaagcctgagtttgaatcccattaaacacatattttcttattaatgattgaaaaaaaaagaacctgttcactttgatgaaaaaaaaaaccttaccaaaatttggcaagatgccaaaatttagtaacttgccaaaattttggcaggatttcttatatagttactaaaatttgacagcaaactaaggctgagtttgagagaggggagatagagaagattggggagatacgcaaaatgaggtaaatagagaagattggggagatacgcaaaatgaggtaagtcattagcgcataattaattgagtattaactattttaaatttcaaaaatggactaaaatgattttttaaagcaactttactatagaaatttttttgcaaaaaacgtaccgtttagtagtttaggaagcgtacgtgcggaaaacgagtcacaatctccccaatctctccccgatgtccttcgaaagaacgcaacctaaatgtagccactcttttttggcaactttaccaaaatttggtaaggttgaaaacggtatcaaagtgaacagggctgaagattatgagagtgccaagctataagttcgcaaacctttgtatcttgctttggaatcgactttcagagctataattggactggatgaggtaatcatgaaagaaaattgtgacacttaattatcaagatcggtagtactaatttagtattttccaatgagcattaccatcgatgatctaaaactccaaggtgccaagctatcctgattctcgtacaattagtccattgctttaattaagattcctgcttcataccaatcatgcaatctcacttaaaatactaacctccggataaataacaagaaccattattcaaactaagaaattttctcaatccaaatcatgctttgccaaccaatctctgttgaagcctcagacataaactatcacccggaagaattattgttaatcatgaggggcagcctccagcttagctgtcctggaacagtggttatgcatccaatccgaaacattatggagaccagcggtgtcagtctacacactgacaccacggatcaggattaaacaaaacctgttcaaacgcatcaaaaatacacatcgaaaagcatcgaaaacgagacgaaaaaaaaaagccctactggctccaacattatgaacagaatacggcgatacactaaaccatacagtacgtgatacgccacgggagcaggggggaaatgggggcccaacgcgtgaatcacaccacgctggatgcggggcccgctcctctggggtagccggggtaggcgcatgttgtaccgagcgatgctggagccctggcccgcgccgtatctccagtggagccgtgtggagcggggctggccgagttggccggccatggcaagaaggaagagcagtggatcgatcgccgagacacgagcagcggacggccgcgatcgcgtcgcgtgcagcgtgctctgctttgccgcgatcggcatcggcttgcgtggccccccgtcccgtgctgccgcgtgaggcggcgaccgtgcgggccggcggggcactacgctgttgctgccgcgctgcggttgccggccggccggggtccgtgtagtggtggcagcatcggatgaccataggcacagtaggcgataggaccgcctccttttgccgcacaaaggcgggaaatcctctatcttcttctgataagttcggtaaaaaaaaaaacttctggccagtttactaccacttcgctagctctggaatctcgctggagaagagggaggaggagtttcaccgaagaggaaatagtagtgggcacgtgggaaaatctcgatagacaacggtggaaatgccactaggattagatttggaacttgggaattaaaacagagggaatgttgtgcattaatatgatatgaaatcatttacttcccgtgtatttttgtcaataatggtatctgtagagttcatttttttatctggtatttccttgcacaaaatggagtttataaattataaggggagccaggccaaggtatgccttctagacatagtatttccttgtttcattgtttgtattttaccaaagtacaagtatagtagtacgaatattatgtacaactctgaaggctgaacttgttgcaagcagggcttttctgcctacagagctactacgtgtatttttcttgttaaatctacacacatgacacacctacaaagcaacattctgttgtaactgaaaacccctatctgtccaaatgcaaaagcctgagcctgctgctgtgaatgacagcaggatggacagaaaaaaaaaaggaacccaagcaacaacacaaggaggaaaccagaacatgcagacaacacaagcaactggctcctctcctctcctcctaccgttcagttagcagagttaacaatgtgattagctgcgtactggaggactactactagcggacacaaagccccactaaagtattcattcgttcacaattcacaagccgtcaagcactgtgccattatccccaataagtagtactccaccacgccttctctcttcttcctctcctctcctctcctccgcttcacctccgtttctttcatcgtctatctctttctccccaacacagcgggcgaaccaaatccgtcgtctcgccggggtccgggaccacctcgtcgcatgcgcgctgggtcgtagacttggccgccggcgatcgccggagttggggagcgcggcggcggcggttccgctctcgccggagcgaggggtgggtggaggatggcggcgggagggaaggggtgggtggagagggcgcggcgcggggtgaagacggcgtggttcatggtggccatggtggcgtcgctgctgatggcgtcggcgccggcgctggtggccgccggcgacgtggccgtcgcgctgtggctcgaggtgcggctcgggtgcctccgctgccacggcctgcgcggccacctcgagcgttacggcttccggagctcgctcgtggacataccgcttgtctccatcgctcgatccgtcgtcattacctgtaagcagcgactagctccccctcattgctgttctaatgcgctcgcaggatattggggaatctgttcgtatgagttggatttcttttcatcttctgagaatttttgtattggttatgtgtgttatttttttaaatattctaatttcattatattttgggatatgggatttccctcaagattctttatttttttcccttttcgtatggggatttgtccatctgaaagctacagttcttgctacgtccgtgcttgtcttcattcgtagacgaaaggatgaaaactttcgtgaaaaaaaccgtgtctatttctaaagctattaatctgatttcgtatctgttgcctgctattcttttcactttccgtatttgaattcagttaaatcccgtcatttgattcgctgaattagtaatagatttgctgaatctgttgcctactatttcccggcagtttgaagtgcgcgccaacaaatttccgcactcggatttggggagaaaaactacgagatgcgactaacagatccgatgtttgctcgtgcaggtgtatacctcatgtctgatgcttctgggctctcccatggcccgtaccttggaacagcaacttgctgttccctggcttctctgctcatcttgttgattaaggccagcgtttacagtccggcgcaggagattgggcctgagctctcgccgtcattggcggatcacaagctcagtctcaagaagctatcgggaatgccggtgcttttcctgtcctccttggtctttgctcttggccatgttgttgtcgcttacaggacaagctgcagggctcggcggaagctgcttatccatggcattgaccctgaatctgtatgacttacatccgtttgccttctaaatctcactaagtgatcaattgtagaaacagggccatgtatgctagtattttcttgcatccgttgtgcttttcttttgcaatgtttgatgttttcgtgggttgtgctgctttcagattctggcatacaagaatgcatatcctggatgctacaagactcctcgatctcccacaccatacagtggaaaattttattctaggagtgacagtgagacgaagagaaaatctgttgctcacgacgatagggatattccaatcagtttccttgcagacggtgatagcatgttcattgcttgccaggggatcactgtgcattacaaactttccgatccatcgagttgcatatcttcagctacagacacttttccagaaatccatcatgatgttatttcagcaagcatttctcctagaagacagagacatgatagcccaccatcagcctccactaatacccgtcgtcttttgaataggagcttcagccatcaataccatcagacatcgctatatgcaccattgttggtagagccagtgacctctccaactttgtcggatgacacccctgttcttagtgttgatgatggcagtgctgatgtatgtttgaaacctatgggatttgatcttgaggctggagaacaggggaaatttgctgttgttttggtgcatgggtttggaggtggggtgttctcatggagacacgttacaaatttgctttctcgtcaagtgggttgcactgtgctggccttcgatcgccctggatgggggttaacatctcgacctcgcagaaaggattgggaagacaaaaatctaccaaatccatatgagcttggatctcaggtgattcttcttaccatatactagattgcgcactgcccaatagcagcaagtgcttgcagcacttgccctaatgttctttgcactagctactagatatgttgcaatatcccatactcattccatggaatttgttataagcatgactgactgaatgtaaatatgttactgcatgtgttttctcttagaactatacttatctttgggattatgtcttctatgtaccataattctgtgtgacaacagcttttccattacaaatagttgagtacaatcttctgaagttcttttttttccttaggtacatcctatcttacaaatattcatctaagggaatgctcttctactgtaacaactattaatcttttaattaatattactatatccagttatgtttgcaacatattttccggcagcattaacgctatatttcttcgctgtacttggaaaactcagaactttaagaacaacgctttgtatgccttctgcaggttgatcttcttatttcattttgctcggacatgggcttacgctctgtggttttagttggtcatgatgatgggggcctgcttgccctaaaagctgcagaaaagttgcgagcatctggagattcaagaaaggtaactgccttgtgaccttctgttcatttttcttttgtgaactttagtagcttatcagactgtttgcttgatgaaagtctatccttctggtaataatcattttaaatgcctccttgttttttcttaggttgaagtgaagggagttgtgcttataggtgtaagcttatcaagagaagtcattcctgcatttgctcgtatactcctgcatacccctctaaggaaaaagcacatggtacggccactgttacgtactgaaatcactcaggtgatcaatagacgtgcatggtttgatgctaccaagttaacaacagatgttctgaacctctacaaggtacacacttttaataattttcattcccttcagtgtgttgtcaaaccattagtacgcaatctatctctggaagagtttggtcactaaaagcacatagggagcgttatatcatttgcaaataatctatttatcattccaccacatattgtctgaatgcaaggaaagtggaacttttcttgcatgttgttagttatttattgtcttcctgttccttgatgctaaattaaatgttttaacatgcatcctttcacttattctgtgaacatgaactacgaactgacttgaaatgggtttttacatttaggctccactatttgttgaaggctgggatgaagctctccatgaagtaggacgtctttctttctcgactgtcctatcatcaaaaagagcagcagatttactaagatcagtggaagacctccctgttctggttgtagcaggctctgaggatgctcttgtttcttcgaagtcaacgcaagtaatggcttcaaggcttgtaaattctgtaagtaatcttgagtccctttgcctcagtatagtgaatctgcttctgaagaggactcttgcatgatactctatattacttccctgttagggttactccatacattgtgccaatgagttcttgttattttgcagaggctggtaacgatatcaaattgtgggcatttgccacatgaggagtgtcccaaggcattgctttcggctctttctccattcatatcaggactggtgtcatcagatgattcattgcaaagattgtagcatactagttcttttcgttttgccttttgccctgtctttctgtcctctacactgagtagatctctctagttggtgtgagtttgtgtgagccaatgtagtgcagtagtggagcctgacccaaaatctcaagggttcctagagctcctctaattttttgccccatataatgatacctccgaatgatttcaattaagcaagttgaatctgtacagcacaggcttgctgtgttcagttcatgtctactccagctccagctgtcatatatcagctaactactgactactagtaatatgcccgtgctaaacgctacggtgcaactctatttgtctttaataatttttaaaattttcatgtttagcaaaaaaatattattatatgaactgtgcatttgagctttaattcaatttatatcatacatcaaatatgttgcaagtaaaatattagaataggatataccaatatatttgtgccccatgtcataatgcataataatatgatattaaagatatatgataatgcatatatctgtgccttaagatgtatgataacgtgacagatcaaaggcacttaggttgagtattgcatataagtatttatcatgggtattttagttgttaatgggccattacaggatttggaccatacacataagtttgacatctagcagtcctttactcctttatcatgactgaataggcaacataatagcaaattagcaatactggtttcttatgttaattatatttgctttttttatacgctttcatgttcataaatcaatattcatgtgattggtcagctctttaaattaatggagccctgaagcaaataaaatgtgtttgatctaaagcaaagaattacatgtgtttgatctaaagcaaaagaattacagaaatcaatagtgctacacaacgtcagaaaattggccgacttaatttatttatgtgagatctaaaccacaactggtgtgtgatgtgtctccttatataagaagacatggaaaacaaatataaaggaacattgctatgcatccaaccgtgccaaacaaatacatagtagttcaacaggaggtagagcacatttgtataggtcccagaaatcaactcaatcacaaacaatactgaataggcatcataacaacaaagtttcatcgaatttggttgtgcatttcacaagcaatactgaataggcccgaacgacattgtttactgaattttcttgtgtaattcacaagaaatgttattttattctaaagccaaaacacagtagtgataatactaaatcatggttccttctcggttgcttcatcggagacgtcgtcattgcagatcttcattgttatctcgatgggagaagaccagcgaggatcatacccttctcccaccttccttttttcaccgtatcctttttctaccttcttgcacgtgtagtcttccatggaactctcaacacgtcggcaaccatcacgtatgtattgaaacatcatcatgatggcattcgcgtggcccatgtaataattccccttgtttggtgtttgccctgacgaaggctgcaccttcgcatcatccttggagttcattgactccttaggtgtggcttgatgtggtgaaaaatccacatcatccatggatgccatgccttactacaatacagaagaagtaggagatcaataggtgcaaactaaagtatataataatttccaacacataagagatagtttggagaacgataccaagaaaaagattggtcaatccctcaaaagaaaatatggttggcacagtaatcagggcaatttttttttcttgatttgtaaaccggatgcaggcaattttaaacatcagattctacaacagtgcgaagattgacccacgaagtatacatttgcactatttgcaaggggtaatcattatggaagaaattacctataccaaatagaaatttagtagaatcagccaaaaatttcgttgattgtgcagcaaacaatagtagttgacatggtgtcctgtcagcctgaatttttcttcggcaatctgaattttcgtcctatagattaaatcatttgaaatgaaaggttaagtcaggttgctagatataagcaatcacatagaaaaattgacacaatagaattatctgaggtaggccatttcttccccacaattttacaatgaaagattgacgataaatgttaacaagatgtgaagtatctcatccaatgacaacaatgaaaccccccaaaaaaaaaaaatcctaccacacgaatgagattaacacatgaaatttagttgaaatgcaaaacaggctttgaattagagttttgcatcacagatatccatgcacagtgaacaatgtttgataatgaacaatgggggtttagtcaacaaaggggattcctaaagccattatgcatctctatgaacagcggtggaggacggaaaaaaaatttaggtgtggccaataaactaccacacgcgagagttaacacagaacaagaattaagaaaaaaaaaattcaatgcacaatattgtacaatgtaacattatatcagcaagtcatagtaacaagcacttaatcacaagttcacaattcatcatccatttgcaaataagtgtaaatataaaggtaggtactcaaaaatacctcaagattcactgattcaagctttcagccgtacatcacatatataaactaatgaggatagatacatatgtagaatctgaaaaacaaatagcaaagattgattagtttgataagataaaaagcaatgagtgaaacaaaatgtacaagcatcctaaaaataaaatatttaattgcaatttcagtaataaatttgtacactttgaaattgcaatgttctgaaattgtcaaataaaaaaaagtacaacctctttgtgatgccagtgccttcccttttctctttctgtccattttctgctgatgggagattgggcgtgatggcctgatggctgctactacttctgcttgccttgcttgctgcttggtgctgctgcgccatccgccctgcccctgccctgcttggcgcctgtgctgcacgcctgcgcggctgcgccccgccacgcgaggaaggtctcggcagctaccaggcgaggaaggcgtcggcggcgacgagaatcggtggcggtgagacgacggatgcgatgacggcggagcggcggcagtcgagggcggcggcgacggcggtggcgcggggatcggtggcggagatgacggatgcgaagacggcggagcggcgacagtcgagggcggtggctccgcgtgagtcggggttggggaggggcggcggcgcgtgagagcgatagagagggggcgaagaggagcgcgcaatcgagggaggtgggaggtgggagcgatctcaatcgttgagatttcaccgagacaatctggaccgttgagtgatgaatgaaagaatgagtgaaagtatttgttgaactatagggtagatgactacacatttcgacggagcaaatttcggatgaaatctgaacagctgtggcgagttggtgttttaattctttaatttactgaagtcctactatctggtagtagttcatttaccgaaaataacatgcccgtcctttgtgttactgtgtatctctgagactctgacagcattgggctacagagaatgtgttttttaggaaaaaaatacggttggtaccgtaggagtatgtatttgtgccagttggcagcagtatctgttttctatctttggaagaacttgttgtttttgggtctataacttgtgttaaattgtcattgctctttttgatgttacattaccatgtgaagttgtcagcattaaacatttcatacatgagcatgatatacaatgatgttccacagatgcacagacaggccacctcaatttttttttaatatagaactgttttaattcagccaaattttgttcaaataaaaaggtttgatttttaacccccttttttttgaacttttcattcatttgcccctgtcaaatgtttatgattctcgcaatttgtaagatttgaatttaggatttttaaaaattcagccaaaatttgttaaaattttaatttatttaattaaatatttttaatcaaaattttccactactagtcacgtgcccatgcgttgcaacgggaaaaataactttttaagaaattttatgatttatcgttgataaacactcgattctataacgccttagcaaaagcaagtaatatatgattattatgttttctttctttttgcgttgttatcggttgaactccggtagagcctgaaaagatcatgttcctcataaaatatggcatgtactaagcaagccaagacatagtgcactgaaataactacagattagcacaaatcaactctttgcaatttagctctctcaatcttttccaatgtcttatagggaaatttccaatgtcttgtatggaaacaaaataaacacgatatttatgtatatacatatataaattacagtatcatattccaaatggtcagttgactgtcaagtagcacaaggaacaagaatggtaactttagagttccatcatccctaaataatacgtacattgcctgcagagagttcagaagtgagtccaggagggaaaattatttcccgcatcaactaattagctctcccagtaaagaaattcaacatatggatttaccctggagtaatttctaaacttagatacaaaaatgaatagaagggccagccattgctgatttgcaggggataaagatggagagtgaagaacatggcattttcatcagagttagaggatagtgattactctgtaccttcagggcttggctagctaagatgataaagctaatgttgatcgtgaaaagatttaacatattgatgagcccatgtaagtgatttttttttacctgtagtcaccaaaataaaggttactcaaactgcaaaaacaaaattagcatattttatgaataaaagaaatccacaagaagtaaatttcatatccaattgaaatagtatgaattatcaaaaatatgatgtagctatcttgattcttgactctccatattgatctccgaagagaatgaattttgccttatcaaatttaaattccatattgatatcagattgcccagtacagtaaagtggtcaacaagcagcagtcccaaatgcaatgttaatagaaggtcaggtcatattatccttgtaaaggcctttgaaatttcatggcaaaaaaaagccattgaaattgtcactatgcgaaggaatagcaacagatggtataagttcagtacagtgaaaaggaaaatgcagagcagaacattctctgactaataatgccaaaaggagccccatcccccgtccagttctgcagaatgtggactatcaataaccatttcttaactgctaaatgatcactatgttccaaaaaatatagtcagtactattcgatattcgatgtgtgcataatatagagtgaattatggcagatgacaattagaaaatagagtttactatgcaaaggttgatacctatctggttttcatttaattcaaaaccaagggaaatagatgatcatacctggtgttataatttcattgagaagctagaaaagcatttgaaccctgtacatgtatcaagagtttagattaactaatgtatcaagagtttagattaactaatgtatcaagagtttagattaactaaagacagtttccaggattatacatgaccactaaggttcattcttttagacgtgtggaagacaacttcacatccagccaaatgatcaagaatcatcagactgaaaggctgaaacagacatcgcaggagacatcacaaatggtgtttatgaagctgtatagttgattaattattagttcagaagtcagaacaattattagttcataatgtgaccatactaaaataattattagcctgtcagttctatcatcagttagaaaattatatgtgaatatacatgttggttctacagtaagagaaaaaccatccagaataatcctgattaaccagatactattgtcctttggagatgtttagacacgtgcaggcagttatgcgttgttcatagacatgaatactttagttattactcctattatctaactaaatgaattcttcagtgatactaccacataacataccactaacacagaatgcattaccaaaatgttgtttttggttattttcttttggttgaatctcgtctgatcaaatcaacggcggctgataggggagagatgaagcatagtactgatggtggataaaaaaaaggaatgatcttgtacctttcggtgaatcagatcgaagcggggcgacattgttctggcagcgctgaggagatcagcaaggcgagggacgaggcgtttcgtgctgatgctattccggcggcagagattggtggcggcggagaaggaggcggacgaggaagaggaagatattgggacggcgctgaggagatcagcttggtgggcgacgcagacccaggcgactccgggcgatggtgatctagcggcgcggattggggagagtgagccaagaggcaaaagcagcgagcatcggtctcctggcgaaatggaggagatcggcaaaatagccaacggcaagcgtcggtcacccgacggcgtagtcgtggttgctctggcggtgcagagcagatcaacgaagcagccgagtaattagggttgggtagagagagaagggggaggttggggtgatgcaggaggggacctgtacggctgtacctatagagggagacggtggcgtcgaggacgaaggcggaggcagaggcgacggatcgacctccgtggcggtcatgaccggcggaggtgtcggcggcctagacacacataaaattagacacttagcgcaaatgctaaatgaatagctcagcacaaaatagcaaggttatgactacgagaaatagtaatacttgtgaaaagcattataattctttcccagtggtttaaacaggcagaagaaaaatactttatgccatcacatgataattcccagtggtttaaacatgcatgcacattagtctcctgccaaatcctgctgaacatagtacacaaattcatctaatgggatgccatttgacagaaaatatctccccagcaatcagctcagcagaaaaatctgagtttgatttgctagtaaactgcacaacattgaatgaaaatacactatcgacttacttataacaactgtgcacttaaattacaatgtgccaatcagaagagttgtttgctgtctcacacaaaatcacaccatttcaattcagttttcaaaattactctgaaatatgcaaatggaagaaaccctttatcaatctctgagcaggagtcaggagcaaacaaacggacaggggcagaacatcaagactgaaatcgaaacatggtaaaagcatgaaaggcatacataaaccatttctttctccattttttctaatgtttagagaaagacagactcaccgtatcaatgccaaaaaaaattcagcagatgccaagtgcatgtccctgaactcccgcttgattcctcctggatctaggtttcctgggattgaaaagtggcatttacatctcgtgatcaacaatatacagtacctagttgggggctttgaactgctgacgggggagcagtagtcccggtgacctaggctagggatgaggcagcaatggccagttggggatctggcagcggcgacggtgacctagcagcggggattcggtggcgatgttgtgagttgtgcaggctgcgatggctggttggggattgggcagcggcgacggagatggtaacctagacctagcaaccggggattcgcagcagcgtggtgtggcgtgcgggcggcgatggccggtttgcaggtcggggatggtatggcgtgcggctattgcggcggcggcggttgacagaagtggtggggtaggaggggatacataccttcagatgaaggcgatcatgaccggcagaggtggcggcagtcgagggcggcgcgggtcgtcgcgacggcggcgaggaagcggctcctcggcggtgttgacgcggcgtgacctcctgctcccgcgtcggcggtcgagggcggcgcgggacgtgggactcggggcacggcgacggcagcgaggagacggcgcgggtcgcagcgtcggcggtcgagggcggcgcgggacgcgcgcgcgggacgcgcgcgcgtggcacggggctgctgaggaggcgatgcggcggcgaggtgagaaggtgaggaggcgaggagatgacgcagggaggagggcgaaggtggatgatcgatccgatgcgaggtggaggcgcgttggagagggcggcggcgatcgcggaggaggccggcgggcgtggctggcgaggaggcgatgcggcggcggggcgagcgtcgcccagggaggagggcgaaggacgcggcgtgggaggaggaggagtgggcgtggggaggagatcgattcaagagaggagcgagcgcgtgatggggaggagattgacaccattggatatggcaatcggatggttgagattacgcgtgtctgtcagatgcgtctgctatgtcaggaatcaagaccaccactacgaattttttaagtagtagagatatcgttccccaaaattgtttcctacttaatataatcggttatgcagcttggtatggtggtaaaatcatcatttccaaaaattcatttctctagaggcaaagatgctaaaactacctccgccccaaaattcgagttatatttcaggataggggagtaaaacattccgtcagtacgtaactgttctgttccaaccgaaggttgattccatgagttaaaatcacccaaatcaataagtgaaggtgagaataataatgaagcactggtacattctttggacttttccttcaaaaattagaaaagcgtaaaactgtacatgccagcagatcaacttgccaactaaaacaaaaacaggctaacatcacaacacgctataacaaaatcaaattcttacgcttctctacttacgaacaccggacgtaacccatcaatttcaccatctcttcatggtggaataactataccaatgatttccagttattccttagctaaccgttggactccggggtaaattctatctcccctttcttggaaatcaacagtaaacaaccaaaaaagaaaaagaaaaaaaaacacacaactcctttactagctcttgcctttcatcttctctgcatcccattcattactgacgagcacaagatgatcgccgtctctgatgagctccacctcgtcaacctcggcgccctccacggtgagaaccttggttggcgcgaagtcgaacttcttggcgccgagctcgaggagcatgtccagcgtctgaggcaggagcacgagcttcccggcggtgttccctttctcggggcagctgatcgtcaccctgatgacggcgttgcggctgccgctgctcgggttcggggagcccgtcgccgcgaggccacccctcgagagcgggtggtcggtctcccgctgcgcctgcgacgacgagatgaccccgaagagggagttctggaaggtgacccgcttcctccggagcttctcggggagaacccggctgggcaggtcggcgtcttcgtggatcatgttcttcatcatgggctcgctgttgaacctcccgatcagtgatgccgccgccgccgccggcgccaccctggtggtggtggagcttgggacgtgatggtggccactcgccgtcgccgccttgcgcgaccggaacaggagctggatgtcgtcgtggccctgctgctcggcgagggctctcggggtccagccgttgccgtcctgcttgtcgatgtcggctccgtgttccagcaagagctcggccatctggacgttgccgtcgcagacggcgcggtgcagggcggtggtcccgtcccggcgagccctgttcacgtcgcctccgtagtgaatgatgtcgttgagcagctcggtgtcgctctcctccacggcgatgcaagcgtataagcccgtgtcacccgacgacagatccgcgccgccttcgactaatagttgcacgacggcggcgtgcttctcacacagcgcttcccacagtggaacttttccttctgagtctggaaaatggaaaagaaaatcgtggcatgtcagatggtgtattgaacatctgtatataagactcatcactcatggagttaattacatcgacgcacaaaacttttgcgtcttcgcaaaaactcatggagcaaattctattaagtaaatcagtaagttctagatgttagattggtagaaaattcaacaggaattttgcaagcaagtttagcctcgtaagatttacaggtgacgtgaggccatgacatattgcagggtttggatataacatccagctgttcataccatttaactcttacagttaaattgtacactatatgctgtcaaaattttccagttttcggcatacctctggcatttggatcagctccatattctaatagaagcctgacgcattgctcgtttcctttggaagcagctatatgctgttaatcatgaacatttgaaagtggtaactttcttggtcagcataagtccatagaaaaataaacaacacagatacgtatagttgactaaactgaccagtgcggtatgcccgtcattatctgactcatttggatccataccacgcttaagaagttgatgcaacaaaaaatcatctcctctagttactgcaaaacagagtgtaattggcaaatccagatttccccgagctagcatactctctatctcctttacgacaccagccattacactgttctccttctgctctttaaggaactgcatcagaaaaaaaaagagtggatctcagtactgctcaaaatactgcacgacataaagcatgataaatgtcaatgaagcaaaaacaaaataaacagcccttatccagatcacaacagacaacagtgaacatcaagtctgatagtcgcagaacagtcgacatattttttagataatggcagaacagtcgacatgaataaacaatttctgtgttcaagataatctagtggctatatgagggaatactagtttaacttcacatattgttaaacaagatgatgcaggttccagggtggttcgatttaggagttactacagagctagtttcagtggtcaggttaccactctgaatatgaaaaatctttctacaaatgcaaacatatgcgataaatgttacagagaagagaccaacaaataaatggtagacctgaataaggttgttcattatgatagttccatccccaacattggattgaacaatgctgagaaaagctgtacgattcaaacgcaacaactggcacaaggatcttgttcgaactgtgaatagctgaggtctgtagcaaagaaccccaatttctccaacaacctctcctgacgtagccacttgtatcacctgcagaattccaagttatcatatttaggaccaattgatgcacgagttcacttggaattaagtctcaaagcaacagaagtcttgcctggtctgcaccattttgctgctctactaactcctgcaaaagtgactcgaatttcagaatgaccatttatataactaaaactgatatcagtactgatagctcaattactcctactttttcaactgcactctctgaagcttagtattatatcaacttggaaataacaaagtagttattaaagagtattcttaccacactaccagaaactaagatgtagaagtcagtgggtgcttcattctgcaaaatcacatcctccctaggtggaaaatattcagctttcatctccgaaacctcaaaaacgaaatcaagtaaaagaaccagataagcatattctgtaacagtacgcaactacaaaaacacagctacagaaagaactctatccttaccagttgaaaaatcagatcatttgagactccttgaaacaggtaaacattttgaaccagatggaagaacagatattgagaaatgctagatttaatagctttaggcagtgaatcaaggatctcttgttgttgaagaccttctgaatctgtcctgtattttaagctaatatgtgaaatcatctgatcttgcagccgaggtggtagctgatttcttactccaaagcttgttgctgcttggattgtatccctcttttagtacaaaacataacaaacactacttgttagaatcaaactttaaaagagcagttagatgcaagtatcaaccaaaggttgaacaaaaagaactcacatagtttcgagtacgactagtgccatggacaaccaaattggtcatgttaccgatcaaataagcggtcaaaccaaggttaaagagcatgtagaaaatgttgaagatcatctcccttgtattttctgcatgtagatccccatagcccacggtggtaagagtggtgattgaccaatagactgatgttacgtagcgaatccataagctccgttcatggaaatctgccatgtaattgccaatccacgtagaagttgggacggggtacctatcagcaagaagatagtagaagcatgccgcacagtgcacagcaaaaagtgtgacctgcaatatcaaaggatgagaaaatgggatgttccacaaaaatgttaaaacttcacaggaaaataacataaatacagtcacttacacaaatgagctttgcacatcgaacccagaagtaattgaagtgtctatccttctccaacctagaaaaagtgaaaagtgttaagtttactacacaaattgaaaaggcaaaaatggcagtggctctagcctaattaatactatgttttaaccgagttcagtcaggttcagattgaaatgttggaccccaaaacagaatgtatatcatagaattttctatatgtgcacgataaaaacatacctagaaaacagagagctgactctgcggagacgccacagacgaagcatgttgaaaaatccatatgacctaagctttgaaggtagtatcctgcgagcaaattctgatgggatggtggaggccacgtcaagaacaagccatgtggtactataacgccatgcgatcttctttggatcatcttcaagcatatagctcattttatccaaataagccacaaagaaggtcagaatgatgtcaaccgcgaagaatgcattcaccacattgtcggctgtagctagagcccccgtaggcttcggaatgaagccaaattcaaatggtgagacccacgcagagtagactacaagaactatgaggaaagtctcccagattctgcatagtattaacaattaaatgttagaattactcattcttctgatttcaatattacaaagtttctatttgcttttcatactagcaaaaacaccatgcttacaaaggaaaaaacaatatattcctgtaggaagaagtccatataccccctaaaccatgaatggaagatatttatattgtgaaatccatacactagcattatatgcataacatcataatataatataacttgcggccaaggaatgacgaaatacaaatatgtcatcttagtcattataagcatccaaatacacgaaaccactgttcaaaaatcgaaaccactgcaggggttgcaaactttagggagttagatgttcggttttaaagtttagggtattagatggactttcgttcaaagttccgtgatttcttattcctgtacaagtaatctctgtttattcaacggtactgtatatgtactggccgtaactcggtggcaagtggcaactagaagtaccacagaaactaccgtactacttactgtatactgtgtatacaagattatctccgaaagagtgatccgaagaaaaatggagattaatgtaatgcgattttatgatactatcaaataataaatggacaacagaactctcactagacaaaaaaatatattaattgaatgatagcacagaataacttcaaattgcagaagactgtcattgaggccgacaaaaaaggtaatctgaacaattcgtaaaaccaccaagtccataactaaaatacaaggttattaatcctcgtccgtccaacggcaaataattgcagtaaacaaatcagaaaaaaagttttccatgcgagttccgtgagagagctctttcgacaacgaagcattgcgtaaagaagcgcaaaacgggagtactagaaatccaggaacgtcagcatcaaaatcacgcttttcttgtcgttcctcaaggaaaagaaaatcgaataactaaataaagcactcacaagccatagaattagccatattaaaacggagataatgagtactataaaaagcaagaaatagacaaatcaattattcagtcgaggtcaaaccaggaacagtaaaaacaaaaacctctacttctcacttccgcgaaaacacattaaagacaatttgctgacaattgcggcagcaaagcagccattaaaacagagggagaaaaaacaaaatttcatgagcaacccatctatttcgtgacaacatataataactcattggaattaacaagaggcagaacgaaccaattcagtgccaactatgaatacaaaaataaagcacttctgcgctgaccatcaccaaaattaaagctgtaatgcagccagtatagcaggactgtacacaagagactgcgcaagaaaaaaaaaatctgaaacaaagcagcggcgagagttgtgatggcgatagggaagagagagacagagaaggttgcgaactaacctgtatcggcggtcgtagggggagatgatgaagcggcggagcttgatgcggcggttgctccgcgcgccgagcgacgggaggatggcgctggagatgctgtagtggctgccgtcccgcgacagctccctctcgagcgccgggtccccgccgccatggcccgccccccacggcccgcacgcgggcatcatcctgctgcgcccgtcccgcctcacctcgctggcctcgaacgcgtcgccggcgccgaccctccggttgcggccccacggcccgcacgccgccatccgagcggcgccccacctcgccattgcgctgcccctcggcgggcgcgcgtgcctcccctctctcgggtttaatggagcgcccacccccacaaggcccacaaatctggcggcctgcaagggaatcgcggggtgggaatctctcgccttgaatactagagagagaagttctcggtgattcggttttctggtaagtggaggagagccgacgcccgacggcggctgcggcggcggcgaagacgtgtcgcggaagaagagaagagaagagaggagaggtgagagcttcgatcgagcttggtcggggccacgcgcggctcggggctgcttttatggatgcgaggggagggggagagacctggggggtgggggcctctggggcggacggactgctgggcggcgacgaatcgggaggagagtctgaaggacggttttgcccctgcgggactggacgcgacgcggccgagccgcgaaccgggggtgacacgttttctggggaggacggcagaagtagtggggatgtcagatggctcggatccgccgggtcttgccgtaaccgtgccggtgcatgactctaagcagtacgaagggcaaatctggtaatcacctaaatgggaggcacctacccctacctgtcttacagaggatttgcctcatgaatatttattcgaggtttaagattaaaattagctgtctgggtttgtcttaaatcaaatattatttgatcatcaatttctatatgagtaaactcatactttaacatcatacgatttatatttttagatttaacatgagaaatatgattgtgatatataatttacattttgttggactatatggatttctagaagttaatggtcaaatacaaacgtaaaacaacatgtaatttgaaacgaagggactataatttgatcgaaacttctaaaattatagtcatcaataaatttaattttcaattgcttactttaaaagaaacaaaaattatatgcgtaaatttatcctggagagtattattgtactccctccatttcatcttataggtcgttttgtctcttttttagtcaaacttatttagatttgacaaagattatagaaaaaatatagtagcattacaaacaaaaaacaaatatattataaaaaaatattcaatgttaaatttaatgaaactaatttgatgtcactaagttattctatgaacttggccaaactaaacaaagtttgactagtgaaaaaaaaatcaaaaccacttataatatgaaatagagggagtaaaattgtaaacccatcaggtcttataaagtattattttaatatagacctgatggtcaaaatcctactgcctccatctcgtaatatatgcaattctaaagtttttcacgtgtattaaatagagggatggaattaaatgagggatgtttgtaattggttgggatgagtaagtagatgaaataaataaataaatgagatatggttgtgattggttaggatgagaaaatatgtgaaaaaaaattaaatggggaatggttgtgattgtttgagatgagagagcaaatagaaaagtagctatatttttaacagttctataacaatagaagtaattatattttagtacagatagagtaaaagagagtagatagtctttttaagcgagtttaaatgcaataggggaccatccaaatatcccatacaagttgtttgggtttctatttcctcccaacaactcaatttcataacaaaaaccccatcaatttcttttctaaactgcccccacatcctattttcattgatttatccttattgtttaagtttattgtttcaatttttgtgcctcatatgtctttggcatggtgtgtttttggaaacctcaatcctcgcttccagcttctgcctttcccaaatcccacatgagcaagatgatgatagcagaacaccatggtaaatttataggacaattacaaatttaccactgttttgaatcgttattgtaaaactgccactagaaaattgcaaaaataccactggaactgtcattcgagtggcatccttacaaaattgaaaaaaccggtgacaaatttgcaaatgcccctaaatctattgagttgtgagttagctgtattttctatgatcccaagctccggcccgaggtagcatgagttcctattatcctgtgatgctagaggtccatggtgcatgataaattgaaatgattaggcaaagatgaaaacaaaatgttggtgggaagttagaagagcagttgacttacagggattttgtgtacaaaattaagttgtaggaggaaatacagaaacaccagtgaattgtagtggcatttggattttacccaaagcaatatgaatattcatctagagaagttatcttaggtacgtaaaaaacacttttacgattaggtttagatccatcccgaatattaagataaagtgtgaataatatactttttaacatttatctttcggtgtgcatccttttagcgactaagcatatctcggttggtttactcctatggtaaaacctactcaccaagattcgagtatctgacttagaacaattcctaacatttataaataattattcttttagtggtaggcagcatgcttggtaacaacgagattaatcaatatatctcaatatactatttcagtgtattagagatgttcaaatagaataggatgtatatatgtgttcatagtggtgaatatgtgcggtataagtataaattaatagggattgtctatacatcatttgacagaaaacccccctaaaaatcttgtaaattatggaccacccgattactttaagatttgtgcaaagaaaccaaccctaaaaacctcctctcctctcctttctcctgatatcgcgccgccgctcccagtttcacaccgcgcctccgcctccgcctccgccgccaccgccccaacgtgccgccccctggcctcaccggctggccggaaggcctcaacggcgccggggaggcccccccggcagacgtcctccccctccctctcccctctcctccctcctcggcgagatgcccccgccgccaatgccgcccaccgccatcctccatccccgcggctccggcgccgccgccggcgcctcgccacccgcccgatccgccgcccactgccgggccgccgcctcccatggcaatccctctaagcccggccacctcccccttcttcccccctcccaccccaaccccaccccgccccgggaccctaattcgccggcgccggagaagaagaggaggtcgccggagttagagaagaagcacctggagcacgaatcgtgaagcacatccggtgattcaaaatttgcaagatttgggtatgtattttctgtcgacagatgcttagcaattccgaaattaatatatgcgagtgaatataagcttttgtatttctgtgtttcatagaaagaacacacgcattgcggcatgtctttctagtgggagagtccatattaaagttagaatttccgcctaacacataatatgttggtgccacctaaagtggtgtgaatatgtccataaagtgtattagtatattttgactgtgggtaaagtaccccgtctcaaaatataacaatttttacaaattatccaccaacattctcttcccaaccaattacaattctccaccattcacttttctcatatacctctacttctcatccaatcgcaacactgcaccatttatttctacctactttcttaataattatgtctaattctaaatttttttatattctagaacagaggagtactacatttcttgatggtaattaatgttcctctccacgttcaattcacttcgcaagattgatcgatagcgcgcgcctactaaaatgcactagcacgtataaaattaatcatattccagactaatgtaacacgtgtgtgtgtgtgtatatatatatatatatatatatatatatatatatatatatatatatatatatatatatatatatatatatatatatatatatatatatatagtaaatttgtttggtgctccatggtgcccgggcaccataattgaaatttactatatacccaattcaaatgagtatgaaactttttcaaatatttaggtattaacgttaactactttactaactagttcaaagcaagtttgaactgaattcaaacttgcttttgttagattttgattctaggtatatagcatccaaacatataattagttaggtatgtaataatggattgtgaaataaagttaaatttgagttgttttgttgctaggtataggtatgaatcgaatacttataagtaggtatatactcacaatttgaaaattttgaaaaatttgggtgaatttgtgtatttcataccatggtgccccatatgagtgtcctatatatatatatatatatatatatatatatatatatatatatatatatatatatatatatatatatatatatatatatatataatttgaaaatttttaaaaatttaagagaatttgtgtgttttataccttggagcccgggcaccatagagtcccatataggtatcatatatatatatatatatatatacacatatacatacatatatatatatatatacatatgtatatacatatatacatatatacatatacatatacatatatacatatacatatacatatatacatatatatatatacata

SEQ ID NO: 10383 - DNA, 31246 bp, Oryza sativa
ccccccccccccccccccctctctcccccccatcgcttgctgtcctctcgtttcctgtgtcattctcgcgcgccaccgaggcgccggccaccacctcaccccgcggacgcagcgtccgggctggcacgtcggatgcgcggggtcccctccccccaccgggggcgctcacctgtcagaggcacgcggccgtggggcgccacgcccccgcggccgggtgtgctcgcccgggacgcgtgccgcgggacgtcacgcacgccgacgcacgctcccggcgcctgccgccgcgtgccgccacattgccgccccgccggccgcgcgctataaagatccccgcacagcacgcggctaaatctcacaccagtaccaccacacagctagctagctggtatagagtacagcgcactagctagagcggtagagcctccagagtgctagccccatcagccacagtagtgttgagcgagctaaagctagcatacccctcctgcttaatttccatggcgccggtgtcggaggccagccccctcgtccaccaagacggcggcattattgcctcctttgcggtttacgccggcgcaccgtgctgcagtgcgcggggtaggatggccgagacagacggcgacgacgatgacgacgactatgactgcgcgcctgccgcctgagtcgtcgtcgtcgggtgaaagaagagctagctaatgtagtagctagtgtgcatggtacctgaagattaattagcagctacgaagtcatgctgacatgctgtagtactgtcttaatagagttgccactgcatatatatgctacttatttggtcgcacgcaagtaggtactcacttaattaagtatcagtttatggtaattagcttctactaatatatatatgtacctccccgagtaaccgtagtctaagctatgaggcagtacaaagtgtgtggtttttgtaccgggaagctagaggtcatcgtgccgataggcaaactgcgctgcaagctatatatatgcacataatacagaagcagttagtcaagtcgctagcaggtagcagcctagcagggcgcatgtactgtggttgttgatctccgttgcaataaattaaactgatatctacgcacttgactacttatttgtttgcatgatatatgcaccctggagacccaggagctggccggatcacgtactgtacgcaactacgcatgctgctagctatagctatgctttcaatctggtgcaattcccttctgtctagttaatttgaatctgatactgatagaaatgctaccactctaggctatcagtttctcgtgttgtatttttacttgaaagacatatttggatgatacacacgcaccccatatgcatatctaaactttggttttctaattaatgttgatactgtctaaactttgcctcgtggttttataatggttcttttaggccagcttgatatcagtataagattctgttggtagtgtgcacactttagaaatagctatatatatatatatatatatatatatatcatgcactatggttttcatgccactgtttgcacattaattatattggcacaccatactgtttttgcatgcatgttaacacacttttatgcaatcgttcatatttgcatcagttgaatgcaattatatgagtggcagatttaattgtaaattaagagatggtgcaatcgtatcagtcaattgtacatcagaagaactgcatccccttttctgattctagcagatggaatcaaaaatcaacaaaactgtaacagagattgtgtgagggcttgcatcaaaatgtgtatctaggaaatgcttagtatttttggataattgaagtacaactccagctttccattaacgagatcgaatggacttggatgcatggaaatgcttaatatagacaaaccaacggtaaggtcgatcgctatgctttttgcagtgacatttttataatttgggttgatgttttgaagtggattgtattgaaatttccctcgatcttttgtgagtacgttcttcatttggagttgtcattgagctctaagctcacatagcgggagaggattctaatccctcgagggggcaggggatgttcccctcgtctaactttttctctcaattttaatgtgtgagagaattctaatcccttgaggaggggatgtccccctcgtctaagtttttctctcaatttcaatgtaagtagtttttgaagaactctaaaaaaatattgataatgtagagttttgtaacatctatcattccgtcaaagttgagttttgacttctttttttcttttgagaagtttatatatgtgttgtgaatgttgtcattttcttgagattttttaacaatcatttagatagtgcttgaacaaaagaggggatatcttctcaagagtctaaaacacgtttccctcacatagcgtcctcacattgatgcaccatctattggtgcatgagaggaagagaagggtaaggatgtcgttgtaatatcaactctgtgatggtaatagttcactacggttattagggcatgtataacagtgtttagtaacaagctctttgttaccatgcatgtaaataattttggtgatgtggaagaaagagaatggaggaaaagcaaccatcgttactttgcatgacatcgactcaaaattaactcttaacatttattaaagaaattttattacatggaagtaaagaaaaagaaaaaaaagtaataaacaattatttcggtacgattagataccctgttgtctcactattgtaaggagatagtttccaggtgactgcggcttatgggtaggtgggagaggatgatttcagcgaaagacttcaccaacaaaaggtgggggaagaggccgatgagattggggcaagttgttgaaaaatatctctgatttcgaagaagcccggaccgctctcatcttatctcaatttttcatgtgaatagagctttctttttttgtgtgcgcttggggttttgccatcaaaggcgagctgaatcggttctccctgaccagcgagatttttctcaccttgcaaggttagttcgctcctaaaagcaagtttttttttaccggttccagacaactagccttcctaggtaaggctatgctagcctttgttgataaaccaaacgggccctaaatgatcagagatgaaaagtgatttctataactccattgctatcccaaatgtatcatgcaagaactttgaaggtccaatatccagtccaaggaaatttacttgggctattggaaaatggaattaaatgggccttttgtggagatgcatatgtagttgatgcacatataaagaaatgtaataatgtgatgacaataaatgtatatttcacagaccagcaagatttaggtgttaatatttcagcaggtagacaacatatacttaaaaggaaacttcgagctacaaatatatatacatttggtgaaagtccaattggtagcttctttctttccaaggaaccgtatacgtgagagacttccgtatcatacgattttataccaagtttgtattgccggcccttgttattagaccaatatacattctggtcttttatgcctaaactataatctctgcttctcaggcgcctggctatcacgaagaaacaacaagaaatattctaatacataagatatatataggaataaacatattttatcttcattttccaaaataaaaaaggatatattattttggcacaagttgaaagggttcatatgacatattgaaaacatatgatttcttactgtcaagttggtaaatgacatattgaaaattctggttctcaaaagaaaacatattgaaaaggtttaattgtacaagatgaatatcaaggtcatatgattcttaccgtcaagttggtaaatgacatgatggcatgcatttcaatattttattatttttaggttaattactttgtttgtgatgatgtatattaatttcccttaatataagagtctattacttacataactggaattttgtcaaccttgattcacaagttcttttaccttccatggtcagtgtacaccgtttgtctgttgtttggctacccaagaacaaataatcaatcaactaactactcttactttaagataagtgcaaatggggggatttaacacctataaaacaaaataatccatgcataactagtagaaaacaaactaaatctaggtaagccttaatgccttatatacaataaaaatgaagaaaataaaaaaatattttttctgtaaatctttgcaagaaaaacctgagtattggagaattaatatgttttattttttttactatatatgcacttttaaatgactgatgaaagctaacaaaaaaaatatttggatgaaaaatgataaaaaaaactgctttagcaaaatttaacacgttgcataaaagtagggtggttggcgggaaggtctggagaaggatcttgtgggcaatgtcgagtggaatcagaaacaggtgaatcggacagggagcaacgcagtcgtactaggctagctattttgacttgaaaaaaaaacgagcccgtgtggtcaaatacgtgaagcgaattagaacgttttctgaaaacgacgtacgcctcaaaggtccaaaacaagatctcatgagacgaggaaacggaaaccccatgacttgaaccttaattaatttgttctagtactgcactgctacttcttgagttcttatactgcgtagtagctcatctgttgaatgatgatgcgtgtacaacctctgttcctccgttaaaaaaatattaatttttaaggtataaatttatacaagtatttattcagatttatctttaaaagctggttggagtaaaagagtagtcaactaccgaaggttagatttaactagtcctacaaaactatggttggtctcctcccttaggtgaaaacccagtctagctatgggcaggtgtcggcaggagcttctgtcgttgttcacctctttggaggcttcgtcttgaaggtcttgctactctctcggttacttatgtggttcgtagttttgtcacaggttttctgtgtcttctgtgtaaggttttgtcggttttctcttagcaaaccgtgcagttgtatggttttcgatcccggtttcccttataaatagagtcaactctcttcttctaatatatccagtagaacttctaccgtatactgtttcaacaaaaaaacaaaactatggttactagtgattgtagtttcatatgatctggattcaacaaaaaaaaataatgatctggattcaacaaatgattcatgaattgttgattcgtatggaccaacagaccgtcggaccatgcatgtcgctctcattatgcataatgaaattaaatttcattatattagttttgggctagttgatcgatcagaaagctagatcacctaattaatgaatgatgtgcaatcaaatgctgagcaagtttcagtcctttcataatattattacacttatatgccatttctcatgtactttcttcaatgtgaatgtgaaaaatgttagaataacttacattgtgaaacggatggagtatatgtgtaaatatacaatttagtgatcaaattaatatactactagttataaaaaaaatcctccggaaagcaataattttttccattattttacgatctgaggagtataaaatgaaatgattgtcctatagtctattatagtttaaacacaatatatctccacaaatgatacttcaaaggttcattgtattacccaaaattctttaaacacaaatacacaatatctccacaaatgatacttcaaatgagggtattttgggtagtgaagtttgttgtacctgtccaaaataccctcatgcctctttaggctgtgttcgcataaggtggataggaacatattccctccgcacggaaaacggagcgattcattagcgtatgattaattaaatataagctaattttttttaaaaaaatagattaatttgattttttaaaacaactttcatatataaatttttttaaaaaacacaccgtttagcaatttgaaaagcgtgcgcgcgaaaaacgatggagaggggctgggaaaagagagttgcaaacacagccacagaaggacagaagggtggtcttcatttgatttaaaacctcagttttcgattgagagaaaatatgttaccacttcatgtttttcaagtttcaaccaaaataaataaaaatagaggagatttaacatggaagtttgtaaacaaactcctctaacgcacagaaacaaaaagggaatgagttactcctacaaaacacccggcgagccacggcgccgctgactgcgtagggcgggcggcggctgtctcgttccacgcacccccaccaaccccagtacccaagccaacggccaggatcgtcgtccgcctcgcgaaccgacggccgatcccgccggggcttggtcagtgcgcgatcttttattactcccaaagttccccccgacctactcctcctcctcctcctttccctccctccgcctccccccacctcgcgtctcgcggagcccggagagcagcggcgccgcccatggagtcgctcgcgctcctccacgccaagcccggcggcctccctccccgcgcggggctccgcctcccgctcccgcgcgcgcgatccgcgcgcgtctccctcccctcctccccggcggcccccgtatcgctccagtccccgctcctcctcgcttcgagaagcggccctacctcgcgggacgccgtcgtggggttgggattggggtgcgggctcttgagacggaggagcggcgctagtggtggtggtggtggtggggtctcttgcggcgcgcagcctgccgcggcggcggcggcgggggcggtgccggcggcgcagccggaggggaagaagttcctcggcgtggaggtgaagacgctgaagaagatcgtgccgctcgggttgatgttcttctgcatcttgttcaactacacgatcctgcgggacaccaaggacgtgctggtggtgaccgccaaggggagcagcgcggagatcatcccgttcctcaagacgtgggtcaacctgcccatggccatcggcttcatgctcctctacaccaagctctccaatgtgctctccagggaggcgctcttctacaccgtcatcttccccttcatcgccttcttcggcgcctttgccttcgtgctctaccctctcaggaatgtgatccaccccaccgcgctcgccgacaagctccttgcggcgctcggcccgagctttcttggccccgtcgccattctgaggatttggagcttttgcttgttctatgtcatggccgaactgtggggcagcgtcgtcatctcggtcctcttctggggcttcgctaaccaggtgagtcatgggtttggatttttgtggtcaatctaggcatgtgcaaatgtcaatttattgtctattttcagtcaaaaattgatggccatctcattagctaatgtttaacctgatgtttggctgtggagagcaaaacatgaaggagcagagtttgttgttgggtttctgtcactccgtcagaaattaggatgtgctcttgggataatgggtagttacagaaacgttggtttgattagtatttagtagtattgctcagtgtattgtcaaacctattggctaagtctaggtgcttgttgctttctggcatgaatgccttcaacttcatgattgctactttgctagcttttgttaatctgaattatatttagttggttaagttgcatttttgttgtgatatgcgttcttttacaaccacttgcctggatatggttcacactttttaactgcttttgcaataagtaatgttgattgatgtgggcctgtttgttttgagggccagagttgcagatgaaaccctagccaattttggtactaccaaaccaaacaagctgcagcctttaacataacatgtggccatattatggctacttttcttcccacaaaggaatgcctgaatgcttatattggatagttttatacatacatttcatttgtgtgaaacagtagggaggatccttgctggaagttcaagagggggaagaaatacttagggcaagatttaaaataagagaaaacaaagacagaaacaagcttttcaggagatagggatactctacacaaccatgagtagctagctgataataattcaagacaatctaggtgatagaatggcattatttcacaagtacaaatgtttgaacttctctcttatatctatctgagagaagacggtggaatagattgtgtcaactctctgactgaataattctgcataggggatatagagttttttttttctgggccatttgccagagtggctttgtgggctgttggtcatgcctgaatgagtaatgttggtgcatccgaataacacgtgtgtcctcagctatttgatttcagaattacatctgaatggtaggtgatcaatgtcctcagttatgcagagttcacagtggttgttttttgttgttcacgaagcttgaccagaggtgtataactgtcaattggttgcaagctggatggggttttctagtgttgtctgacgtttggttgtatatacctgtttaatattttctgaacttcccatcaaatggtgacccttcaggctacaactgatttcatccatccttctgcagattactacagttgaggaagcaaaagaattctaccctctatttggtcttggggctaatattgcgctcatcttttctgggcgtactgtgaagtatttctcaaatctgcgcaagacattgggtccaggtattgacggatgggaggtgtctttgaaaggaatgatgagcttagtggtgcttcttggacttgtcatcacttccatctattggggggtgaacaagtttgttttgaatgatccttctcttccgaagtctgaccgtaagaagaaaaaggtcagccgaatagttaaatgtgcttcttttttttttttactactactactacaaataatgcactaacgttttttttcaacaggataaacctaagcttggaatgaaagagagtcttaaagttctcctctcctcaagatatgtaagggaccttgctactttagtggttgcatatggcatcagtatcaaccttgtggaggtcacatggaaatcgaagctcaaggcacaggtaactttctcagctttgtttgtttcatcttcagattaatttgtcaaacagtttttctaattaagtatttctttcttcatcatggcagttccctagtccaaatgagtattcatctttcatgggtgatttctcaaccgctactggcattgctactttcacaatgatgctgttaggccggatcatactccgaaaattcggctggggagtggctgcaatgatcacccccacagttttgttgctgactggcgtcggtttcttctccctgattctatttgggcagcctctcactcctatgcttgccacaatgggcatgacccctcttcttgcagcagtttatgtgggtgcacttcagaacatattcagcaagagtgcaaagtatagtttatttgatccatgcaaagaaatggcctacattcctttggatgaagatatgaaggtttgcttctataccagattgcatatttattcatgtgattcgacgatgaacatttaaaaatatttttgcgcattattctgctttgtatactctcgtgattcatttaagcagtttgttgcttcatatatgcatatcccatgtgcatcatttagaaattatctagcaattcttgatgaactagtatctgttaagtaatttaaagcttctgtcttgatcctgtagttgtaagataacattgcctgtgtttacctgcttccattcattgcatcatatttgctttagttacaccaataagtgcaatccattggcatgagcaattgagcagtttgaactgaatgtcagttctctatccataaagtttgatgttgtgggctttgtacaaagcactagggcgagtttgcaccaccaattatgctgcagaagccaactctgcttcctctgtttgcaggtgaagggaaaggcagccattgatgttgtctgcaacccattggggaagtctggtggagctcttattcaacagttcatgatccttacatttggctctttagctaactccaccccctaccttggtggcatactgttggtgattgttctagcatggctaggcgcggcaagttcactagacaagcaattctctagcttggctaaggaagatctcaaaagggatatgtctgcaaaagagaaggtagatccttccctgctcaaggctcctgaggctgatgtattggtggagcacacaaacggcactatagagagcgaagctactgcaactgagagttcaccatcaaactcatctccaagtaattagattcatctttctttgacaaagtcaatcgataggtaggagaatgattgcagtgggtagaaataatggtgatgaaacaattcacggtttctcaagtttgtaacagtgcgcagaatcaagctgcctgtttattttgtttgtaacgtatgcaaattttgacaagtgcactgaacgccattgtggaaattcaaccgttctggcagggagaatgaatgaataggtttcccacgccttgcaaaattttccttgtgaatggattttgcttgcctattgaagtgggccatgtcaattggtaagctcttgttatcccattgctctaattaactgaaatgatgtcataacaggctatggcaggatcaaacaagcaatggctgagagctcaaagggaataagatcactattccagcaaatatcacttatattgattccagggcttatactaatattttttatggtaattctccaatcttattgctaaccacgcaccaagtgatctagggcggattctgtgtctgccatttcaagtaccggatcacatcaaacttatcatccatccattctcacttcctttcctatttgactatgacatgagaagaattctgaagtccgaagcccagtgatgactaatgactggccagccgagaggccaaaataccagatgcatgtgagtccgtcttttttgtgccggttcagcagatgcatgatactgatgtacatgagcaatccatccatcggttgctcggctgcaagtctgcaacacttgccggacgtattggttgattttgtcgccaaattcctagagatactccgtactagttagatttagattctcatcgttgcctgctgtttagtacgatccatgccttatgtgagcccgcttgctcgttcactccgttggaattttgcaattctgatgctgagccttgtttttaacgagtgtttggtccatccgtttgtgcataaatccgtgcggatgaagcctagccgcctaatgtatcttagaaactttgtgagccattcttctttagggcaaaagctagtaaaaggtaaatgcagtaactcgacgtggacagatcacctaaattcaggtccaaaactctcctattctacctacgctttctcgtttgccagtacagaagcatgtgatcaattttctcccattagtcgttctcagtactctgcaacaacagaagcatcatagacttgaccaaagcaattaagcggacacgtcaacaaaacaggcatcaaactgtccagaaaccaccttcctctgacataagaatgatgtgttgtgagagaacaagtattctacccgatctgcaactgcgtttaagataaggtaatccgtaatcttttacggctgcaaaactgtcacataaaagccacacctggatggagttctgcaactaatcgagaacagagtaccagcctgccctttttacttggtttacgagaagatgaacacaaagctacactcacacggcttatgaacaatgaacagtgatactaaaagagaactatagagaagagtgcttgcacgcacgccagtacacccctccttatctgaagcacactcactcgcactcgacgatttgtcgccatcggagaagccattgtgcaagatcatgtcgcattatgcgacggccccacgggcacgggggaggaggcccaccacttacacgggtgcggggcccattgccacgttgggcctaacaatccaattccccaccgctcgccgtaagccgcacggtgacgcagagacgccggcgagttcggttcactgggaggtggtggtggtgcaggacgaggcggcggccggcggccagaggcgggagaaggtggaggagacggcgattccggccacgttgagccccttggtgccccagtccggcacgggcacccaccaccactcgccgcgggcgcggtcgtacgacagccacacgatgtcccaggcgccacggcagttggagatgaggacgagccggaccacgccctcccgctccgacagcagcccggtcatcacggcgtacggcttccggaacccctccaccagctcgcccggcacggtggaggccagctgccagtcgccgccgacgaccgacccgaacccgtacaggtccacgccggccaccaccttcacccgcggcctgcccggctcgtcgatcaccgtcgaccggaccaccgcggcgctcccgtcgccgtacacgtggagcctgtcgccgccgccgttcgggttgtgcgggaaccgcggccggaagaagaccggccgctccacgcccggcccggagtacaccatcacgcagtccggcccggcgtgcgccgcgcacaggaacgtcccctccgtcccggccgccgtcgacgccccctccgcctggaccgcctccgatgactgccacgtgtccgtctcggactggtactcgaagaggagtggcgtgttgttcaccagctcagcgaacagaaaccttgtaagttaacagtaatcaaccaattaacaattgagtttgactgttcttcagcaatgcacagtagtagtagtggagtggagtaatacgtaacagtaattaattacgtaattactatttggaagatttccagaatcctcgggcgagaaaaagacgggtacctaaactggctcgacccggggggatcggcgacgagcttgaggccgaagcggcgccaggaggaggtgccgcgggggccgagcggggacggcgggaggcggcgggcggcgtgcgccgagaggtcgacgacgacgagctcgcggcggccgttggcggcgaagaggaaggagctgccggacgcggccaggaagtagaggtcctcgccgggtggcaccgcgggcgcgaggatggcggagacggggatgcggaaccagcggccggacggcccatggaacccccggagcgcggcgtcgcgggggcggagcttcttgaagacgaggagccacgcggccgcggggcctggcccggaggcggcggaggagaggtggtacaggcggcggaagtccggggaggagatgacgtgggagagcgggcgcgcgacggagcggacgcggaggagctccgggagggcgaggcggatgaggatgtcgtggaggagctccgacgggaggaggagcaggggacctagagcggtggtggcggcgctcgccggggaggggtggtggtcgccggtgaggtggtggtggtcggacatgggtgggggcggggatgaggtttagtttcttggggatggggttgtttgggggacaagtttcgtgggggttttgtgggtggcttttatacagagcagaggagacggtttttggttgttgacctgctaaacgaaatttgcgtttcatgcggttttaagatttatttcccctctaaatttgtactacatcgtttgtggttgagatgaaaagaatgtgttcgtagggcctgctttcatatagtttgtgttttctgtttagtgggcggtggatgatcaattccgaatatgcatatctacctagaaaaaaaagggtctaaatttgttcagtagaggcctagagggggaaaaatatttataaataaattcaaaataacaaactaaaattgcttgtcttgggcttgtgcacgtcgatttcaaaatatttaaaatgatacatcgactttgtcaaattatttcatcaatttttaggatcatttgcaccatgtattcggaatgagtgcacaagaatttgtcatgaactggaagtgtcctcagtatttataattgtgtgatccaaggacctagagtacgtgctactagaatatgtttttttaaatatacttcactaggataagtttatgcaaacgtataaaaggatattatttgtaactagtgtttctctgtggggatactgacattttgtcgctggtaaacatttttgtattgccaacattttattagtaccgtccatgatagcacaaattcctgaaattagtaatttgataaaaagaataagttgcatgcatctgctcctacaatttggatgctcacggcttctcttccaagaatatttagtcttcttgttcaagtaaagattataaatctagtagagctggcctatctcaacaaaacagggcgggaaaccaacagaattttcatggctccatcccaacaaagagatcatatataagggcgaaaataaatttcctgcatagacgtcagcaagcttatcgttgagtttattattcgttcttgagcaattgggagtttgggactaacataattagctgcattaggaagggtccttttttttccctcttaaagtcagaatcatgcacctgttatgcatatgcatatgatagaaaataaaacagaaggggaaaggcacaaaggcactccaggatgttctatccagagaatagcagaattgccacttggattatcaccaccaatttctcttctgctctttcacaggaaaatgtgtgacctgtgtgagccgtaagcccgtgacacgctaggtcactagcgtacgtagttagtctgtggcccttcaaaattttattttgtacagaggacgccaagatgaagcctgcatatcaccttgatagagaaactagaagtaagattcccttttttctttatttctcaatgatgtgtgttgattaaggcttggagtgtagagtgaagagtctcttctgtgcaaggaaggaagctagcagcagagctattggtttcttatcggaataataattagtttcccgttttttcttctagactcttatccagaggtcgatcaattgaccaacaatcgcttgcttggatactcaattatttggagttatacagctcaataattgaaaagagcattaatttgtgttgcttaggcctcggcttcacggtgatgcagagtcaatcggaagtcctggtgcatcatttctcatccctaataatagtgtgcaagtccctctagcagatgacggcaacacttaactgcctccccaaaccaacataaaccaagaaaccagagaagaacaaagcgaatatagttagattaaaataacttaatgagttgtaggttcgtgtcagactgaatatttgaggtttgcatgcagaggctacatctaaaactcctttcttcttctgctccaccaacaaatgatgagacatcaacagattatgccgacctgggtggatggttttgaggcacaagaataattattcatatacggttaaatcaaaacaagcgaacgaaagattatggccaaagattaggtgaagatgttgaaagatgcttgttttatggggtccaaagaattgctttcgtgagtggcaagaactcacgcatcccttgtgtgcaaccgagatattgttctcatgtggaataggccggtgcaacttcctttaagtacgcctacaaacctgagtttgatttgatttgcttggatttcgttatctcaggatctaattattatatttttagatccaaaatttgattttactttcgaggtactgtactaaggttagtgctaaaaggagatgtactcctattgaatatagttaatagacggctgccctctcctctacgaaaactctaccattggcagagcttaaccatcaaacaacaactaatcatagattcacaggtcgctcttgggctacctagacagcagctaataattaattactactaataaagaactcaccatcacggttgttgtaaacaatcacccgattttcagatgagaaacatttacactgcaagacatgggagacaactaataaccggattaggggcaaaaccaccccgatagtcagaaaccatggcctccgactccaagaaaagggccagattaacccataccagatctttggagacaaatcatttgtttaccgaaagtaagaacaaaaagcggaagaccaatcgaacaagacagagttattgtcctgtggctgttatattagtagtatactctgacgattgagacgggaagttgataaatttcagaaaattttgatgacaaagcaaagcacgcgctgcgcggcgcaacacaaagtttgggattattcaatggagagcatttgcggcctgtggccggcgttgtgcggtgaaaatgccaatttaattggaacatcgtgatgtcaaatgagctgaggaagaccccacctctaaaaacttgtaatattaaatcagagccttctcctaccctctagcaagtagaagacctaacctgcagattaaaccctcttgtagtcttgcagattaaccaagtggaatgcaaagctgatctaagaactgcctgaaaatcattagcgaagtaagggtcacatgcatgcatcatgccgtccgtcaccgaatgaaagccagaaacagcaagttaaaagttagtggcatactgtatagggtgtgggcaagtgctctatctctgctattttaaaattctatagtggtggcggtgactccaacactggcagacacgcggagtatgagccatccgatcgctaaatccaacggctcatatcgtctttcccgtcgtttgcatgcccccgcatccgcatccccatcgttcgcacaccctgtttttttttagcgtttctctccccctcaacaacctccaacgccgcacgcccgcaccctaatcgccgcccgcgccgtctcccacctcgccggtgtcctccgcgccgcccccaatctccgacttgtcgaccgcctccgcgtgtgccgacggcttcgccgccaccgatccggagtcgcctgagtcgtcgtcgcccccccccccccaccccaagccgatctcccacacccgcgccacctcccccatcgctgtttcatccatcttctcgtggtcgcctccgcgctatatcgcccgccgccccgcctcctctgcttcgacgcttatcccctcagccgccacctccgccgcggtcatcgacatcatcttcccgagcgcctgaggaaagggattcacgccgctacaatgccgagaccgagcggagaggtggtttgaggccagtagagctgtacggcaagttttctcttttgttgtctttcaatctcttctcccttccgatttgattttgattgtgatgagcaaactattttgacttatactacccaattgattttgattgcgatgaacgagtaaagctattttgcccatgcacatgaggtgttcgattgaatgccgcagaaacaatctgccactctgttcatggaaaaactttagaatccagtgtcaaaatccccaatgatatagtgaatcacaccctgctcatccagcatcggcttctttaacccagtaaaatgcattttaacaaccactgacggattattttgtgctgtccatagttccgatagagcaatcagttttgatcttgtaaattgtaagcacctaatttggagttcgacagctggcaacggcatgttttgtcagggtacccgtcgccaggacgccgccgacgccttacacggtgactgcttctcactgccactgatcctttctcggtcccacggcacggctgaggctgtggaatctagcaatcgatccgtattcttttaaactatatgctactgtatgtgtgcaggtggttattgatctccacgccttggcctacagcaatggacaacgctgttgggatccctaaactcatgatttgtatctaataacaggtaatgactaatgacacttcaaattgctcttcagcttttgcatccgatgtaatcacttttctgttgagtcacatccaatacttattagatgctaataaactaaatctgtatgacaacaattacagattgactcatctaattttctgacagtagatgtgctgacgttcctatattgcagttgaatttaacttcagaatattgctgccagcttccggcctcctcaacatcagatcagtgtttcaggtgtgtgtgtctcatttaaattagtcttcttttcctggtttgaaatttccgctttgcaaatggcacgagaattttaagtatacgtcagtgtcgatgaatttctcaaaacaaaaaaaagaactccagttcagtctgcattgcgtggtgatgcataacacacaatagcaagaggtttgctctgagagtcacaacgtcagtacacacatggatggtgaaaaaacactgataatttccctctgttatcctgaaagtaattttgaaccaatataaggatctggccacatgcatcgaagaggagtaaatgtgttattatgtgggatcctggcagtttttttttttgggctatcagattagagaaagcaaatattaaatgggggcaaatactagatgtttgatatcctatggtacaacattctcacaaattacaattaagaagtatcaatctcgatgagaaacagtgtaaatatatgtaataaatattgatatcaacgccattgtgaattattttgtgtgtcatggatatatgcattatataccatattattatgcattatgcattacttggaggctcttctttgcaccctcgtccgcctgtgagtcaatccttcacgccggtggcctcatcttccccacatctgtatgggtgaatatttaggggattgaattttgggtgattgttggataggataggataagtttcatttggtttgtgagtcgatccttcacgccggtggcctcatcttccccacatctatatgggtgaatattttaggggattgaaattttggtggctgttggataggataggataaggtacatttggtttatgtttagtgataggacgtaccggttggtcagatactgttatatacattttgcttatcatgaaggcaatccctttttattgcatttcagaatgaagcttcatcttacactgggtttctctgatttataatttatcatttaatttttcagcatttgattgaatttcttacattgggtttccaacaagtcgtcgtcgattactcgtcgtctggtccccttcgcgcctcctcgcccccacgccgctagccaggtaaacatctctccctccccttcccattccttcgttaattgcaaggttccccctccccccagatcgccatattcttctctcggggtgcagtgtgagatcaattaagaagaatcagcactgtctaggctagctcactgctgtttcattctctgttttctcattctatgtctaatttatcttcttgtaggctacagccatcctggtgtttttagtgctgcacctctctatatatatcctttctaggtaaattttaacccctaatgttcactttccccgagaaaatccaattttgttgctttaatttcaggtagtatataacctggttttacagtttataaactgatgcttcttgtgggatgtcatgtctctgattaatttattttttaacatatgcaccaaatatatgtctgttactgccacacatgttttatattggattcagtaaatatctcctattacttttcactgccatcactctaggaatattacactctccaacgatatatatctgagttgtgaagttactggttttacatgtctgtgtctgagttgtgaagttactgatgaaaacatccagactcaatgaagtgtgattactgcatttaggcggtctgatgtgttttgtttttcagaaatggataagattgttgggggctccacaacatcaactacaaaatcaggttagctatgtgcatgttattaactcgaatgtaaactctttgcatgctaatttcacccatgtgttcctttcttaggccctcttgctgacataaccaatataagtggttccggtttggcaaattgacggggcaaggttggaaacaagtcgttacgtgccgttgaaagatacgacgagaattgtgatgtctttacaaataacactcccaactgcttcaaatggtatcttttacatattgcttgtttcctattttaattcaatctcaatctgtatccaccaacaccaatgtgatgagtataaacttgtgatgctggccatgaagttgtgcatcctgtggtgacgcctaatagtcatccatgtgcggaaaaccgcgatgcgtccttcaatacacccagcaatgtgcatatgtgtacaggtttgcatgaagatgttagtcaccttagtgtggctgaactaaaaagaaagcgtgctagagaccggtacgcagcattgaccccagagcaaaaagatgataggaacaagaaggcacgtgaaagaaggaaaagaaagaaggaggaaactcaagtttcaggtacaactgtaatatttatctgtacaaattaaaatatgtctggccaattatgcgaaacaatattataaattctcgtcgtgtgaacagccccacttggcgatatttcaaatataagcgctgttgatataatgaagtgccaattggaagtgactgattcttccccgctgcatcaaggaagtaatgtctttattgtttgtacagtttggttgaacaatatattattcgactgaatggaaattgatagttctatgtttaaatagaaagtgaagcttcccatcttaatatcacaccaagacgtctcccatttacaatcatcaacaatgtagctcactatggtcccaacgaagtaccaatgagtcgcttcactcaaagtacctaaacatgaatacttctgactttgtagttgataattcaggtatgctaatatctttttattaatgggattacaatgctgttgccatttataaatttctatattacaatatatattactgactatgttacaacaggatgtgaaaatcaatatgaatccagtttttttgaaggcagcgatcaaaatgagtgcgaccacgatgacgacatctctctaggtaacacattttacttcatcacatgttttttttatataaacttgtcaaacataaaacctctttgcttacatatgagaagtgcgctaagttagttattattatctattcatgtttgtacaatttaatatttgaagtgagcaaacaatcccataaatctactcatgatgatgttggcacatcactagataatgaattggtgcgtgcgccaaccaatgagacaaaagaacgattgcagtcaaagctagctcgagctagggagaagtatgcaactcttacaccggagcaaaagcaagctaaggtggaccaacggagaacacaacgtcaatcactaacaaaagaacagagactagagttgaatgcccgtcgtagggttgcaaggcaatctatgccagatgtggaaatccatgatatgaatgcttgccgtagatcaagacgacaaaatgttactcctggggaaagatctgctcatctggcacgacgtaacgcactctatgcagctaggcgtgacaaaccatgcgctgaatccattgcactagagtgccctgagggatctatcccattgttgctaaatccaacgccttgcttggaaacaaccggtgatgtgccatctacatcgagcctgcaaactgagcatgctgtagatcatcaggcgcgatcatgcacattcaatgatggtatcatctatatatgttttcattcgtactcgcaatttgggggaatttaactatattccacttttagatttggcaactatccaaatgcccttcttaagtttgctcttaattttttgcccctcttagatggtggcttcttaactatttgtcactgttggccatgtggcaatccatggcaaaagtgccaattagttaagaaacgtaacaagggaatttggataactgccaaacctaaaagtggcaattagttaaattcccctataatttgtacccttccgcatactaacttctcatatctcattgtactaaagatgatatggattccttcatggatgatgactccgacgatgaatactacatgtttgctgggctaggtatcgtcgtcgtgatatcttaatgtctctttcacatgtataatttttgcggactataaatcctttgcgctaaaccataccaggcgacgatgaggatgacgagatggtacaatctgatgacgatgacacgcaatcaccgacctcttctgttcctgatccgtatgactatatgtacagcaacattccacaaagcacaaatgttctgaagcctgaacctgactgtaaacactgtggtgccaagaggttccagtacgaaccgccgagcttctgttgtcggggtggcaagatcaagcttgtacaaaatgaaacacctcctgaactgatgaggctttggacaagctcggatccagacgccaagcatttccgtgataacaatagatacttcaacggccacttctcattcactacccttggtgtaagccttgacaaggcctttgcaaacatgagttcgggcgtgtacacttttcgggctcatggtcagatatatcataatatacattctttcagtcctagagattctggtccagagcatctcgagttgtatttctacgatgacgatccaacattgagtcatagattccaacgttcccctagccttgaccaggatgtgattaggactgttgcagacgtccttcggaacaacccgtactcggagacatttagaagtctagggcaggctgaagacctcgcgaattatcgcgtgacactaaatctggatcataggttgcaccaaaggcgttacaatgtgccggtgacaactgaggtcgctgctatctgggttgagggaaatgagagaaggaagttcgagcctagcgtgacaatatacaggaacaaccgtacgcggaaatctatccagcctttctacgaatgttatgatcccctctcgtaccctcttttcttccctagagagaatggttggcatcaaagccttccaaaggacaaaataaccatggaggatgcaaacgcacggaatggcgatgatcctggtaagtttatcttcgtactatgttgccttagagaattgatcattgtgcgttacatgactgtactaacctagatgtttctcacgtgtagattgtaacagcaggatacgagtctctgtaagggactactactgctataaattccagatgcgtcgtgggattttcaatcctatacttcacggcggactcctgttccagcagtttgccgttgacatgtacatcaaggttgagagctcccgtctagactatgtgaggaacaaccagaaggagataagggcggacctgtatcaagggttgatggatagcatccaggctggggagagtcgagcaagcgcggttggcaaaagaactgtgttgccagctttgtttgtctgtggtggccgaaatatgaagcgtcgatacatggatgccatggctttagtatagaagtacgggaagccagatgtattccttacaatgactagcaaccccaagtaggatgagattactcgtgaacttgagcctggccagacaccacaagatcgtcttgatctcgtggtccgtgtctttcgagccaagttagaggacctaaagaagcagctgttcgagaagcacatccttggcaaagtcattgcacacgtatatgttgttgagttccagaagaggggtctgccacacgcacactttttgctgatcatgagtggtcgatacaagctaacgtctgcagagcaatatgaccgcatcgtctcagctgagctaccggacaagaaaaaatatccagagctatacaatatggttgtcaagcatatgatgcatggcccttgtggtcgactcaacggtaggtgccaatgcatgcgagatggaaagtgcaggaacaactacctacgagagttcaacaccacaacctcgcaaggcaaggattcatacccgttgtataggagacgtaatgacagtaagagtaaggtggttagaggacatcctctcgataacaggtgggttgtcccgtacaatccttatcttctacggatgtacaactgtcacatgaatgtcgagatttgctcgagcatcaaggcagtaaagtacctctttaaatacctttacaagggacatgacaaggcctcgatatccataaacgaggcagataaaaacggtgaaatcgatgagattcagcgctacagggatgcgaggtgggtgacccctccagaagccttgtggcgtatatatggttttgacatatgccacatctcgccgtctgtgaggcagttgcaattgcatctgccaaacatgcacatgttggctttcgatgcagacaaggatctccgtgatgttctggataaggaagacgcaggcagatcgatgcttacggcgtatttcgaggctaacaggcagcatgtctaggctcgagatatcctttatagagatttcccaatgtggtttacttggcagacgccaggtaagtactggaagaaaagagatagaggtggccaggtcgggagaattgtgtgtgcccacccggcagagggggagcgctactatcttcgggtgcttctaaaccatgtgacaggatccacctcatttgaagacctacgtactgttgatggtgtgctcatgccgtcgttccgtgctgcagctgaaagaaggggtcttatagaggcagacaacaccctcgacgagtgccttacggaggccggtgtctaccaaatgccggcgtcgctacgcaggttattcgctaccatattggtgtactgcgaacctaccgatgtccgtgcactttgggacaagcatctagattccatgtcagatgtaacaacgcatgcccttatgctgtccaacagatggtgctgatagatatccggggcatgctacaatcaatgggtaaggaaatctcatcgttcccgctccctgaaatagatgaatcacatgatagtactcgaggagatcccagagagattattgaggagtcttccattgttgtggagagagatgatatgaacctcccagaccagctcaatgatgagcaaaggtctgcattcaataaaatcatgaacgcggttggtagtgctcaggggagcgtgttcttcgtagatggcccaggaggcacggggaagactttcctatatagggcgctactagctacagtgcgtggcaatggtgatatagaggtggcaaccgcgacgtcgggtgttgcagcttctataatgccagcaggccggaccgcacattcgcggttcaagatcccactcaacattgaggaagggtcgtattgcagcttcaccaaacaaagtgggacggcaaagcttctccagatggcatcgcttataatatgggatgaggcctccatgacaaagaggcaagcggttgaggccctcgatatgagcatgagagatataatgggttgtccacgttctccgtttggagggaagacgattgtgtttggaggggatttcaggcaggtgctcccggtcattaggaagggcactaggtctcagataacagaagccactctacgcaggtcctatctttgggattgtatggttcaattaaagcttgttcgcaatatgagggcgcagagcgacgcgtggtttgcggactacctccttcgagttgggaatggaaccgaggaggtgaacaaggaaggaaacataggccttccttcggatatttgcttagagtgcaaagggaatgaaacggacctcgaaaggctcatcgataccgtgttccctaacctaaacgataacctgacggacccaaactacatcatatgtagggccatattgtccactcggaatgagttcgtcgatcgaataaacatgaagatgattgagcggtttagaggagatgtgatgacatatcatagttttgactgagcagaggatgaccctcataactattacccgccaaaattcttgaactctctaactccaaatgggctacctccgcatctgcttaagctgaagataaactgccccatcatgcttttgaggaacattgacccagccaacagccaacggactttgcaatgggacaaggctggtggttcgtcagttcggaaaaaatgctattgacgcggagattgttgtagggcagcatgctggaaagagagttttccttcctcggatacctctatgtccttctgatgatgagatgttcccatttcgcttcaagaggaagcaatttccggttagattgagctttgcattgaccatcaataaggcgcagggtcaaacaattccaaatgcaggcgtctacttaccagagcctgtcttctcccatggtcaactatacgttgcactgtcaagagcaacctctagaacaaacataaaaatactatcgatgccggtagaagacaagaaacaaaagaaaaagtctaagcgtactggcgtgaaggacaatgagaagaaaggaaaggaattgtctaaacaagctgcaacatacacaaaaaatattgtgtatagagaggtcctcacagattagaaaaggtatattatgtgactaattaaccgtccacaatatgcttgcttaaattccattcttactgtaatttttatattccatgtctaacatttcttgagtttttttccttggacagcagtaaacatttactttcttggtctgccccttctcctgtatatgcctacatccactccttccccgagcagtccctccggccgcctcctcgttatggctgactcagagaccaaaaccgttgtagtcggctgctcgccgaggagttgcaggtgatcaggtaaagatatttttctatcagtccttggtgaaccaccctggcagctcttcccttgctcattatttcttattctttgctaataggagagaagcagccaggtccaggatgaagcaattcactgttatgaacaaattcaagatgaagtccttacttgtaagctgacagttatttcttcttcttttttaaaacaatcgtagttggtttgtacatgtcttgcagcttagtactgatgttagcagatttatgaggttctgctttagttcagatttccaattgcagtttagcatttcttgtaatcatgttgtggcagtccagtttccagtggggtactgaataacacttgagtggagatcatctgaactgaaagccaacatttgagctcatgctattagcctattactatatcaaataaaactttgatctttatcaaagaaaaaaattatacaatttttgtttctatcattattttggtatgagttttccctgctcatgctaagctcacttctgccaaactatttgatgtttctagcaagagagtcaaatcagtgatgtctttatttttagaatcaagaaacatgaatattcatataatatgcaggtcttcagtgagtgttaagttttgtgtgaggacgtaagcaggagccaggaactgtgagtactgatttgtaacggagcacatttgatcagtaatttgctccatgtgaaaggagcttcggattcagattaggtcagggattaatatgttttgctcaactggctattttatttaattgcaaatttcagtttgtcaaaccacttgtaaagttttttgcatgttgtacatgcatttggtaataaccatgaagtcatcttaggtaaagagtttgagcattactgttgcctgctccttaaattttagtcagcgagttgttctgaacactaattaaattatgttgaatgtagtttccttacgatgctatatttgtcttttcaacgccagattttatcctccgtgatcaacaaaattccccgtagcaacgcacgggcaccctactagttagtagcaaatcgtttgaaagtgaaggagtcgtctgggcaatatcgagttgtcgactgctcaagtggaatcttgttgccgtactgtttatgctttaaccccccctgctgccaacagatatggtgccaaaagaggcctaatttcatccaccaaagttagtgttagtgatcgcctttgtattttatttttctttggtcggcctgtcctttttggtagccacataggatgagttgacaccttttgttttcttgccaggggttaggttttggttaggggcccatgcgttttatccgtgcgaggagaggaaagcatgcctttgccaagtcagcttatatactagtactagtcgatatgggttcagataatctatttttcaattggaaaactaatctataccgagttcttcgcttcaatattccacgctttgtctctccgctccagaacctcaaatatgttaaatacgttttgtcgtctcgtctcgtcttttaccgcaacgccgtcgcggagcggctcggcagcagccagcaggtgatcctgctttgctagccggaagacgcagaattagggggagaattagcgtacgtgctcggcttctctgccctgctctccgctcatatgattgggggtgtggaactcatcccacagccggagaagccggtgcacatgtacacacggtgccgtcgcacgcgccgcgctcacccagacaggcttggaagttggatgaggaggttgggggcaagtcagcagtgctaggcagtcggtggtgttggcgccagcggcggccgtgcagtcgcagaggaggcacggcgtttgcgggtggggtggccttgcctaggccgcgacgctgtaccgattttcttggcacgacccaagttggcctacgagaattgtgggtcggcctcatgtgattcttgccggtgtcgtcgctgggtcgacgtcggcgcgacggtgcgaggctgcgggcggcacgggctaacgcctcggcccagatctttcttagaggattcgacccagttctgcgagtgaaacagccagttttatccagcaatcggccgaggaagaaggaagttcatatggcaacgtggatatttttcttttgaaaaattccattttacccccgaactattttcgtggagcactaacccctaaacaatttctctgttcatttatcgacagaactattgaaaacgattcacgttactccttaacggtatttctcttttttctctatatataagttgtgttttgcaataaaatttggaacttttgatagattcattacaacctactctctccatgttaaaataaattaagctcatatttagattcgtagtactaggatatatattgtattaggctaacttattttttgatagaggaagtgcctcctaatatttttagaattttattaacattgtttacataggttagaagcactagggctgatttaaacatcagggttttaaatttcaagcaaataatcatgagaaaattaaaatattataaaactttaataatggtgtcatctatggctacaaaattttagcttaaaatatgtctcatataaagaaaaaaaaagaagagaaatacaattaagtagtaaagtggaacatttttaatattttaggggtaaaatgagttaggggtttacgtaatcgggtgaaagagtttggggaagtaaaatggttttttcactccttttttttccttggatctgcaaggcagatattaatagagttaataacagggtaggatgggttaggttggagaaagacagctccacccctcacccttgacctctcattcctcccccgacgaccctagggtcggtgggtcctaaccctcgaccgggccctgtcagggaagataaggtgacgtccgggaggctaccacgttagtggagcactagtagccagtagccaccacatcgatatggagggagaaaataccaaggctagctgctatcggggcattactttaccaagaagaaggtagagaccggttgtcgtattgggggagcgtcgaccgccacgacattgggatggaagaagagaagataaaggcggatataatgttgaaggagcacacaccagctgctgatattgctacatcagaatggggagaggatatcatgggatagaggcctcaagaacataccgactgcaacttgtcagggtacgaggaagccaagtagttagtaatgtacgatgacgagtatgggatttaggcataatgatactgataataatagcatgttggaattcgcttaatgggttgatggccttttttaattgtaaacattatctcctgtcttgaataattttagggcccatgagtcacgtgtgggtggaacacaccattcaaccccatgtacctgcaagtgggaaactcaccccaccccatatggggacacgatgggtatctaatttcaaaggaaaattgtcacctctaaatattatcatcaatgtatcactattatacagaagacgtgtacgcgtgtgcacaccattatgcccacacatgtgtgaatacatcctctaaaacaaaaacaaacagaaagccaactataaataaaaaattttgtattaaaaatgcatccatgtgagtgtattatggccaccaggatttcaacgctgatggatggggtgcatgcatccacaatttcatctccacaatctgtttaattcccgggacttttttgaattatttgtaaacaatgttgtgtatgtggtgtacttctttttatgtaatcgaaaatgtgcaagtattggtatatcattgtttttccccctgaagttggatatatggaatgcatttttcttgttaaaaggcatatgaattgaaaaccatttaatctattgtcccaaccgtagcctgaccacgtcgcgactccatactgtgctattacagaacaaaatggggtgcgcatggggcgactcctgggcgatgccacgtaggataggaacaatgttagggttggaaattttacgaaaaagtcctccgatttatccgtaatttgatctcggtccctcatgaacagtatctctgagctgatattttacgtggaagcccttagtaaaaccggatattccatacgaaggagagaaaaatcgtgaatttcaaaagaaattaacagaccactgattccatgatcggtctcgtgacactccgcgtgaacctctgttcagatgcacctcgtactgaactgtgcgcgggacagcagctgcagcaaccaaccgaaagagactcccagcagtccccccccccccc

SEQ ID NO: 10384 - DNA, 71954 bp, Oryza sativa
cccagctcggtatcgcgctcgatacctcgccggcgacgctccgcgacgccgcaactactctgagcaagagcgctccttccttcgccccgaatcctcgatacctcgccggcaccgcctgcaactactccaagtagggactcccccaagccagaacctggctcggtatcgcgcgcggaggcgtgcgatacctcgccggcgacgctccgcgacgccgcaactactccgagcagccccagccagaacccggcacgcctcactccgagcaggagtgctccttcttctgcccagacaggtatcatcttctctagtttttgggtatcagtgtttttctctagtttaggtatcagcttgtctctagtgtaggtatcagcatgtctatttttttcaagctataatggtttgtgttctgcttgttatgtgtggggccaaaaaatgactgaaaaaatgtgtgaattattcatgctgttgtagtttcagttaaaaaatggactcctcggttggatccgctggaagaatgatagaaaagatagcaaatgaagggagtgatttccttggtgaaagaagtatcaaagaccagtagagtggcaagaagatgtctctgttgaaagagcaatggaacaagtatcaagtcatgatgatgatgcctgatactgaatggaaagcttctgaacaattgtgatgtatggtcagagaatgtcaaattttgttgcacttgatacttgaattttatctgatacttgtactgtgaggtgatcttggtaccttgttgtgagaagtactgagttggtcatgcctaatacatgtactaagctagtcatgactgtgtagtaccagtcatgatacctatagtgaccatgtgctgtaaggtatcaggtctggtgccttggttttttgtgaggtaccagacctgatacctaggttgtttctaagcaccagaccctggtacttgtattttgtgaggctggtacccctatcctgtgaggaatcatgtctggttcctaggttaagacatggtacctgggtttttttttgaggtaccaggtctggtaccttggttgtttctagacaccagaccctggtacctgtattgtattgtgtgaggctggtacccctatcctgtgaggaaccatgtctggttcctaggtttagacctggtacctgggttttatgtgaggtaccggtaccttggttgttgctaggcaccagaccctggtacctgtatttgtgaggttggtacccctatcctgtgaggtgccatgtttggttcctaggtttagacctgatacctgggttttcattgaggtacaaggtctggtacctagtttagacaaggtggtggtagcaggtaccgtgtgcctcacagtaaccctaggttcaggtgtggtacctggtactaggtaccaaatcccattgtgtgaggtaccaaggtaccatatcatggtaccttcactggaaggtaccaatcaaagcctcctatgcttgtaggtaccaaccccattttgtgaggtaccaagaccctgatacctttcaaatacagggaaaaaatattttaggtaccaacccccatatacttattgacattttgatttcatggtttaaattcgcggtatatatttttttaaaaaaatatcacacaacaagcataaaaaaagttgagtgctgcaaatgaaagataagtttggatgtatttcacatggtgacactgcagtagccattacatggtgacatttgttcacatattcacatgatttaaaacaaaaaaaatggtggtaccaccagatagttggtctggttgttgggggggggggaggtccgtacatggttcaaaagcactatggagttgcctttacattttaaaacaaacaccatcactatactttaaatgacgcgatgtggatgtaggttgttgaagcgatggtaaatcaacctatggccggagcacgacaggtaccagtggaaagaaacgaagggagccaaaagaagatgcagcactgccgacgtggaggatggaggaatcggccggagtggagtgcgccgagtggaggagccgattccgatcgaaggaaggatgtgatgggagtggcgccgcagcaccgccggcgtgggggacggagggaggaagaggagcggcggcgcaggctcgccggcgtggggaggcggagggagggaggggagcggctgcgcacgccggcgagcgctgtgaatagaggggaaaaacacagagagaggaagggagctgtgagtagctgcaagctgtaagccgtggcgtttcggacacattaagggcccatttgatttgtaggaaaaatgtaggaattttggaggatttcaatcctatggaaaaaaatcctatgaaggcctttgagacaaaggattgaatcctatccaatcctttaaaattcctatggaatgggtaatcctatgcacattttggaggaaagttagcaagatgtctaacttcttggaacatttcctctgagtctatctctctcatctgattcttgcgtttttcctgtggtccaatcaaacggccattcctgtgtttttcctgtgttttgtaatcctctgttttacaattgtattcctgtcagaatcctgtgtttttcctattactctgttttttcattcatacgattcaaagggaccctaaagctgtcccgtgaccgcccgcaccgccacgggatgccgtgcgatagattttctgttcgcaataaaaggcgaccttccgattctccactccaaaaccccaaccaaacccctctcgctctccccgccccctccgcatcccccgattcccccgccatggcttccggtgccctagcccgcctcctcctcggccgccgcgcggccgccacccctctcctcgcgcgccccttcgccgcgaaggcccgcgcgtcgcgccggccgcaggagccggccttcccgtcggaggacgaggacgacttcgccggcggcgaggtggccgcgcccgcgcccaccgaaggcatcagcaagccgctcgccgaggtcctcagggagctcggtaagagggtccccgaggccctcgtcaagacgcgcgtcgaagatggcttctccctgaagtacatcccatggtgagcccgctcgatcactttcgatggcctatcgaaatcctcccttcctacacaccaacacagggatcggcttattttgggagatttccctgttagtttttaacgcgttgcgcgtatttgcggatttttgatgtggtttacattaatgtcctagattatacttgtagaatcgtgcttagcagctgaatgatgcttggacctaacacactacactgttctgcgaagtgtgaactacatgtaattgttggttcgttcgtgtaaaaatttgggattgattgatggagaggaaaaaatttggccacctgctgctttgagaggagctagattaaatataaaaaacttgaaggtcttgattcttgagagcaattcatcttctttttaattctcaatggtagcattatggtctcctttatatacatgtattcactaacaacttctccaataagaagggataaaacatacgatcttccttaaacaaccatatccacctagctaactttacaatcggtaatgccatgagcttcagcaaccataccattgtttgagttgggtaaatgacgctcatatagttgtatttgtgttttcacttctgatgacttttgcaggcacattgttaacaaaattctgaatatacatgctccaggtgagtttttttctggtcactactacattggctgtttacttatactcttgtagagggattagtttcaaagtgggccagaagttgagtgatcatatttgctgttttaattttagatttttgtatccattgcagaatggtctggcgaggttcgcagcattgtttattcatctgatggaaaatctgtatctgttatttatcgcgtgactctccatggaactgatgcagaggtacctattttccccaggaaatcatattttgtatagatgacaagctctctgcaactaaattactaaatgtcattccgaaactagaagatatggatgaattattgaatcccaggccttctagtatggtactattgacaatctgctgataaatttcaaactaagtatggctgccccctttttgatgcaggatttcttttgatgctgaactaggatttcatgccatagttcatcaaaatttactaggcatgctttgtgtcgtactgttatgtatggtttaggttatttagattcatatactgcattttctactattctcccatttgtaatcttccagtatgttactagttcttcaatcatggagtgcacatgctgatgcatataaatatactaatgaaattctattccaaatggtaaggcgaggatcctggagatcactcagcattcctttgttaaatacaaactcatctcaactcgaagcgttgaaatgctaggctttaacatactaacattacatagttctgtttaattaacatatggtagaactgacctatttgggatatatttctttcagatctacagagaagccactggaacttcttctgctgatgatacaggctatggagatcctgtgcagaaggctgaagcaatggcttttcgccgagcttgtacccgtcttggtcttggacttcatctctatcatgaagatatgtcataaatgcttaatgtcaattgtctgcggtattaaactcttgcatgtctcatggtgcacagacccccttttgtgctggatacacttttcttgtgcatgttatgaacgtccagcatatgaagctaggtactttaggtggttgcgtagatcgctaaatgtaagctactaatgcaactactgttgaactattaccttattatgaaccagcctgctgttccaagatatatgtccctttttcgtatcaagaaattcctggttactgctggaattaaattatttcatatgaaattcctgcgattgaaaatatgcatatgctatttattccactgattcttatgggaatcggacttctattctttctgatctataacattcttttactatatatttcatttgcatgctcgctggaaggaaacatattgcatgttagcggttgttcccgtattaatggttttgcagggtgatcaggcaagtttttttgtacagttatgtttactatttgaatttcaatccaatagaattttttgatgacgcaactgttcttcaatatttatagcaccttcttttctcttgttaggtcaaatgatttatatgtacttacttgagtttgttctaagggatgctgagtcattctgacttccaaaatttccacgactgatgtagctaactagctatactaggcaataacttctgacaaaataacagtctaaactaaccttcatcagtattttgtatattacaaacaatctggttattgccatcttcgtatagaactggacatgcaaactgttggtttatatcgattgtagttggacctatgtgctgttttaccgtaataatttgagcaaattggttatttgtccacagcttaggtatgattcttaactcaggctccttttggaattgcgttggattatgataatatcatttggtgcaactgctttttagacatttccgcattttatgcttgacttctctctctctctctctctctctctctctatctttgttgcaaaagataatgttattattgtttcccaaaaatatggaactgatgggagagacatgactgttaaataacatatttcattctaaccttaattttataggtaaaacaaactgtagcgattataagttttcattcccacaacaactttaaacaataagcacaacaccacacagcatggaaactgcaaagcacgccttgagagtggcttggtactttgtagaaaatagcagcagctgaagtgatttctttaattgtaattggtgcatcactatctcactggataatttgagtttatttagctaaaatattactggatggtggttcaaatgaactgccttaactgagtgattttaacacatacttttcacatcagtaattcctgtttatttaaattctgatttctgagatgaaactaggtaaaagataaacgagcaagaaatttgcatcacggtaggtagattttacataacattatacaataaactacaacatcaggaatggatgtggcagaaatgcaggattgaatagtaaacagttctgcttgactgcttgtcctaaaagtgtcacagtactactttattattacaatcaccatgtccgataatagtacattaaaaagcattaaggcttctctctgtacacacagagagagggaagagaggtggggaaggagggaagggagcagaaaggagtgatcctggacctaaccatggtagtgacattggggaagcaatggacatctagatgagtggccgacccaagacaataaaatatatctatgggtccattggggttaatgaatgaaatacataggcagtgtctggcatttccaaagccttctttggggtaccatcactatgttagaaatgacaggaggtagcactaagtgccaaaaacaaacattagcactcctctgaacctgtctctgacaaggggcacaggctctccttagagccttaaccacctagatgcaagctataaactggaagataaaaaaggaatgttagttggagcacctaatagttgcttactaaaggttaaaagttggttacacaagttaacacgtggtgttagataagttgctgggggctaatttgcatgggaagaggttaaagactggttacatgtcaaattgatttcctctaggtaacagcaagactagaagattagggtctgctaaatggtttgtgcttcatccagaagcacatggcctatgctaaatacaatatagattccactgacgaaattttgaagtggcattcttgctcgatcagttgtttagatgtcacttttgtccaattggcctgtatcagcatgaaccctccctgggttaatgcttgattgttagggttacttttgcccatagccttctctgctagggttgaaattaatccatgaagtccttccttggactgttgttaaattggttggtttgtgcttctctgttagtacagccccatccatgggggcattaagctttgagcccatcctggggctgaagcttatctccaatcaccacatgaccatgtgggatatggagtgtgcacttttagctgatgagcatgaggtcaacaatagtgccttctggtgttagagatggatgcatggactcaacatgtgggaaataaaaatgagagtgacgatgagaaaggagaccatggttaggccaagggttgctctggagcagcagacacagcaaagtgcgagggaatgagccggtaaggatgagcagcctgagttggagtcggcaaagtaggagctgtgagagccatagtcatgcctgtttaatggggacacacactgtgaatgtattagtgtcactactgagcaagaaagaaataatgtaactatattatgagaaaatgatagctttcttagcaaacaagcgtgaaaaagtaaaccatactttgtatcattctcattacatgtccactagttaggattctttatgcactgactgattgacaaatgcgtaaaagacagctaatttgtccttagaaatgtactggggcagactgaaaagttccatattgaaatgcaaccttttgttagggttgaaatgcaacctagtaacagctgctggattgcttttcttgttttaatattcatgcaaagtaacctctgaattgcatttttgtcaagtgaagagaaaaaaaaatctaatgtacttttgaaagctctatattttacctaggaaactaggatcatgcctacacagaggatttgaattatgatggaggtgcatatacaagagagctagtaatacctgcttgggcttgaggactcgctgcaagagacaatggccctccatattgctgtgcaaaacctgttacagcagcagctgtagaagccacagttgagaagtgaaacatctgtgggtattgcaagttgtagccttgtccacttgcatagttggttgtagtgcttcctgattgcccaaactggaaatatggataaaaggggctgcttccagtcaccatgccagctgctgctgctgccgccgccgccgccgctccataaaatgggtattgagctcctccgtagatgttgtagtagttctaattaacagcacaaggagaagataagtcttgattccatgacgtttgttctttctgatataattctgtgatgtatgttaggaactctgttataattcagttcacattacattcaaaacatacctatatgcagcttgaatctgttaggtttgcaagagatgcattttagcatctgtaactttatgtaaaaagttgaattaagtgcttgcatattctgttaagttttcttgcttcttgttgaaaatttactaatgaatttgaatcagtgactctgatagtactatattaaggcggctaaggcgtaagtgcataaccgttagcaactgttaaagtaaaggcaacaatttggtttaattgtcattttaatattttggatatgccttttacagtacataaccaataatctaattctgggtatcacagtcactatgcagatgtacaatttacctacttttaaaaggtgttctgttgcattattctagaaaatatcctactatatccaaacaagtaacttattttgttttttcctcgctccaacactagtaaatggatggtgtcaaaatgcatggtttggaaattggaactgagagagagaggagggggagaagggggcaggctatagtcccgttattagagtggtatacctcaaatagttttttttttctagctcatgtaaactatcaaacagtattgaaataccaagtttctgtgcttcctatttgacttcatgaaaatcatgtgcctctgcaacagattacatgttagacagacacttgactgttcctgtcatatgcagtgcatcaatctgggacaaagctaaattggcgcactaactgcaaaaacctgtattctggactacatttaggtccatgcatcaaaggcccaataggtgacttaggtctttatggagccaaacagaggtatagctttgaatagaattgtggacccacgcatgtgctgtcactaagtttatttggctaacaaaggggtctagctgatgggaggatggacccagtgtttaacaggtttggtctggacaagctagggcccatgtcatgtgcgcctgtaccaggtaagatagaagctgctaggaccataaggcactatacttgatggaggctcaggatggataattgatgattttttttaatgcaggcatggacattgtttggactgggctcatctcatatgggacaactgtttgaggggggttggaaaacaacctcatatccattagcgaagctggactcagaaattcaacattataatacctgttacacgtgaagggaatggttttgaaaggatgcatggcttagggcctttcagcacaatagcacataatattgtcactgaacatggaggaagctaggcaggcgatggatattcttaagagctgctaactcatgccaactgacaggtaaaaactactggtaaaggaaaatctttatcagcctgtggtatttcaaatggttcaatgtattgaaattgctaggatttttggttttctagtagcaaaagtgattattttgatagcttttctttttgtatattcatgttattatatttatataggggtactggggtagtgctacacactaatgtttatttggtgtggggctgtgggcttgtattagctagttatgtgctttccattagtaacattttaatgggatctgtacatgatttacaagtttgagtgtttgacaagcatgctatgccagtttttaagtgacggtgcatgcaggatgtcagtttgtaagtaaaacctgtgtaggatttgctatgaagacagatttcatttagtacactagagtatggagacaaaccgtccaggttggcttgaaagctcgcggttgaagaggctaatatgcttagcatttctcaccttctttgggttactgtttgctatagcagtatagtatatgttcctgtagcagcatttaatttcgtgcaatgtcttgttttgctattagatgtttatgtgctactattttctatgcagcatgtatcatatcttgattgctattgcaaatgcatactacaaaactaatttctggtacacctataagcattgtcacaatggtatgttagcttaaaattgatatgcttaatatttgtccccgcacccacccccaacacacacagaaactgatctcagttaaataataagaacatcagcatcctattatattttttatccaactaatagtacttgctggatttgcaagaggaacttactgtgggataactgtagtctggagaatagggagagtacctgcagtagttaagggaaggagaagaaataatatcaattttgtatcaatcatggttatgaaatcatctactcgactaagcatctaatagcttgcgccagagggagagtagggcgtgcttgcagtctaagggagataacaagactgccctttcatgtgccactggatcagcatgcactgccagtgccagcctgccactgtgtgtgtgtgagagaggaggggttggggccttgggggtgcaagctaaaaagcttccatgccattcaccattgaccaaggcggcatgtcatgatgcacatgtcatgcatgtgataagccccccgtcatagttggtccttgggaactttaaggggggagagagagagagagagaacttacccatagacatggtaagggagaccttgtgggatagcataatgggggaaggtggcgtgagaaggaaaagctgcgcccagaccaccttggatccctgcctgctggctaaaggacttcatcaccctaaagctcctagcccctcctgtagcaacatcgtcaagaaaattagagcaaatttacccacattgccttgctagcattatctgcaaaaagacacttgaaagcagccttgcacttgttctgatgcaccactaatgagtttattcacagagatggtcaaaccattcttcggtcgctgaattgcaagacgacataatagaagtaaaagattctctgaatctgtcccgattaatttagggttaaggtttgatcctatagtttattatctgagcctaggatttataattagtatagcgcattatccgaaacaaggcacttatttcaaggataactaacatctttgtactgctaatgttgttcgtcctccttatctacttttccagtaactaaattccaagataatatcgtcaagactatggatttttttgctgctaggtaaaagggcagtcctgtcaaaatgtatgctctgtacttagtaaaaattagttagcactaagctaaaccaatgcatttaaaaggtcctcatctaacaaggcttagccaattagcaaagttaggcaaacttgatgtcgtgttctttaagctcttatttattctattggcaggaaggaacttttttgcgcataaaatcataacagctaagtttgcgatcatgaaactatatgtggaaatcatagaaaatgccagagttagtgcatctataatgattatcacttctctttttcaagagcttttggtgttgggctgttttcaactcataagaagttgtcatcgaaggctttcaagcaagctagctaactgtgtgttctatgttgcttttgttagctggtgagataatggcaaatgtctaaccatgctgtggggttggaggcctagatctctgaaccccaagggaagccagattacagttagcccttctcccgtcgatcaccggcgcgggatcaacgcaagccctcatcgccgcatccgggtcccggaaggtaacctacaatacgaatttgtggtgcataatttaataaaaattaagcattctttgcatattgcagcaaaccaaaaaggaaagaaaaaactcgtggactagaactgaaaggtttgcaaagtaaactgctgcaattaagtgcacgtaaaggaaagatagaactgtaaatgatcatacaaatccatagcccttggatctgccagtgttcttgtcagtgataacaactgcctccaggatctccccaaactgctcaaagtacttcctcatggtctccttctgggtctcccatgccagccctcctacaaacaccttggtgtaggttgtgtccccaaattgccctatcacactcggtggactcatgatactaacttcaactcagcagcaagaaatctagctcagaaaaggaacaagaaaaaccagcaactaaggatctgaatttagctaggacttgttaggggaagattaggagatggaagagaagagaagagaagagaagagaggagggaaagaaggagggaggcaggaaaagctaaaggttagaaggaaaagggggtaggagagaggggaagggagagtacagaagggcaatatatacaagtgtctgctataatgcaccactcttgtccttttggtccaaaccatgctcgtataataatactacacaccgggagacacacccaccccggccaaagcatcagtagaatgactcaactgtccttattggatgaacagtagttacagggtggcgttgagctgtccttgtctggatagtggcaaaaacggaacggagttagggagggattccgtcgggaattagggaacttaacagaatttcgtaagatgcaggccttgtgagcgtatcccgattttgtttgtttagattggaggtaggtcattatagataatcaagcgtaatcagtctagcgctgttcgtgctctgaatgcaattataacatagtagtttgattattatattctagcagaacagaggacataatggatttatggatgtactctcttgcgtaattggaggtttatggtggacagaatgggtttatgggcgcatcaacatatcttctggtcatacttggtacaatctaataccaagcagaatatgatgtgtagagatcattttgagtactgttttgcttcaaagtggtagataagcatgggttgaggaagtgggcagaaagagtttaaaggtaaaatcactgcaccactaatataggttattttgtgctatatttctaggtgagaataatttatgcctgataggactgcaattgcagataagttctattttataaagcccagggctttttttacctgaacaaatcctttgtgcaaatcttaggctagttgtttatccgagttatatctcatgccccatttccaacccatgttaaatatcctaattcctatctgagacgttttgccaacaattgtgaaggttatattacttcactcaataaatatatgctacattaaatgaactaatcagtagagcaatatagttagagattatcagcatcactctcactcgtgatcctaggctgctagccgctttgagttggagcaaagctgtggtggaggctttcttccttgtacatcaagcacgtagaaaaatatgccccaccaatggagggagagatatttgatgatgtgcactgcctggcaaactgagggaatgcatgatgtgccatcagatctgatctggagatggacggctggagttgccaccccaattggagtggttgggggagtactgaactgtttcgaggcttgacaaggacgcaggtgccaaagcttttgcctgtctctctagctcctcctaactctagatctctcttggcctgtaagccacctctgataacaacagcctcctccatcactttgtcatgtcccagacaacaacaatacaatctttggcgccccgtgtgtatgtacctatccatgcaatatcttgctgctgactaatagttgtccctttcttttcaagacgaaaataaagaatatgcggaaagtgtatatcatgtaacatgtgtctgcaactgcaaggttagatttattaacatagaaagcatatgttcgttcatacttgtgagtacaagtacttcaaacagtctgaagcacctttggaatctgacatggtagcgtaaatactaatataataaagtaggctagagtgggttctcatatataatagtgtctaagcgaggagactctccttagctttagatactcttgcatgagattaggagtacctgcaggagagattagtatattacagaaatccatgaagaaaagtgtaatgtgcataatccgagaacattcgcttaaattatatgaatatcagtgtgagggggctatcacctcgctttagctgactgaaaatggatgtctaatgtggaatttataatctcgtagtactagctggctagctgcaagtgcagtattcacatgaactagaaataagatgtatgttatgaatcattgaattacatatgctttgatattttatcacttttgtctctttcattccgatggatgttgtctactaatcatttggctacatgcttcattgcaaggggaatcttttttaacaaccaggggagtatttctctctggagaagggaggaatcttagcttggtccagtatacagcctgacgtttgtatcagactacagtatctgcgtcctagattaacttctccccaggccggctgtccttgttgactggtcgaggtggactgaccctggagcaagggggtcttggctaattggacatgtgaagcactgaggcgtcagtccattggtgcctggtcctgtatgcaagtgatcactgttcacatccaattctgctcttccaccagcgcactaaagtttggaactttggatactctctagtctgaaccagaatccagaaaacttggtaagctgctggcacatctcgtagtacaattggtaagttctactgcacgatgtttgaattatgggattgaatgggggaattatcggctagctcaatcactcaccagtgatatactgtagtagggtttttctgccttcctttacatgatttccatcatgccgcatttggtacgtatgtatttcgagggattttcactaacaaatcaaccattttttttcaggaacagtagaatctttgaaaagaaaagcgcaactgctgcttatctttgaaaagaatagtagtacttcgtatatctgttgtcagcgtgtcgtctttcgcccgatgaatatttgttgagacttgagaagggtacgtaaacggctgtgcccatactgcgcagcaattaggattccacatttccactacccaactgtccaagcttccaacctgtattattctggttaggagatattgggcggtgccactgacgtaggaagacctcgctaagtctttccacttgtaggaaaagattgacgtaaagagagaatcgtctggaattttggttggtggtgcaatgaatttttggctgctagtcgaacatagaacatgcccaattaaagcctcgtaggattagaatttttatcggtaacatacggcctcttgaaaaatctcatctaccaatatcttacaagatctttatacaactcaagttcatgagttatagtagtggtactatactgcggagtactctacaacttgggctgcatgcatgcatgattgcatggacctgactactgtccaaattaacgtaacgtgagcaggggactgatccgtttttcgttttgaccactggtccacggttcaaaccaacagggcacagcgtgaacatgactccggtactagtagtaggagtaggagtgcacaataggctaactatacctctgagcactctgtctgtgggccacgtcgtgtttttagccgcaataattcaggaaataattgggcagagagagagagagggagagaggaggggagagaagagctgaggctgtctgtcccacgtgactggacagagtgcccccctgccggggaggagaaaccagctgtaaagcggggccccctcctctatcgaggtcacttgcgcgcaaaaagccaccgcccactgcctccccccgcgggctcgccggcacgtgcggcccaggtacggcccgcgtgcaccgtgctggccgcgcggatcctcttcgccacgagaaaacccgctacgcgcacaaaccacacaacccaacgggaatgctatatataccacttgacacatttttgagcaggtacagtagcaggctataagccagctgtaaacatattttaaggagataagtgaggagagagaagaacagcgggctatatatttatagtcagctgtagcacggattccaaaacacagtgtgtgtatgacaggtggaaccaagtattaatagtgtagtatgtaaccattgtattaatgagctattagattagctatagatgaattggagctagtagttggctatactattaaacttgctcttagggtgaagatcactcgaattttgagccttcagatatgctctaagattcgtgcttcgtctgtctctgataagccctgaactacatactataatggtttcaaagttgagggtgagagagaaaatggggtttggaggcagggaagtgagaattgttccctagctaagaggaatggttaaggcggtgatagtctgatggtggacccacggtcatggttgggcggcgagacagtggtgttgtcgtctcgacgaaaaaaaaaaggtgattggtctatattggcgatggaagcatggatccaaagtggttaggtgaccgtggtgtctccggtggtctcgaaacagggagaaagcatggctgggggaatggaggagcttgatcggatgtatctcgtcacgtgttggtagtggctcctggcgctagcaaggtcgaggacggcacgctggtatgggaagacggttgcaatggagagggcatgaggatcgggagaagaagagcctgtcgcgatggtgtcgtgagtgaacgagaagaatataatgacgggttggggctagagaggtgttgaacagatcttaaagtagtctaaaacatccaaagtcgtgtgattttaaaaggggaaatgtgcccagcgatgtaggataggaccatttttaggttgttgtcaaaaaatatgtttgaatggtattagtgtatatttggattaaacccaaataattgataattccaacggtcagtttagcattaatttaaaaccttcctctccatatgatcaatatttggctttatactagtatcattccaaatatgtgtgatacatgcatatctatctaccaaaaatattattagtaccaaaacttaccaagaatagagtagtggcggacctatgcataaactgtggggtcagctgacctcacagctttttgaaaaataccactatagactttcattttcatatataaatccaaaataattaaataaatgacctcgtttaagtacaaactagtaattgaccccacagagttaaatttctacttcgccagttgggagagaaccaaaaatcccccgtaagagcaaggctaataatacagccgacctgttggttataaggttctttgtagtcttctttcaacctacccatatactcccttcgtcccataatataagggattttgagtttttgtttgcactgtttaaccactcgtcttattaaaaaaattgtgcaaatataaaaaacaaaaaaataggcttaaagtactttggaaaataaagtaagtcaaaaaaaataattctaattttttttgaataagacgagtggtcaaacagtgcaagcaaaaactcaaaatcccttatattataggacggagggagtaataattagctctttacaattaatacatgacccacttgtctctctcacagagctttttggttcttatgtctaagctgactgtaagtttatagcccacttctcttagccggcatatagcctactgctctaacgtatggacgtatggacgtatgcacagcaattccaggctcgaatggcaagcagtgcggcgttggccctaccacgcggcgaatcattgctggtgcagatctcgagggtgaggaggagggtccccaggccacttgtgacaagcgtcgcagattctgaggccgccgcccctccaaccctccctccctccctcgtcctcccgtagccggcagcggcagcggcagtggcgccgcgcggcgtaggtaggcctgcgcggctgcgccgcacgctgcatccatcgttcttgcccgccgatctcaccggaaaagccgagggggggtgaaagacatcatcgctttggctcagactgccccttctccggcggtccggcctgcacttccactccgtacagaggcacagccagttataattaactgaccaaaatattcctgcagcggcacatcgcagttggcagatggccggcttcttgtcaacgtcattttagatgattctgccgtagaaacgtgtcattttccacaggaaatcaggatctaagtacatggtcaaaatgggactacgtaccgtaccgtaccgtcaacgtgacgatcctggaggtaaatgcacgctgcatgcgctgtagttaagtccataaataaatactccctccgtcacatattacaacagagtttgaagagatatgatatatactaggacaacaaatctggacatactcctatccagattggttgtcctagtatatatcgcatccctccaaaatcccttagggcatgtacaatggtgtctaataacgggctctcttcattgttatgcaagtaaatttggtgacgtggaagaaaaagtggaaaggaatgagaaatattattgctacgcatgacaacggctcagagataactcttaacatttattaacagaaagtttattgcatgagggtagagaaaaggaaagaagtataataataacattatttatgcattaatggtttagaatttttattgtctctaatattgtaggagaatagtctctaattacattaattaatatagagagctcatattagtctctacctttgtacatgaccttatattatgagccagagggagtatgtgtcatggtgactgtggtacgagtttatttctttcatcatgtacaagacaaattttaggttgtgttcggtggtgggtggtgggtgatgggaaccggagcggtctattatcgcgtgattaattaagtattagctttttttttttcaaaaatgaatcaatatgatttttttaagcaactttcatatataaactttttacaaaaagcacaccgtttagtagtttaaaaagtgtacacgcggaaaacgagagggggagttgggaacggctggtatcgaacacggccttagtacagaatataacacatactaatacgggaggtttgttttttaggatgaagaaaatatgtgtatgtttggggaaacttctaagctagtactacaatttcttttagaatattcagctgtcagaaactatctaaataatccagatttttataatatgtaatcgtagaatttgaaaaaaaaaaataaaaagttaaaaactgaaaataaaaataagtttttttcagattttttaccggctgtttattttaagtgccgtctatgtgatgctagacgacagcagctggaatctacagccatgcaaagcacatggagtacatgattgatgattccgtctgtgaagacgactaacctgatctctatcatttgacgctaaaagataaacatgcatatatgcaggagattataaaaacggaacgaacccgacaactcgaagatccccgtcgtgacatagcgtatggtcgcgtggatgtatgtatgtatatgccgtcgccaacagtgcatcggtcgggcaccttttggcgttgcgtccgtagcggtgaaccgtgaaagatatgaatatgatgagccaacggctgggacctttttctccggaatgtgacaaattatgtacgttacgggctcgtcaaacagccacgttgcctctcatccgtacgtactgcatggcgatgttggagttggagacgatgaaggacgatacggctatgtgactttcatggataaattagtttttgcctggtcattttcattagcttaacaatctggtctttaatttggatttattagttggtgcgtgtaaatgaacagaaatggcaaagatatactcctttagtcaggtttgggtgaagcctgaaacagagctagcaatacttcctttagatctagggttaaaaggctgagtttcagagtgtttttcggattagctattctctcgtttatcattagcacatttttactaatatcttacgatgctatgaaaccaaagacaacaatttccagtgtaaaacaattttgcctttttacaaatacttcctatacagaatttttttaattaaataaatctatttttaaattgtaatactcaatgctcaaataataatttgctaatagctcgtctgatttcacgtgccgatgaaaatctagtccaagcagccatctcgaacgaagccaaaggatactctacggatacacggcctaaagaatgcataccaacttgcatataaaaaaaaattctgcaaaaggtatcgcctagagcatataagggtcggagacgcacccaattatgtaaggatttcatgacatatttgaactcaactagaatggcacgggtacatgacaaaaaatcatgagtctctcaagacaatggagcctacgagcataaataccatcgagatacaagcaaagaaagatcccagagactattccaacaatcacttttcaccaaaccccttcatcgagagcgtcaacaagttactactctaccaggtctaaaatatagtttgttgtactttgttgtacacatactttccgtaaaattaataggttgtagagttataatcttgaggtgtatgtgccttatagttacatataagaaaagggtaacacaataggaacacaaaataaacgaaactcccagcaatatatgagatgacgacacctttagctttaatatcataaacccgcaattcacactagttcattccatttgtactgaactttgatctgtttactgtcaactatttcgatggcttgaaagtatttcctaccaaatagggaaaagcctctccaagagtggctgaccggctgacgggtatatgggctatggtccatgcagaccatggagagtggacgctcgctcctcgtcccaagcaggaatataaattttggttcgaaatttcaggaatattcaaaattttgggaatttcatccctttccgacaagcaaatattctgatcgaaatttcagaccttttcaaatatttgtaaatttagtcataatttatttaaattcagtaaatatatgttaaaaattttaaaaaatcgttaggaatatccgaaattccggaattttgatgcccaccgaaattttcttcctttcctagagggaaaaccccggtcccaagtgctgtggaatcggtctcccaccggcactgcagggcagtaccagtactgcaccggtatacacaaaagaatgcaaaagagcaacagattaggagtaggagtacgtatgctaaaatagtcggtggcagctggctccaactgtaaggaaagagaggcttctttgaccggcgaatgtgacagcccatcgccccatccacccatcaacagcggtagagaagaacatgcggttaaaaaaagtttcagcgacacaaccaccacagcagactcctctccttccttgcttgcttgctgcccagttcggttcttcagttactggagtaccagtaccagtaccactggtagtactcatcactcactacactgttcacaatttcacgcgcacagcagcaaagccagccccgcagtaacagcaacagagagagaggatccgagaccattctcctggcacgtagcgtagcaaaacccatgacgttgctgcaagcccgcaacagctgcagacaggggcggagcccaataggcccggggggttcccaggaacccggcccaatttctgaaataccttgttacccccataaattcaccacatcagcaccccctcagcccaaaaccaggaacccctccttcgtctggcccaaaacaaggcccatcgatgtgtatctgttagagacagcccagctgagaggagaggaggagtcgcgcacgtggttggatccacacggcgcagcggcggcgtcgtttcatctcccaaaatcaagcgcgtgattatttctttctcctcgtccgtcgccgctgagcacctgctccacgcgactccacgaccggcgaccacgcctgacgtctccgactccatcccgtcgtgcgcccgtcaccgttcgcccatggaccgccacagccgtgctcgacgcggcgaccgcccggcgctcgcttgccgacgccgcccgtttcccacacactccgacgactccgcgacctatgacagcccctaaatcctatcatccaatctgccactctgtaagtcatgtactcctacttcttctctcttccaattttgctagtttaccattgatttaatcttaattttcttgcttgcttttgcgatgaacgcagccattcagggcagtctgggagtagaagtttaggacggccggcgggcagcggcagcagcaagctggccggcaatggctggatccatgagctcgccggcttgccctcattgactcgtcaaatccgcctagtgaccacaagtgcttctatcaaaaatcacatccgatagccaccacttacaacaagtggtttatcggttcatgaatataaccaccgcaaatatgataaagattaataggtaactgtttttatttatgtcaaatcatttcatgacttattgtttgttgataattaaactatgccttgttgcatggaggaatgaagatggtgacatcgcattttacatgatatattcatttgttttgggtatggagctcatgacacattattaacttcatatatattattatcagttggtttcttcattatggtacgtattttttttaattttttcatgcactttctcatatattgtcattaattaggaagatgatgcttatatgtattgagtatacaactatttagtataatatcgttccagagctgtacatgtcgatactacgtaaagaaagttaggaacccctcggtttttctctagctccgcccctggctgaagatgcagatgcagaggcgcagctgtttggtattgatcgtcgcatgtgatgcagagttgtgtgggtaaaggccgtgtcccgtactgcccgtttctgaacccgagcctgaaactggagcacgcatggtgtccatgccctgtactctctctctccctcttttgcaggaggaaatcgagggtgtcgcttgcattgcattgcaccgctcgagagacagagcatgccgtgttctgtgttttggtggcaaactggcaactggcaaagcaaatgcaagttcatgttggttcttctgatcttgccaaagaaaccactgcagattattcagaacggtgataggagtagcacacattacttccttttgtcgtggggagaaaagttttataatttagagatgtggatgcgtatgaattggttttacaacagaaaggctgccaaagctgtgctcctttcattttcgtacttctgtctttttatgagggaaatggttgggtgctagcgcaacaaagctgatcaagatattctgtccaaatcataggcgatatataggctcattttcatagactaatcaactcttatatattactctatttactatagtgtcttttattccaaggaattgttgtttacttgttttttttcctccctttcggttagggagagaaggataggtaggctgatcgccattcatcaactaccgcttcccaaccactgccttagaaaaatggcctcctggaggctgtcataatccgggcctgatttacatctgggccaaataaaactttactatgatgcaagtccaatagcccaaatcaaacaaaatgtgcagtcttcacactggtacattttgtcagtttgttttgcaattatccttcaaataccatttattatccagaaaattcatttacaaattcatccatcaaatgccatttattattcagaaaattcatttacaaattcccagtgtttatgtatgagtatgagtcggactatagctgctcaaaattgtactggcaacgtgaacgaccgattaggtttcttacagtgaaacatgtttatccgaatttaagttttaaatttagcatatgttttttatttacggctaattattttattatggtagatgacgtattattctacgagatgtcgtgtatatgggcgcatgcgtcggtaccgtgtttaggaaaaaaaaaaggaattgtacgggcaacgtggcatgcatatgacggcgagattttagaatagtgttttacagggctgccctgtttgtgaacacacatgatcagctcgagtccatgtttgaaacagctcccaccctgcaaattcttgtaccctgttgagtactgtttcttctgtaccgtagttcgtggtaactgacagatgctggcatagtggcattggtatgtttctcaaaccctgcattgggcataattgcattaccccaggattaactagcaagcaaaagcaatgtctctcatcttcggttacagcggtgaatgggcttatcgtcagggtttagtaacggaaataacctagctcctagcatatcaaccatcaacaattaaacaaagctttaatttttttttgttaaagtttgctcagttttgctaccgcggtaggaagaggtaacccccttaccatcgttaagaaaacccgctggcaagcgagcccaagttttttacatgaaaacaaaatcaaccagcaaagcctttcacagcaaatactccgtaaattgtactccatgttgctaagacaattacgatttaacaagacgggcaaggtttttcatggacagcacagcacgtagactaaaacaaactatacgtgtaaatgtaattacagttgcacaagcgatgtgccgctcatcgctggacacaattgaagcctttgcacacgatcatccacacgacgaacaggacgaggaacagcaccaactccacgccgatcacgaccttgctgtagcgccaccacgagcgccgcgttcgccgccgcgcgccgtccgccgcgacggccatcgcttcgccgccacgatcatcctcctcctcctcgtcgtccttgtcgccgtcggcgctcgacgcgtcacctccacctcgtgagtcgtcgccggggaacagcgctgccgtccctcttcccgcggaggcccgcagcgcccgcacgaactgccacacgacggcgtccacggcgtcgtcgcgctggttgcgccgcctggtcgcgccgccgccgccgccgccgccgcagctgccgaacgcgtcgcggacgcgctgcaggaaccggaccgtctcggcgctgccaggcgtcgggtccgccacggcaaagtacgtgcggccgtcgtccccggcgaggaacgcgaacgtgcgccgcccgacgacggtgtggtggtgccagtggtggtgctccggcgcgtggtcgaggcagagcgcggcggtggcgcgggccacctcctccgcgtcgtcgccgtccccttccgcctggaagtaggacagccggtccgtcctgcccctggacgtcaccgccacgcagaagaagacgccgccgccgccttcttcttcaccggcggccgccggctgcacccccgggctctccatcttcatcgcctcctctcttggctttgaccggcgagaaatcatacacactccaatggattcaataagagtcttacccagaaaagtccttgtacgtgcgttgcgtagtcttggtcttcgatgttgtcagcttgcaatgccgagagacagcgtcaaacgagcaagtgcagcagtacggcagatgcaaagtctgcaactgcaactggagcaacaagatccaaaacgtttttttgcagaggaaagatgccgcgctagcattggttatgcacaattggtttcagttttcatattgctctagttgcaacggaaaaatagcacaatgcagagatggcatgtgacttgtacatgctactactccaagaagtgaaggaaagaacccctggaggctaggtttagtagagcatcagaagtaacttacactagaggagatatgcaacgagaagcagcacctctgatacgtgtcttgaggtgtggttttcaccttgaagaaggttaatcgaggggacccaaagtgatgatcttttcagtagaattttcgtttcaggataggataccttttgggttaggtgagtcaaaatgggagtgttttagtgccatcctgtctacctgtgaagttttgtgtgtctgtcttatgtgttttttggtataggtggaacacaatggaactgcactagtagagaaatgatcaaaatttgcctagctccaacgtatgcatcacctcacctaacacataaaaaggaatgcaatgcccaagataagcctaaaatttactagctagcaatgacaggtgacaaacgaatagagaactgcaaagcgaaacatcagccaagccactaccacttaaccatcacaaaatagggttagttggcaatgccacattgcagcaacttgcctgtccctgacactgacagagactcatttctgtgatgtgcacggacaaagaagtaaagaacagttgacttgattcggttccataaaaaatctacagctgatgttgagacatcaacatcttctagtattacagagtaacggtcattcaagtacacgacaaagattgctttcaaggctttaagagtccacacgcacgcttcccgaactactcatcggtacgttttttgtaaaaaaattctataggaaagttgctttaaaaaatcatattaatccatttttgaagtttaaaatacttaatagtcaattaatcatgtgctaatggctcacctcgttttgcgtatcttcccaatctcctctatctcctctcctcaaatacagcctaagcgtgcatagctcattgtttcgagagttggaggaggcgtagtacagccttcgctgttgcagccctcccgtccccaaagaagagaaggatgagtgttgtactaagattttctaattaccattcataaaagagagccatattctgtacatgtatgacaatgatgtgcattaagagatgaaaatttcagggagctaatcccaaccagcctactctatcaacaactcaacataccagattcccttctttggtgcctagtaggacggatacaacattggttgcctcggagctccatggccagcagcattcaaaacataatctccatacctaccattaacaatagaaccaaatatgcatgtactgcaatcatacgtaccattgctgaaccctctgtagctatgcacgggtccaactggtaatgctggttagcaaaagaatagtaggattagattaagagtgacatatatgcagcgtacaacagtacatatagataggcccaggaaataatctcaccttggggattagcactataaggataatagtttgaaaagccataatctcttgtcccaccatttaccattggatccgctggggtatgcaatacatgcatatcactatgatgcacaaactgaggctgctttggtaatggtacaggattgagtttaggcattactggattattgccatttgatgagggtttgtcttgtccagagatctgcaaaagacaatgatataaattcagaaaactgaccctcttcatatccgcataaatatagataagtatgaactaaaacattatctaaaggatgtggaagaaattcgaaatcagaattatcaatcttttgggaaatcagaattatcaatcttttgcgaaattgtatggcacagaacacaagaacaactactagcactctaatttcgcaagctgtaatcatattggtacagtttaatcataagaagctgatgatcatatagaagtaacacatccaaacaaaaaaaaaacagataaaaaggaaacctaccgcaaatttgagtgttttaccataaagccgaacaagtcctgaaaaaagttgaacagcatactgtgcgatttcctctgtttcatactcagcaaaagcgtaacctttgggacaactagtttccttgtcacgaggtatgcataggtctactacacgacctggctgaataagaatctcatacaatattctttcagttaccttttcatccaagttacctattgtaggaaaaaattgcaatataattaatacaatactctgatacagagaaatgaagctgcttagactacataaaacactagatatacaatatacatacaaacaataccagatgacaccaggactgtccacaaaaaacattgcatttgcaggcaaataaattgacaaggttccgaataaattagcatagcccagagaattgctaagaaagctaacaactggagaaaagttcaatagactagagccgctacagattcactaatgcaacaaacagtaaaagactaaaagttcctcgcaaccaaaaaaaaaaagagagaaaagtggaagttcagtatctccatgccaggtaagtttaagaaacgtgtagaaattgaaatgctacttgtgaaacacagtccaacgttattatcaagtaaagttcatagcagcaacagtgcaatcacttgtcaagctttgatactagcatctagcagctctatttccaaatgcactcatcgttttagccagtaaaagaaatacaaggggaacaacaggaatcctttcaacgatacatttgcagttgcacccatcagaaatcagaggaacagcaaccacgctaaatccacaaatcacgcgtaaccacgctaaccgaggacaccacggaaacatcatacaacttaaccaacctaccaagtaccaaccaactaattgatcaatcaaatcaccgaggtgtacatcaatctactccaatccgaactaaaaccaaaatctgaagccaccgcgagcgccgcggggagggggaagaggagacagacgctcacctatgtagacggtgcgggtagggttcctcgccatggccgcccggatctgggcgtgaagctctctcgctcgcagtcgcgccgcaatcaagagggagaaaaaaagcccacgaaagtaagaaaccgcacggacaagttggggctttaaggctccgccgttcgatggcctcttgcgcctcgagattcggaaacgggttgggcccttgccccgaggcctcggtgcaaacggagacggagatgatgctgggctggttgtgtgggcccctttatcggtagttgaataaatgggcctccgccgcgctggtgaaaacacggcccatcgagtcaacgggttaactattattgacccgaggagagagagaagggaagacgtacagtgctactccttgagtccacgtggaggctcgctgttggctgacacgcgtggcgtgcaccctacgtgtaccaagcaagcacagctgtgacgtgtatgcttcaactccggaattgacgtggaaccatccaactacaactcgacaaaacctacaattgaagtagtactactagtactccgtatatttattggctgcaaaattcttttcttctagtacaaccatctttgtttgcgtaacatatcaaagtcggcttaaattattttatctaaagcatcatggttacacactcagtaccccatgtttttatatatgatgtataccgatgtttactcctactatataatcttgtagtaatataaatatataatgctacaatcacatgataatttagttttatttttgcacgggtgacatctgccgtagttagaaaaaaaaaaagataccaccactggccattaaacaaaatctacacatttgagactaaacaacttgattgtttggcactgatttttaacaatcaataaagcgttcgcgaaaaaaataacaatcaataaataatttataggtagaggaaaactctcacatatgcgttcttacggatttaaaagctaatgggagattgtttaaaatgagaaaaaaaatccttaaaatcaaatcaaaatttaacttttcgactgcggcaagtaaccaaaaagcaaacggtgagcctgaaatggacatgatttctctctctggcttttgaatttgaactagtccacccagcaaacggtaataagattgtactcctccacgctggacggaataaacaagggagccaaagagtccagaagaatccacctcaccaccacgcgcaccggtaacaaacaggttggcattggggattggacaggtctcacgatttcacaagtgcgaacgggggtggagaagccgacaagatctcgcggtacaaaagccatcaacgccttcctccccttcctccgatggagccacctcaaaagcccccgcccatccaccgccacgcggcgatccaacccccttccccttcgccggcgcagcatcggacctcgccgccgcggcggttcttctgagcggggccggggcggggcggcagctggggattcgtcccgtgccccgtgctcttcctctgcgtgggccggggcggagggagggaggggaagtcggtggtgaggtggcgtgttgtgtggcgcagatgtgagggcggaggaatgcagaggtcgcggagagcccttctgaagaggaaggcggcggcggcggcgaaggaggaggaggaggaggcaggggtgggcgtggctaccgcggcggccgccgggaggaggcggcggcggcggctgtacggcttctccgtctcgcttgtcgtcgcctgctgggtcgtcctgctcctgctcaaccccctcgtcggtcatgggaacggtcaacgaggtacgatttcgttttggccttcgcggaatcaatttttgatcgatcgtgcttggtgggtggttgcgtggtggtgcgaacggtggttggggaagatggtcgttcgctgaatcggccgaacgtgaatcgcaatattacgcggttacaacatagatctatatatgcgcgtttcatttctgaattctgaataaacatcatggttttttgatgtcctgatgaaatttccgctttaattttaccatttttgaaagatatcgcatgtcaataattttcaaattgacgttatgcgtatttctcggtgtcgattgggctcatgttcggtgctgtctgatttctgcagatgaagggatttttgcggatgaaggaagctctgatccctcgtttgattctgttgagcctaccttgagcgaaggctctgttgattcagttgtacagcaggagaatggggaaaatcatgcgttgccaggtgatagctgtgctaaacccgatgaaaatcatgtgctttctgaagagacactgctggagaaagatcagctttgctccaatgatgaggcacagggtgatagcatggatgctctgcccaaggataacgttgatcagggtgagaatcttccacggacagatgatgattctgtagttcatccagagggggaggtggagagcgaaggtgttccaagaccagcaaggttatcacgagttgtccctcctggtcttgatgaattcaagacacgagcgattgcggaaagaggaaagggtgtccctagtggtcaacctggaaatgtgatccacagaagggagcctagtgggaagttgtacaattatgcctcggcagctaaaggggctaaggtcctggaattcaacaaggaggccaagggtgcttctaacatcctagacaaggataaagacaagtatctccgcaatccttgctcagcagaggggaagtttgtcattatagagctgtctgaagaaaccttggtagatacaatcgcaattgcaaattttgagcactattcttctaacttgaaagaatttgaaatgctgagcagtctgaattatcccacagatagctgggaaacactcgggagattcactgttgcaaatgccaagattgctcagaattttacttttcctgagccaaagtgggctagatatctgaaactcaacttgcttagccattatggttccgaattctactgcacgctcagtatgcttgaagtgtatggaatggatgcggtggaaaagatgctggagaacttgattccagttgagaataaaaggctggaacctgatgacaaaatgaaggaaccagtcgatcagcaaacacaattgaaggagcccactgagggaaaagaatcctcacatgaacccctggatgaagatgagtttgaactagaagatgataaactaaacggtgattcatcaaagaatggtgctcatgatcaagttaccgagacaaggccaattcaggctggcaggattcctggagatacagttcttaaggtactaatgcagaaggtgcaatctcttgatgtgagcttttctgtcttggagcggtatctagaagaactaaatagcagatatgggcaaatttttaaggattttgatgctgatattgataccaaagatgcactcttggagaaaatcaaattggagctgaagcatcttgagagaagcaaagatgactttgtatgcttttctattcacatgtatttttctttcttcttttgttggcattactttctttgccttatcatatattcattcatttcaggcgaaagaaattgaagggattctctcatggaaactagttgcttcctcacagttaaaccagctactcttggataatgtcataatcaggtttgtatagttaccgttttcccttttgtgtttttactctattctcgtattcgagatataggtctatcccgagttggcttccgtgtttgcttgtcaaaaagtgttttccttaattcttttttctgttagctaattatagcttctaatcgtactattgagagttcagataaactacttgaactgctttggtattaatgaataattatgtcggcttgggatgattataactttgtgattcatgttatggtgtctctgcagatcagaacttgaaagatttcgggaaaagcaggctgacttggagaatagaagctttgctgtaatattcctgagttttgtttttggatgtttagcgattgctaagctgtctataggcatgatatttaatacctgtagattatataattttgaaaaattcgatagggtaaaatctggatggcttgtgttgctgttcagcagttgcattatagcctccattttgataatacagtgatgtacctatcaactccatataattgcggctgcgctttgtaattgcctgaggtgtctaattcaaaatctattacaatgcatctttgagatcttacacaagggagtgtagttattataactcgtcggcgatctcagtttggagggtagaaaaggaaaaggctgtggtacccaggtcatttttaagttgcagcaagctaccagtgctagattatttttgtcagctgcatggtcctctccagtggaatgtagaagcaaatctacctggaaagcatgtgcatgcacctggagccaggcaatttcttttataagttcagaaccatgacaggcctccatgtgcttccttgtatattccaagaagagatggagtaatatatatcttggcatgatcgctgtgcactcgatgttcttaatctgagtggccttcctgcctggtgcacatggcctcaacatcatgttgctttacaaggcagtactccgtttgcttccagcttgagaggccgcattgataactgctaacggtactgaatgaagtcaatgacctcaaacatgtactacaaatgtacagctcttttagttgaaacagtactttgcactggtttgctgtaaatttgttggttgcttccagttccagatctcttgatagccatttttgcacatatctataaattataggagacttttgcacatatctataaattaaagtaagtaggcttccatgatgtctgacatttattttagggactacctattgcacgatacagtacttatttgtgatccctggttactggtcaacttgtttcatagaatatacattcatctgctttcattagcaaactgttggctttcttgcccccatggatatcccagttatccacagttttgtacgacattctcttatgtcaacttcagcattacttttgcttgcttcttttgttattcccttaaataccactcttccgtctggagcaacttgatacggtgggctggtggctaaaaaaacaacctataatagcttcctttttttttacgcaaaaggtgcttccatttttcaagcttgcttctgttatctctatctcaagtttacttgtaaatgttcaaaaaaaaagtttacttgtattatcaacaaagcatgctgcagatttagcctcctagctgggtaatcattcataatctaattgcttgggagtaaattactcatcgtatcttttgaccactttgttcctgcgaatgaagtccgtacgggactatgccttacatcttaattgccatcttggctttggattgctataaacagcagactggttgccaggttgggcattggtgcctgcatttgtgctatggtttcgataatttatttaggggtatccgggtatggttggggaattggtgcctgatgggaagtgatgggaagagccgagcatcagaagatctgagcccacctgcttagattataactcacttggcccacccaatcaaggcagggctacgtatcagcccagaggccagagcccccagaccactactgactcttgaagcccaatgtaaggccttatttccattcctcaatgtatgaacatcacacttagaaatgttttttgtttttcaaaaatgaaaacatgaaaacaaacagaatttccacttatgaataatgaattcaggggtatgctcattaatggtacagtactagataaaatatcatacactttaaacactactacatgagtctccctcagaatcggcatatgcctacacgttttccttcagatgacacgtctctctctctctctcttcgatgccatcgatcatcagcaaagtgatgaacataacttagctcctgcactgtacgatgattggaacttccaagcacaagaatggcccaggcagagaatccaagttgcacactccaagaaacgttgcaaacacacagcttgcaccggcccgtgacccgtcgttacccaaccagagacaagaacaataggcaggtcgctgtcagcgtcggtgtgtttgcaccaattaaactctggacgacgcaagatcaaagatgaaactttgagtggcatccacacaaaattcatagaccatggtaaaactcgtgccctggacaagcgccggattcctctcctggattcaggaaatcatcgacgacttgagagctcgagatatagtgcgacaaagctgtgatttgcatggcgtccaagtaacagatatcccagccttgaagcctgaaacagaagggtctttcgatgtgcatcattgcatcttgctgtttgtttttatgtaaataaagaaaaggattgggttggaagatatacgtgtatgctagctagttttgtaggtaggcaccgctcggcgtgatggatatctgacgagagatgtgtacgccaaatggcagcttgcgataagccccaactgttaacgtggccgtctgaccatggttccattatgtgttcacttgcttggagacaagtccaagaagaaagaaagttcttctgcccctttataaaaacgaacatataagattttttttcaaagaagatgagtgttcttctgtatctgttaaagactctgaagatcgaccgtgttgttttgccacacaatcacaccaactttctttttttcaaaaaaagatctctcaacattttcttattcttttccttccttttttggccacttcatttaccgactaccggtcacactgtcacagttcactgcacgcaatccccttcagtaacatacaagtataatactaaagtactctctgaaacaacaacggaagcaagacatgcacacctaacttcagatgtctccttctcagtttatcaaattctcatgatgaaaattaaccgtccatttttgttagacgcgctagtggaacatccatctttctctttctgaacaacagtgcggcgcgcattttcctttttgaacccaaaaggacgcgtaagcaacgctgcagacgcagcaatcctcgcgtcccgccacaacactcaataaaaaacgaagcagaaacccgacgatatatcccaaatccgaatggcgtacgcagatatatatgtccagcgcggaacggcaaggcatcgactcagttctccgcattcgcaagcagcagcatccattttgagtacagataatactcatgctgttcttgtgcaccactcggaagctgcataatctcttgatttttagcccaacggctttgctaatatatgtgcgtcgcttgcgttgccattaattcttggatgttgttgctactgttgttttggaagcgatagcttggagttgtaaggtgaggtgaggtgcagggtggtcgatcagtaggtggaaaggaggaatcgaggagatggacggcgagattggggaggacatgctcacggagattctggtgaggctgccgtacaagtcgctggcgaggttccagtgcgtggccacgtcgtggcggcgcctcatctccggcgactacctccgccggaggctgccgctcatcacctccggtgtgctgtaccaggaaggccggggcggcggcggcggcggcggcggcgaagggaggaggaggcaggcgtacacgtacgcgtgcgcgtcggggggtggtgaccacggcggcggcgtggcggaggccgacatgggattcttccccgggcacgagacgtccaccatcatcgacgggtgcaacggcatgctgctgtactacgcatcgcaaccggcggcggcgttccacgtcgtgaacccgacgacgcggcggtgggcgaggctgccgccgccgcgcgggaagacgctgctgtccgtgctggcgttcgacccctccgcgtccccgcactacagggtggtgtgcttcaccgggtggctcccccgcggcgcgtccgtcgaggtgttcgactccgagggcggcgcgtggcgcgaccacgagctcgacttcgggctcgacaccgacgccatgtcggccaccatgcactacttcgacggcgcgatccacgtgctggcctactcgggccacgtcgtccgcatcgacctcgggaccatggcgtgcgcggtgaccgcgctcccggccccggtcagctgccgggcgcgcgccgggcactgccgtggccgcctccggtacgcgtccagcgacggcacgcgcctcaagttctgggagctcaagaacgcggccacatcggagtgggcactgaagcacgagctgggggtcaatgacctcgtcgccggcgaggcgagcggagcttgccaggccgtcaccttcttgttcatggcgttccacccggacagggagatggtgtacctgtggacgccatggaagctcgtggcgttcgacatggagaagaggcgcgtcgaggaggagtgggaggtcgggccgagaaggagaaggaaggcgcgcatctcattcagatttggctgtttccgtctcgcgccatctggccaacagcttggcctgattggtctatgtggctgataggctggccggcgatgttgacaatggcatgtgggcccaatgcttgtctgcaacattgggcacaatgccgttccgttcgagtgtccaactgtacaaagaaggtacaagacaatcaaaagaaaaaaaagggaaaaaatatatgctattcgtttgttctatggagtaaaattcatctctaatcccatcaggatagtggacagttcttctgtttccataagaaaattgatttgtttttttttacaaaattcaaaattgaattgtttcttgcaaaatttatgtaaaattcttgaatttcaaatgaatactcggtgtttccgctcgttggttgttgtgtactcccttccttccatattataagattttagatttcgactagttttataaataaaaaaaatactaacattcacaacaccaaccctttcataaattcaagcaaattattcataaatccaagcaaactttttataaattcaaacaaccttttcacaaaaccaaacattaatatattaatttccttataaatgtaaatattgctatatttttttaaaaaaaattgacttactagagacctaaacgatctacaatttagaacagataggagcagcttcggctaacaagatatgacagttttgtgtacgaagtgctagatacaccaattaaattgtcttagcttcggctagaatatgagcggttagcagtgacaaatcactgcaattgaccgattgccatttcacaacggtagcgacaacggcgtccgctgatgatgataccagcaaagccactgcatgcgtttgagagtgattacgccaagactattccattcacataattacaccaacaaattgactgaaatcaaattcattatcggcatcatcgacgagttgttttttcgaaaagatcatcagttaattacaaagctccattaaacctatgacatttaattctcacctcatatagctgaactctcactctcaggctttgcgagttcatagaattttgcagccaccgctcgttcacttgggtgctaattaaacatcaaatctaagctaatctactccagttggtaataaggtccaaaagcagaaaaaaaagatatgtgcaaaagaattcgttcgcgcgctcgccatggccgctactcacggaggacgttcggaaacaacccgcggatgtaacccggcatgaagtcgtgtcgcgtcaggatcccgaccaccggcggcctctgcaaaatcatcatcaagattcagatgcaaaaatggcggaaaagcatgtaggattcagctaagttggtaagctctattacccccggcgtcctcggcacgacgcacatgtggcggaggccgagctggcggaagagcacggcggccttggccagcgacatgttctccactacggtgtacggcgagcggttggcgatcgggtggaggtcgacgtacatggccatctcctcctcggtgaggtccaggtcgtcgacggtgaggcccttgcccgacccgggcttggcgaagtcgaacggcgcgagcttgcggaacacctcggcggcgccggtcttgacgcggtcggcggtgaaggtcttggcgcggaggagcacgaggaggtgggagcgcagcacgaggccgcacagctccggctccggcgcgaacggcgcgtcctcgatcaccgggaacccgttgtgccccgtgcggcgcagcgtgtccacgacggtgccgacgctctcgacgctggagaaggcgatgagcggcgcggacacgacgtcgccggcgaccaggctgcgcatgcacggctcggcgtgcgcctccaggtaagggagccccttcatgcgcaccatctgctcgtacacgcccttgttgaagcagtcggccaccgtcttggagacgagcagcaccagcatgatgagcggcagcagcaggaggtcgttggtgagctccaggaggatgacgcacaccgacaccgtcatccgcatcgtcccgccgaggaaggacgccgcgccgagcagcgcgaagagccccgtgtcgaggccggtgagcacgccgagcagcttcccgagcagccggccgaacgacgcgccggagaggatcacggggatgaagaggcccgacggcacggccacgccgtaggtgaccaggccgagcgagtagacggcggtgaagaacgcgagcagcatgggcacgccgaactcgctctccgtgccgccgctgaagaggttgcggatggcgtcgtcgttggtgttgaggaacagcgacgccatggcgttgtactgccccggcggacaccggaagttcttgaagttgccggagcggccgatggtcgggcagtggccgctggcggccagctccggcgggcatggcgtgcacgccgtcagccacggcaagccgaaggagcagcacgaggtgaccagcgagatgaccaccgtaagaatgatcttgtacggcgcgcctttcctgcaaaattaacccaaatgcatgcaaagctcagtgatcatcttgccgaagttgcaacagatgattgaaaattttgaaatgcattgattcgggtgaagattactcgttgatgtagctatacacacgaaggatccgattgaggaggaagttgaagagtgctccaagtagcccgccgacgatggcgagcagcacaaccgcggcgagatccatggtggtgtatgatgtcacctgtgaacttacgtcgaacatgatcagccctcctttcccgaacaggccacagttgccgctgcggcagtactctattagggaccttagcaccattgccgccactgctgtcgtggagaatgtcctccagagaagcgcgctccgccacctgagaaagcgcaaaggttaatagtttcaattgagtaattgggatgtggattttcaattgacaatgtgcaaagattacaattgacaattcaaaagacatgctgggtgtactgtagcatatctggcaaaatggtatttcagatgcaacttggtttttattttggggaattaccaggatgttgcttcttcaagtgcgaagaggacaccgccgacaggggcgcggaaggctgctgtaactcctgctgcagctccacaggtgatcagatccctgcggtccaaatcattcttgaagtacctgagccaattccaagtgaagccatacttgcgcgacccgccttgtcctagaaaggaggcaacacaagccccagtgtgcaccataggaccttccttgcccagcacaaacccagcagacaccccaaatatagacccaacaatctgcaagtacaaagctcaccaacatgatccaatgcacatcgaaaatcggtgtcgtgatgatcaaattagagttagaaagattgaatgtttcaatcaggatcatacataccttgacgaagagggtactgggcgctaagatggacggcgcgtcgacaccattcagataggccttcacctcaggtatgccagatccggcagccgctgggccaaagtaagcgcacaatgctgcagcggctgctgccaacattgcattgcagctgataaaccatagaaaggccgccttgtacctaaagtaccaagaaatgttgagctcaaaaaaaatttttgactggttttgttcatcaattgcaatgaaccgcattggaagggtggactctacctgttctggagcattagattggtcgtcaggagcagcttgaacccggctatgttttcgacggcaatgttgttgaagaatcctattaggccaactattaatccaacaagaagtgctaggacccatttaaggatctgatagtggaagatttgcaatttcccccttgatctccagtcctgcttgtacacttcattctccacaagtctgtgtcatcattagtcaatatggaaaatccattaattaccacacttacattgatcacctcacttgtaaaattgtagtcaaactcaaactagtgttcataataacatactttgggttgtcccttgtaaaattatcctatctctagtcataagatttaagtaaaacttttgacagtcactgacttctcaaatgcttagttaattagtttataaacaaaaataatggcgtatgcactatcattgtataaaaaaattattatacgtccgctccaaaaaaaaacttattatactttataagacaaattttacgtctttcagaaagtgcatgtaaataccaaatttactatattttataaagctactaaattggtattgacggtcaaagttaaaaagttcaaccattttgggaagtagtcaaaccaaatatagtattccatcattagcatgaagcgcgtctataataaaaaatagatattaaaacatacatgaaacatcgaaacaaatctaatcgaaaataaataccggtaccatgaatctctaagggcttgttcggtttaaaggagattgaaaagtattggagagaattgagggggaataattccacaccgcgataggtgtggaataaatcccctccaatcctccctcgcggattaactgaacaaggcctaaagaaaaaaaaaactcgcgagagttagagaggaaggcagagatgtcacgattgacacacgtactcgtaatcgaggctctcgatggggcagacgttggcgccgacgatggccatctgcgacgtggtgttggtgccgcggcggcgcagcagcggccgctccagcccgccgcctccctcctcgatgtccggcatgtcgctctcccacctcaccgacctcgccgatatgggcgttgttgtcattgccgacattggcgtcgagggggcgctctcggctacgccgcccgagccactctctgttcctacagccatcgtcgtactggattccccgcttatggatagcttatttcagttatttacctggcactttaggtagtcgcatcgaaatccatgcagatacaagatcttttacatgttcttcgttagacagctggattttgcaaactatacaagatcttgcactgtatatgtaagattaagacaagagttagttaacgagagatatattaagaaaaatattctgtagtaaaattgtttggataatgtgttatacggaaaaaaacatacaagtacatgtatatgattcggaatactccgtatgatattttttcaacaaaaatatattcaggatatgttatgttgaacttgcatgggaacaacccgcattagcttgtgattgaatttgtcaattcatctccgagaacaaattaggaaaagaattaactattaataatgcagttaaaactcatcgatcaaggcaatgctgcaagggagtacaccaatcaaactaacagcaacatttaccatgaatcaatcaacaaggcgtcaacaaccctaaaaaaaaaagaaaaacaaggcgtcaacagaatcaacgagcttacacggtaggttcgatcttcaatcgtcgtcagggaggccggctaggtcgatctcacaccgaagcgcgggcattgaattgcggtgcgatgcgagcgctcggagaagaggaagaagagaagggatacggcggcgaagcgatgtggttgcaggcccagaattgcgaaggcaaaagggtgattcggtggtgaggcgcgagaggaacggcggttaattagggacgggctctctctctcgccaccgttttttatccacaatgatccgcatactatgttaggttcggcagatgtttttattaggtttttttagaagaatttcgattccgacaagaactctaaactcaaatacataaatcgctagaattcggaataaaatataataacatagtagtagtaataaaagaagagtccgtgtaaactccaattaattaaaattcaaaattaaaaatataactaggaatttgattctaatacgaatctcaaacttaaatgaatatgaatatgataaaaacatgatacaatattaattaaaattcagctaaataatagcaagcagcgtgcttatgaatagaaccggtaatcctgatttgcttgacgtgacatggaccggcgcgagcgcgccagagttacggctcgcaccatctcaccaataggtgggctgtgggcttcgtcgcctatcaacttcgtctcggaataagtctgttcagcctccctcaactcatgcccctggctgaatcacatccctcaaccgcaaaactgggtataacccgcccctaatttccaaaaccgttgcaaatatactccctgagcagtttcgtaggtggttttgtctgacgtggcagtcggctcgctgagtcacaggtgggacccacttgccagtaggcctccacctcatctccccgcctctctctctttcatctagtcctcttctctcctcttccattagcacagacgatgccgccggccatgccacgtgtagggaggacctagccggaaggccgcgccacccgcaggggaggaccttgccggccggccgcgccacacattggggaggacctcatcggccgggaaagccgcgtgcgtgggaagacctcgtcggccaatggctgtgcatggggaggatctcactggtcggctgcgtgaggggtggagctcacaggccggctcctactttggcacccatcatccacgcagggagtagcaggacggcatgaggggtggggtgacaggaatctcgccgtggcgtatctctcctcgccgacgcctcctctgacctcgccatcgctgcctcatctgcgccagagctcagcagtagggcaacagggcggcgaggctcgaggcagcaagatggtgggagctgcggcacctcctctccccaccaccacctcctcatccgcgccctcgccgcagcctcctatcctcccttcccgccgcgttgatggcagcgtcaatggtgttggtgtcggtgcggttcaaggcagcaggaatggtgggagcggaggcgtctcatctcatcgtcggtgcctcctccaaccttgtcggcgccgccttccctccctcgcccatcctctgccgcctcatccccaccctcccctcctctaacctcgccaccgcctcatctcctttctctgcaccgccgcctccctggcctcctcatcccaggcctcccctcctccgaccttgccgccacctcctctcctccctccccgccgtgttaagggtggcggtcaggttgatggcgacgtcgacggtgttggggtcggcagctaagctgttggcagcgtcggcagcgttggggtcctagtcgagggcatctccgtcggccggtttgatggcggcggccggtgggtggtggaggaggtgaggtgaggtgagggcgttgggcgtgggcggtgcaagccgcgcggcggtgactgcctcctcctccctcggtgagttttcaccggccacaccttgcactgacatgtggggctcacgtgttgactcagcatgtcaacagagtctcaaagacgctacgtaggacaaaatcgtctcccaaaccgtccaaggagtcaatttggaatggttttgtgagttggaggatagattatacccggttttgcggttgaagatgcaattcaaccatgcgcatgagttaagagaggtaaagtagacttattccacttggtctctgcgtctcctgaaaggctggcctgctaccaagcaggccactacaaatctggccctaatactgactcgtactctttcaactgctaccaagcctcgaagacaccgagagtccagcttgccatgggagattggaagtctcgaaagcacattggtattggtcagaatccacgatttcttggggcgtagatcaagctggctttattcgtttttgtagattgcgactgcgatgctgcatgatccggacattctgcactgtttttagtggatttctatgcttgctttgtcctcgaaactaactgccattctgcgacaacatggacgtacagcttctcttgtacattatcaaggagagagatgccttgggaaaatgaaatcattcctcgagggatatcctctcgttttgtgcatgtcacctaaatagttataaaaaaataaaaaaaaattggcaacatagattaatatgaaatatatcactccacaaacatgcaagtttaaattcaacttctacaagttgtaacaaaaataacaaatatagttacgaatgtgcgataattattttcagtttaatttgttatttttgttgcaacttatagaagttcaattggtcttgcatgtttgtggagtgatatatttcatattaatctatgttgtcaattgtttttaaaaaaaatgataactatttagatgacatacaaacaacaggggatgtcccctcgagggatgaaaatccacatccatatgccttatcgtaaacaaaatcaccatgtcttatatgtagcaatagtagtagtacttcccatggtccttgaaagaacaaacatgcagtcctagaagcgcaacttccttttccttgaatcctcctctctttttggcatttttctctgcgtatattcatgcctttcttaaattgatctcaaagtatatatacctttctcgttctatgtccgtgtctcgtgttcttgaagctccagatggaagaatcaggaattggagattggagtgcggcctagttcatcttggtatcttatgctagctagtcttccaagctatggatcatctatggcgtcgttaaaatctcctctccttgttcatccatgtcaagcagaagcagctgtactttgaactggccatagtgtagtttgattcactctttgatagcttttgccgtttagctaattgtacagtgttgtacgtctgcattttgttgcattccactgtgacaagcatgaaggccgccatggctgatgaattcaagattgtgctcacgaggaaggagaggttcctctacctcgccaaagccgtcgtgttccttgtgatcttcgcgctcggcgtggtcgccggcctatggacggccaccgggcctcgccggtgctgcagcacatacaccaacattcttttcccgagcaccaccgtgtaccgctaccgcggcggcggcggcggtagcttctcggagttcgtggctccgacgcggctcatgcacgatatgacggacgagcagctgttctggcgcgctacgatggcgccggcgtcgtccggtggcgcgtacccgttccagcgcgtgcccaaggtggccttcatgttcctcgccggccgcggcgtcctgccgctggcgccgctctgggagcgattcttccgtggacacgagggcctcttctccatctacgtccacgcgccgcccgggatggtgctcaacgtgtccgacgactcgccgttctacggccggcagatccccagccaggtgcacgagcacgacacaaacacaatgccgaacaacagcgcgacgccatcattcgcagcaaagcatcatgatctgatcctcgcgatttcatggcttgcttgcaggaaacctcatggggatccataacactcatggacgccgagaagcggctgctggcgaacgcgctgctggacttctccaacgatcggttcgtcctcctctccgagagctgcataccggtgcagagcttcccggtggcgtacggctacctcaccggctcgcgccacagcttcgtggaggtctactaccacaagggcaagacgtgccgcggccggtacagccgccgcatggagccggacatcacgctgccgcagtggaggaagggctcccagtggttcgagctcaggcgagacctcgccgtggccgccctgacggacgccaggtactacccgctcttccggcggcactgccggccgtcgtgctaccccgacgagcactacctcccgacgttcgtcgccatgctccacggcgcggacaactcgaaccgcaccgtgacgtacgtcgactggtccagaggcggcgcgcacccggcgacgtacaccgccggcgacgtcacgccggagctgatcctgagcatcaggaggagcgaggtgccctgcatgtacaactcccggccgaccacggcgtgcttcctgttcgcgaggaagttctccgccgacgcgctggagccgctgctcaacatctcatcgacggtgatgcagtactagttctcctcgccgccaactattgtttgtaacataggatttcacacaacatattcaggtaccaattgtacctgtcaagcaaaaggggaaaaagaagaagaaagtgttcattttgcgggaattttgtcgaatttcctacagtgcgatgcgacaatgcaaaatggaggttggttaggcacagtgcagcagcacaccggcctcattgactgaccaagccccagcctgtctacttgtctcgtggtatcagtgcatcaccccaacttgcagagtcgcagcatcaacagcttgttgccgctgccgcctaaccaaaggtgcattggctaattggcattgaaacaacaaccaaccactgcgtctgcgtgctgcaacaggggacgatttggttgtgctttctaatcaaggaacacgcaggggcccaacattctgatgggggagcctgcactgcaccaacaaccattccagctcttttctcaactttgtgatccaacaactagatcatcgcattcaatttcttcgcacttcactcgagtatgaacgatcgatctattcatggctgtggtccagttcgtcgattttctcggatcggccgatgcttcgctggcccaagaaatggcccattggcaacatatcatatgtaagcagtgtgatgacccttgaatcccttggggtttcagcaactgcagcctgtcaactagtgcagcaaaagcaggggggaaaagcacaaagtaaagctgcagttcatcagccaaggaagggattaggcaaagctgttaccagcacgtccgttgtaactgacgagaacaatcgacaattaggcgaatgattgttagtgcttttcgcaaaagacaatgagcctggagaacaggtggacatagcaggtgggagtggcattgggtacggtagtagaatgatagtatgaagcttcacttttagatacttaaataaatgaagtggggttagtaattaattaaatgggccattatatatggacaaaaagaagagggcgagatctcatcaaaataaacccatacagctcatctggaaaggcatgtactatccacagaagacttggttttcatcatatattatacctgtatatacaagggcatctctctttatgtactcattctgattgtttaacacaaggctgagaaaatttgatacacttggaccttgcatttcaatctcatcaatcccatgcacatcctctcagaatttgagcaagaccgtcgcgttgctcgtcagtaagctgcttcgggaacgcgatctcaaacttcacccttagatcaccccgtgctcctttctgatcggcaattggcatcccttcccctttgatgatcttctcatatcctgggcagatgatctcatcctgaaatgagcagctcaccttcttgccactcaggagcctgaatgagaaggaccagccggtgagcgcgctcaccaatggcacctcggctttcagcaccaggtcgttgcctaccctcttgaagacagggtgtttcttctccgatatgacgaagacggcatcggccggtaggcaccctggcctctcatcccccatgccttcaaatgtgatcttgttccctttcttccaccctggtttcaccagcaccatctggctcacctccttcttgactattgacctgtccaagattgtaaatccattgaaggtgattagtccagcaacactgaaagagagaatccaaggaggaaaggtgcttaatagtcactgtcactgaaccttcctagactaccaccaccatcaacatgcaaaagaaaatgtggatagtgcttattgcccaaatggtccactttgctagatgctagatccaaaactactgtattctaagccctcgacaaacacgtatacgcataagtggcaacgaaagcaacttgagttgagattttatctcctcaagattggatcttaacatgtactaaaccctgatcaacactgctgttattatgctttgtgttaggtaggataatgttgcaagaataggatagataccccggaagagaaaaggtacacaccaaagggaacttgtgtaaaaaggttttcatgtgttccaaagtaagctaaatattccactgacaaatgcaggctataataaagcagtcaccctccactgtaaaaaagaagtgcgccatagcctggaaaggaaggaagtggtcgtgctgtttcactgttcatggatcattttgttccgaacagtgcagagaattggggaggcacaaagcggaatggatgtcgccatcagaacaaattctgaattcttgcctactctgaagtttccaagcatcgatccattaaaattggcatgcaagtgagcgaatcacatcagggttgttccggttgcatcgaattgttagttttaaaagaggaaaatggatggatggatgacaagcgattgctcgccagaattcaggtgaaagctccaatcaatcttggctcacggattaggtggaggaagaaaggggtatacccgttcttggtgacgacgtcgcgggtgaacttgacctccttcttgcagccgtggcagagctcctcgagggtgcagtcgagcttgcgctccagcggcggcgccttgcgcatgattgagctggagaactcggcgaacgcgcgccgcccgccggagttgccggagctgtacaccttcttgaactccctcgccggcgtgccgggcgccatcctcgcgccgaagtcgtcgctgcgcgtcctcgcgatgtgtgcccctccgccgccgaccacgccgcacgccatggccttctcgcccgcgcggccgtcgttgcagcacaccccgaacaccgccctgttctcctgctggtcaaggagcgcctgcgcaaccaagaatcgcccaacatcacgacacgacgccgtcgcaatctacagccaacgcacgcacgcaacgcacggctaggggctcacctcgtaggcctcggtgatggccttgaagcgggcctcggcctcgggcttggaggacggcgggtgcttgtcggggtgccatttcttgacgaggctcttgtaggcggcgcggatttcctgcggcgaggtctccctggggatgttgaggatgcggtggtacagctcgggagggttccccattggagagggaagagaagacacggtggatggatggatcggtggtggtcgcggaggaggaagaagaagaagaagaagaagaagagcaagggaggggagcgaaatgaggagtttgttacggagggaggtggttaagcggcagaggagaaacacagcgagtgtggctgtgtgggtgagtgagtgagtgagagagaagagtggcttttatgtaggggcatttatttgaactggtgtttagagagagggagggaaaaaattgcatgtggggacatagcggcatgaggggtgaattggcaatggacaaggactggagtggagtggactgcctaccatctacttctccagtggaggagaaaaagaattttgatggttacaaccctataaaaaaattcaattctgagcattatttgaataagtgcatgtctatttcgtaattaggattgtgtttttttttacaaaaagagtatgttctaagctatgggctacaagaaataaaaaattagcagattcattagtttgtttagttacaaaaattggaatacacaaactgatctaggggtactactagtactacaaatataattttagaaccaaatccatcattaacggatttttgccgtaagacggaatcgtaaaaagccgtcgtaatgttttttataatatatagtcctgaagaaaggtgccaactacagagggagaaggcgccaaagacttactgcgtgtacggccgacgagagctggagtgttctgtgtgttgcagtagtgcatgattacaagatggttttatctgatggaggtgaatgattggggaataagaacggcacggttagcaattattgccttgtccgtaccggcccaaatgaaaatgctttgctcgtgcatatgatgtgtgtgtgtgtgtctctacttgatccccccattcagatcaagtggctctcctcgcactgtgctgcctgtcagcctatcacgctggctgagtcaccacaacacatataaaattttctttgtacactatcagacagattgtcatataaaattatatgagctactacgcgtactcgattggattttagaaactgcgagcggggcacgtacgcttctagtcaatggccatgcaaacgccttggattcttctgttcccgagcgcgtcgtctcgtcacggccgtgtgcgcatgtgcgaagctggtggtggagatggcgatcgatcggtcggtcgatggccatcgccacctggtccatctctgtgcagacgcgacgccacgtatacggacgtgtaggcgggtacacatacacgtaccgatcttgatcgtccgggccgatggaaattgaatgagcacgttgtgtagtaagggtggcaacaaaatttgccagcggtgcgtacgtattctgtcgcagggtctggagccaaggtgcgtgacgaactgaccaccagtggccactggggcgttggacatgctgtagttgttggtgtagtggtagttgcagtaacttcttcggatctggagcgatgcgatctcacgtggtagattaattttggagttggttgtaaacttgtagtaaaaaatatactgatctctcgattgatggggtgattgcgaggatgcctgcgatcgacgaacacgtgcagtacagtagagggaaaccgaaaaccggatcgattcgcgattcgagggacaaactgtccgttattagcttctcgaatctcgattggggtgggtgatcaggatcaggattcaggatgcaatccccggcgaattaacaagccgccacgagcatatggtgaaccccccaccgaatcgtccgtgcggcgggcgccgcagcgcgagcccaaagatgtttgtcccacgtactactacgtagtgtaatacagtcgcacacgccgcgctccgcaccgcacaccgggttcgtcctgcggacaccgcgcggggcgagacgttttgcgccccccgcttgcgcgcgcgagattcgcccaatccatcgcggcccggcgggttgtgtgggcttgtgagagcacggcgatccccgcgtttgccgtcgcgcgctgcggctgcctcgcgggcctggatgtgggaaaaggctatacgtactaactttttcttattaaattcttactaacactgatctgtttgtaattttatctacttaattgctcatggatgtgttacgcatcgggtggatttcaccacgtacgcgcggggtgcgcgcgggtggcggctaggctcggcgcgcgcgaggagccacaggtaggtcgcgcgtacgcggcggttgctcgtccacgctgtgtcgcgatctttgtcacgtactacgtctcggctcggcgccgctagtttgggtcggttccgttctgttcgatgggctatcctcgtttctcgtttctcatgttcccttcccggagcgtaattggacatgtggcatcgaaacaaaccccgatccgtaactcatggaagccaatgccgaacagaacggacgtagtaaacgatccgtaactcaaccggacgtagtaaacgatcgcagttacaatactttgacgcgcccgatctacctgccaagaaatccttgtacatatatacagagatcgagcaaggagggtaccaggagactcactcactccactatgttcagtagtaatcgcctcactagggacagtcacgtgaaggtccaagaagccataacgttgcttgcagttggggggtcacttttggccgacaatcctgccgaattaagaccatattactacccaacgattcaatgcaacgcattccttggaaaataaatcatcggctagctcacgctagcttcacccagcaaagcagacatccacaacaaacctacagaaaacagaaatgagtcaatcataccagaaagactattcgacaggggtagtagtagcgacgaagtgacagcgagagaggctgcaacatgggcgtccctgtggctgagtgaaacatgaaaggtgaactggtttgacccccatatgacaagtctaaatcagatcaacatttttagataatgaaaatggattacatctacggcttctgttataagacacacagctataagtttaatagtaataaaaatataagataaaagtaaatcaaaatgagaaataaggtgataggacaaatccccaactcccctttaattattgactagcgttaaaccacataaaatattttagctagcaattcttatggaactacgccacccatagtggaataagagacccttggctaccgattccaagagtgtagcaccattgcgcatagtatcctgctcctcctgtagtagcattgtagaccaaaagtggagccagtaggaagacatgaagataacctgcatagggttagataattgtttaccattaaaaactttatcattgcgacaacgccaaattgaccaacatacagcactagctccaattacaatcatcttcttaatggacctagatacccctctaagccaattaccgaaaatgtttctggcgttacggggtgggggatattaaaagcaaaaaacacacatctccaaacaaactgagcgacatgacactcaaagaaaagatgttggattgtctcttgtgcatagcagaaagaacaatgtttgtctccccccattttcttttagccaggttatctttcgttagaattactttctcgtgaagaaaccacataaagaccttgatctttagtggaattttcaagtcccacagaattctctttttgatccgaacattacagttcatgattgcggtatacatagatttgacggaaaattgaccattcttatggagcgaccatacaaagcagtcattttcatttgacagagttatattagctagcctgaggatcaaatcgtcccactcgattagcttttggtcaacaatagctcttctaaaagagatatttagcggcgttgtgctcatgacctctgccacagtagactgcttctttcgagccacattagataatgtagggtattgatctttgaaagcacgcgatcccaaccacgtgtcttcccaaaatcttatgtttgtcccattgccacatctaaaagaaccaaacctaagaaattggtctttgactttcattaaaccggctcagaactgagaaatacctatcttgctagacataccagaaagagctttaccctttaagtatttatttcgcaaaaggtcttgccataggccttcaccattaaacagctggaaaagccatttgcttaataagcagctattttttatatcaaggttatggacacctagtccaccttgatcttttggtcgacatatgttttcccacttagttagtctatattttcttttccggtcatcattactccaaaaaaaaacgtgacccaaagtaatccagtctttgaagcacacctcgtgaaatttcaaaagaaggataacataaacaagggaaggctcgaaagaactgagtttagaagggccaatctcccaccatatgacatgtttttgcctttccatgtgctgagtttcctctcaaatctatcttcaactcctttccaatcaacattccagagtttccgataatgaataggaataccaagatatctaaacgggaaagatccagaattacagccaaatagttatctatattgatcctccacttccttggctttcccaaagcaaaaaaatcttacttttatgaaagtttattttcagccctgagagctgttcgaatacacataggatggctttcatatcagatcaacatttaattcgtgatttggacactcaaacgaatgttagttacagaagggggaagttggggtgaaattgtgtagacccagtggaaaagaagatccgaatcgcttagctctgtcagcggtgagtgagcaatcatgtgctatgtatctttgttagttgtgatgggatcagcatttgcatccatgctatttcactcgaagaaatactgggagtaatgtcgagacaagaacatgggggatccaatgataaattgaagccaaaagaatccaatgatttggtcattttctctttagcaatttcgttcttagcatttgaaaacgatatacccaggatcatatatagttgatgatattccccgcaagaaaatatatttaattgatgatatattttttatttgtcaaaattagatctcttcaacctaggaaaaacactggaccatactgaaataatcctatttgaggatttttttagatggagcgaaataagtgtagctcaattaactagttagactagtggaacctattcacttgagttcaagttttaggcttgtcacttgatcgggagaaactgagcaaagagggaaacaacaatgaaatttctagctctcaaacaagtagatgaataaataaattgtttttaattaaatttgttcataggttaacttgaacatttgatatctccatttttcagaattggtacattttctttctttttttttccgaactatcggtggtacaatcatggaaaagttgtgtatgcaatgaagaatagtattttatacttaccaaggacttaccaaaaatgctaaagttgtggctattggctagacaggggacccccccccccccccctccgaaaatatacagatatctctcaagaaaaaagttcacaatatgatatatatatttcgtttggcaaatcattggcctgtatattacaagttgttggagcctatctaggtgcgtagtattttcatctcctttgggcttgccttttcctgatagaaaattaagatatgtctccctagctgatgatgacttcgattttgtcctttgccctcctactggaaactgtataatagtaaatgttgcttagaatacagtcacttgacaatgatattgtaggtcggactcgaagccaggagagcatgattagattcttcgttacgtcatctcttcaaactattaggattatcacaaaagaggattagagcaatgtgatgacagtttggcacgcacactgctggcgtccaaatcacaaataatccatgagctccaaggtaaaccgagcaattaactattggaatcattttctttcttcctttcccttaacttggttttccttcatgtctttgttggtacctgtgaaacgacctgatgcaacatcagtatacgacatcatagttaacagaggtgtctcccactcaagtgtcggcagattggggaaagatatctagctgcctttttgcctagacggctatagaacctccaaactatgcagaagcagaaccactaatttttcttttgttcaaatattgtatgcattccatcagattatctttacaaaagaggctctgattgatctgtgatatattgtttgattgaagttttgaacaagtggcataaacaagaaacttctgccccccccccccccccccccaatcttcaaggatgtgattgctaaagttgccaatctttcttgctacaagggggagccttatcttgtcgccgggccggctttgccggccaaactttgtattaagaagaagaaaaattcagagtctgtacagaaaaaagaaaaagagagcccgaggctctcacaccacaggggcaaagcccaaaacatggagaatcacccacgcaccgaaccggacacactggttcaccacagggagccttatctttacttgcatcaatcttcagatgagaggcttgtgttaaaagatagcacaaatcattcatgtcccgggccctgcatatttacaccaaatcatgcaatgcccgctgctattacaatatatatgtacgacacgcttggtctgcaattagtatatcctaatattgctcagagcggagaaatggctgggcctgccttgcaatctattctggatattcttccaatgcgctagtacagtccttagtattcaatacacacctgtatgcattatctcacaagtcataatactgcttaatgtctgaaattaataagtggatgacagatgaacagccgggctaatcttagcaaaaacaaattagttggctagtcttcagaaatacaatgttgaagacttaccttacaaggctctaaatggataaaatcttttgcaagaactttaaattttgcacaagatggttttcgagcctgaaacttattgggaaatgctttttcggcaaatactcttttatctttctggaatgaacttgccggagtaagagaaaagattctgttcgctgagatgtcaccgatcattactcgaatgagtcaatgatggaaaaacaagagagcaatgtgtttaaatacgctctgcctctgctttcttaaatacttgtatgtttcacaaatgatgattccacaaggtacttttctaaattatccacatttaactatacaaaaccatacgcatgtcataatgtcagtgtatgtacacaatatttggagggtattttcgttacgttttactgaaaatataacgtgtctctctccatgacatgaaccactttgcatatatttccaacccaattatccaaacctcgagtccatttttctctaggaaaccaaacatatgatggttactgagtgcccgctggtgcacgtacacgaagtaccaagcgtttcaaaccggtatatggggctttcaaaaattgacaccaacctctcaaacctaacatccgaatattgttcccaacaaccaatgttgtctagtatcctaattcttacatgtccattgacgaacttttcgcgcttcaaatttcaactagccatctatcgatgaattccaatagaaactgtgatttcctattcttcaccagccaaaggggatgcggtttccctgttgttcctgttccgatccatgtcccgtagttgatcaacggcagatatcatcagtggtgggccctacatgtcatattcaatcttcttgattggtttcctcatctcgttgttcatatactatacacccttattgcctcctctctctcatgacattataaacaccaagggatcaatcaaatcaaaatggaataattgtatgaaaaccatcgttcaatcatagttttatgtgatttcacgatcaaaccatattatttaaagcggagttgagattactgaaaccaatctggaatcatttttctctctgaattgctttgcggtgtactttcggcggctttggttcacgaaccttactgaaacggcagacaaaaatcactcaaactgaagcactcaacagaaatcactctcatgattgcaagagattggaacaagggagaatgaaatctctgttttccttttcgatggagatgattcctccaatatttatttattccctgatactgtacaagtaccatggcctatcaatggagtcatgaaaccactacggaagaagggagaagaggaagggaacaggctgtgggtgattaggacttaattcgagggcccctaaataatactcacatgacaaggaaaacatgaagcggcatccagtcaaaggccccggctccttaatccatggctaatcaaagatttaataacatccattccgtacgccatggaatggaatgcagatcttacttaatcttatccagaatctacggccaatggagccacaagctagtggtttcttccgcactgtgatcttagcaacatcacagtacccgcacagtgagcaacttatttttgtctccccaatcataacgagagatgaactactgtgttgaccacctgctgcctcaaccatagattcattcacaggttaatccagaaatatcatgacgcgacacaacatgaagagagcaatccaagaactttctccagtgcgatctggtgtctacatatcagcaagtctaaacacgaagaaaatgacaattatgaaatgtttcatgggcatcgcaatatatcatattatattatatcccattccttttgggctcatagaagctcgttcatgccttcatgtttctgaatcatacagtagtccattgcaaacctgggaatgcagtgcaattaattcctttgctcgggtggatggttagcatccacaatggcgacccgtcaagggtacctggacatattgttgagcaaaagagaagtcaaagaaacaaagtgccaaatcatgctcataacaggtcgtaatctaaatctaggtaggatttcacttcgaagttgttgtagtatgctactgtaccaagcactataagcttcaagttgatgagcgaatctgtagcgatggatctcattgctgagttaaactccttaagagcagtctgcctcaatcgcaagtgttttggtgaccccagggcataaatcttctccaaatccctcgtctgacaaggagacggtacagccattcatgttcagacaggcctgccaagataaagtaaacaacagttcagcacaattataaagtttgatggtcagtaatatcaagatctccatataacttcagtccagaaatagttattggacaactcatagggaactcatggctcctttgaaatggaaagtttttaccctcctatgtgcccaacccagtgttccctggtttggaacagtaaaaacataatataattccagttgctctatggctacaagtcagaactgatggatctaaatccacatgcatcgacgtatatcagaaagtcagaatcaaaggctctcaagttttagattagatgtgcactttttgtgcaagaactgtgcatattaccttctcaacaacagatattgagttcggatggtggcagcttccttgttggtaagatctgcaggttccactggggtttccaaaactcacaaacttaacagaagagatacttttacccttggggcaagacaactgtacttttgctgcgtctctaccatcattttgggtattcctatcccaggattccaagtcaatggaagggtagtgctctgacacgaaggagcacacacttgccacagttcttcttgagaatgtgatctttgtaggatcccctcccttctcctcaaaaatcacaagggtgtttcctgatggatgaaaccatgaccgtgggacatggtaccttgaccaaatgcaaacagaaatgtgaaatgtgagaagtatgaaaaaaaaggtattgtgagctgtgccaaaaatcgtcacataccatctttgagttggctgcccacatcctctcctgcacttatttggagaaaacgttcctctatagtcacaactggaagtacacctgtcactgacaggacttatcctgggccaatacctcccaatggcatttccattcaaccaagccaggcctttccccatagactgcatatctaatccaactggatcatctccttggggaacatcaacgtttacctagaagtatgttgcattagtagtttaccgcaagtagtacgatgagaaaaacacgtatggaaaatatagaccgaagaaggctaccttgtaccatgtcattggttgattttttggtggctcagactgtggcatccaccttatgtccttccccttatcagccttgaacaaactataatattccccttccaatccaatctaccaacaaatacataagattcacataaacattacacctcaccttgccccaaatactggatatgtcatcatagaaagcaaacccaagtacatagaaagagaggagaaaaattatagaatggctttgaaggaacagtatactactttatcatcaattgagttcattacacaaatatctgaacaaattcaacaatcttgtaccttgtattcccatttattggaagacaagtcaattattctgttttccattcctgagatcttcacacttgtaatgccggctcctgcccattcgtacatgggtcctccattcttaaaaggcacacagtttttatcaatcagatgattcaagcatttttaacttgaagctaaaatagcaggcttaacaaactatagggtacagttagaactttcttttgacaaaagtgggtacaattgacatgccataaatagcaatttgcatgtaaaggatatgcctcaagtttagtcatacactcgtatgtaaaactcagtaaacgtaggcacttacttgcaaaccaacagtcatactcaatagggaaagtttgttcttcccagccctcaaattgacgggcatttccacgctgaaatttgattttgagccattaccatatgcactacctaagaaagatttgcaagtagtaatgacattaaacagaagaactcaataattgaagagaactgtaaagtgtatatatgcaaagaaagtgctgctgaagatatatatggttgtctttttggggaaaaaaagatgaagaagaagaggtgacaattatataaaactctcatttcagggatatattttgattatatggaaatgattgggcattcagaagattcggctgaactgaaaatggtattggatggtgatttgatgatggtctctcagcaaagtaagggtaagcaacaaacctataagctcattgttcaggaaagcctgaacagcatggcctttggattcaatatgaagaacatggttgccacctgccagatgacttccatctacgtcaaaactgcatattccacaaagaataaagaccacataattaactgaaagttcatagttaaaaaaacttataatatggacaatactaagatctcttttttggattgttacatgcatatctatttgcaatagaagtagtatatatgaaacagactgcagtataccaaccttgttgtgtaccataggtagtcagtagagtcttttgttgtattaatatggtctacaaatccatttcggactaagtcgatattaccccaaatcccatatttctctctgaaaatgctccacccatcaacttttgatgattccaaatttgcagggaccatatccatcatcagagtttgagatcgcacctaaagatgaagagccaggagctacaattatttgggagaaaagaacttcgtgcaatatggcactttttatataactcggattaagcataaaatattctgatatttgccatttattttgctcctttttaattcctttgctatccatgttccatttgttgagaagggtgctatccgttttgttttgacaaggctttttttcttttaagaaaaacattttttgcagcaatgcatgttgtaattcagaagaccattgacatagaaaatcaaatacctttgcagtgttgaacgccacattcttgcagtcaggcaggatactgaccgaccaagcaggaagatcatacgaccggctctggaaagtaacaactttgtccttttctgaatcaacattagaaaggaatgcaacacatcctcctgattgatcagtgtaaacatcagcctgcaagcaaaaatgggacactatcaattccataagttggtagaagaaaataatgatttaatcaggggataaatacaggagcaaaaagtgaatagcagtgtgcattaaaacaccaatgggttacagtatggtagacataagcagcatttaaatgtacaatgctccttacagcagagatgggttgaagttaatatccataagaagttttgatgcaagctttcatataatattgaaaccagatttaggtcaaaggttataacgataaaacctacctcttgttgaggccccagagaaacaaatgacgaattaccatacaacagggtatgctcgcccaatttgatagatttgtgaaggtcccttagatgagcccatttcggaagtctcctaaggcctgcatttcagatcaactaatactactaagaactctttaggcttaatagtttgatggaattaataacagcaataaatccaaaccatattcatcgatcggtgcatcatagtcatagctagtagtaatgaatggccctccagtagtgcgaccgaaatttgttccaccatggtacttcaaaaggatagagaaaacttgattcaactttcagaaatatggagcttccactagttattcatactgacaaattgtattcaaatgactaaaaatgtatcaagatgcttgaacttgactgtaaatctttggtagtgcaatcaacagaaaacaattatcagtgtgcctttatcaaattaaaatgtaacttctgcaacagcaattaccacatagtaattctgaaggctgccacctttcccaaaaaaacgtgcaacagaaaatgcaacatcttcagggggcctgtggggattactttcgccaaaggtctggaacctaaattcaaataggaagaaacaagcagcagcacatcaattagcttctcttttaaaacatctacaatattaactccatattgtgctataaagacatgagaagtactagatggagtctgttgctaatatgtcaaaatcgttaccatcctggccaattctcagtccaaaattttggcttggttggtgaatttggcttgaattgatcacagtagaatgaattgcaagtgtttatctgcaaaagtaaatttgaatgcgtgagtgtaaccgcaaaagaaaagttactgcatatgcaaaaactttatttacatcagtatcaatcacatgaatatgccaagatgttatgaatcacacaatgacgggaagaatacttgaagacgttatggaaagacaatcctgatagctatagcagtacaaaaacaccaattgcgaggttacgatttcaagtgccacagattatctgctgttcactgttcagtttgcctaccacaatctctcagattttgaaaaaacttttcaaaggattttataccatacactgtcagtgacaaaatatagcagatgtgctggtctttcaaagaattttacaccatacactgactgccagtatgtttcatggagcaattcatggttgaaatgtttcattaagcaaaatgtgttgaatgttagaaactaaccactggatcaggcgcatcatactgctggcacatgatccaagggacaccagtattctgagccagagccatactagctgcccacattgcatatggcttggcaccagctccgtacgcttgttccatatctccgtattcattttcaacctacagtgcaccaattctgccgtcaattgtgaagtacacctatctcaaagttgatagaaacagattgatgtttcagcgccccaattaggattagtatgacaatgtccagacctgagctaggatgatgtgcccaccctgcgaagcgaagaattgttctttcttcatcatatccacaatgtacgtcgtgaatctcttcatgtgagactgcgtaagtaaatgtcagtataaccatcaccaaacttgcaaactccccaaataaaacgccacgaaattcacaagcccgccacaccttgaacggctcattgttcgtccggaacaccgtcccgggcgcgtaatgcagccacaccggcacgcccctgtacatccacgcacacataaacggataaacccatcaacccagagaaatcgaatcaccataattctgcacaactacaaccaatcgtgacactgcatcagtataacgaagaggcaaacccgaaggtccattctgcggcgacgaacggcccaatgcgcaggatcatgtacagcccggcgtccttgacgatcttcgcgaatcgcaccaaatcgaaccgctcctcgaagtagtactgcaatcagcattcaccaatcgcacacaaaacacacaggtttatcacggatcgaacatgctaaatccatcacaaattttggagaggcggcccggacctggccctgggcgggctcgtggccgttccagaacacgtaggtctcgacgcagtcggcgccgccgtccttggcctcggccaccagcttcggccacatctgcgagcacgagcagcgaggttaccggtagtaccaccgcaatgcgcgcgtgctggcgttcggggtggggtgcatacctcggggacgctgcgggggtagtggatggaggtggagatgaggaggcggcggcggccggagatgatgagggagcggtggtcatacgtgacgctcgagttggcgcccgctgcggcggcggtggtggcgccgagcaacggtaccagcggcagcagcaggaggagtagcctccgcaacgagaagtaggaggaggcgcccgccatggccgccgtcgagggtggtggtcgatacggcgtatgagcaagtaccacgcggtggtggtggtggtggtataaaatagcgtggggagggagacgccgcgccgggggagtggggacagtggagtgcagttgtttggattggatgcggcacctctctcggtgtgccgcgccgtgcccacagtcccgacgacggtgtggacgccccatctctcccgccgttccgcgcaagcaaacgcaacgcgacacacgcgatgggcacgcacgcagtgtcactcgcggcttgggttgggcagccggcgcgaggacggtgcgtgcgtgcgctgcagctggccgtggccgatgggttcgggggatagcggacgcagcggattggggatggatatgccgtacgcgacgcgacgcggggagggaggggaagccggggaaccgtggatcgcgtcggcgtcgcggagtcgcggggcgcatccgcgcatgtgaccttggtcgggcctcgggtgacgatgagtccatgagagcgaccgctgcttcggcggtggacccccgtcccgtctcctggacgagtgccacgttttcgtgacgacccccgtgtgatgcacagcctgtacaggggtagtggagtgaagatgcgttcaggatctgtgtccagcgaacggcgctctgtcacagctttcaacaagtttgatcctaacttctcaactcaaacttgtactaccagaaatcgacttcaattagggttccacatctactttccaacttcaacatacaaacaaaatccccgaaggaaaaaaaaaacagctttcgatcacaaaaatgaacaatcaccacttttcacatatctagtgttttatttaaatttcactttggatacttttaggaagctccagggcaggggcatgttgaagccaacctcagacatgcaaaatataaatatttgccattatcacattttgacaaggtagggtgtagagtcaagtgtttgttacatttccgaatttcaaggggaaattatagtattgcgtaggtttgaatttgttgctgcgtatttttttggtaagatagtggtatttttaaagcatgtatggtttgttatcttaccaaaatcagatggtgccaaaatctaatagtgttagaaattgcagcgaaccaaatatgccattggaatttgttttgttccagatttaggcgctacaaattttagcaaactaacaaatcatgttgtttagcccttctaacgcgttgaattgtgttaaaaattgatttagttttattataataatatatttattgttatgaatacaattctctctatttaaaattattttagctaggtcgaatattcttacctttgaccgtattttcttttaaaaaatcatataatttaacatcataagatttaggtttatgttttcaaattcattagagaaagcaattttatgatatatgattcacatgtcgttaagctatataaatttctagtaattaatggtcaaaattgaaaatatttgacttagaacaaatctcagataataagtagttcaaaacgaagggagtgacatcataacaaaatcaatgttgaagatacaagtggttgatggttactcaaatgcacaacgtctagattacagtcgcaaatgcaagtactcaggattccatcaaaaaaaaaataatacacaatatttaaaatttatcctaaaagtagtaacatttttttcacctacattctaatttcaatcaatcacaacatctctttgttcaccagacatacagagcacaatctaatttagagcccagtcatcgagccaagcgttgttgggacttaggagaggagaggagcgtggttaggagggagagagaggagtttatgtgaatgatcgatcgggtaagagtgtgtttagttcacgccaaaattgaaagtttagttgaaattggaacgatgtgatggaaaagttgaaagtttatgtgtgtaggaaagttttgatgtgatggaaaagttaaaagtttgaataaaaagtttggaactaaacaaggcctaaattgggtcaaccacatcagttagtcacttataatgcccttataacctatttgataacactctagctaactccaagagcgaaatctcaagtatagctttggagtagtctgaatcccgcttcatctttttagtttatcttttcagatcactctaacatgctcggctctttttaaaggtagagttaaagcctaaaatcgcatggttggactgcagctatagatgatacttttttcgtcaataaaaaacaaacataatacgacatttgagtatatccaaatctatagtactaaaatgtgttacatctaggtgacacttttttcatcccataaaaaacaaacataatatgataatccattctccgtagtattctcgtattaggtttgtttttttataaaatttgtactaaatatgatctgatggcttaaaattgttgatgatgtggcttcttgcatgtcttactttatagaagtaaatgtctcttaatgggtaccaactatataagaagataggatggagggagtatggatctccaataacagtgcaggcagtggcggagccaaagcccggcttgaacaggcaatggccctggctccaccagctgcacgcaacaattcaccagtaaattagtgcctaattatcttagtaatcacctttcttagtcaccggcaagacagtacaatgcaactagtacaacagtaaacgcgctcaacacaaacttttaaaacaaatgttcatactaaagttatctatgaattatataggcttgtatatacctcatttgttgttagacttgcccgactcataaaaatttttgaatccgccactgagtgcaggttagcccatccgttcgctatcttcgatctgctgttcaacaattccgcttccgccttccagtggcggttacgtaaacgcctggcctcctgttattctccgccccgtacagaaggaacagtagagctgtagagcacacatcattctcgttctcctcccccaaaacctccacttgtttcttcagaccccaagccgatggcggaggcgtcctcgtcctcggcggcggcggtcccgccgctggacccggaggcgattgccgccgtggcggaggcagcgccaccggaggagatgacgctggtggcgaagtggaaagggaacgactacacggtgcgggtggtcggggacgacacgctgggggagctgaagcggcgcatctgcgaggtcacgggggttctccctaaacggcagaagctgctctaccccaagttcaagctcaacgagtgcaaggactccgagctcatctcctccatccccttcaagcccaacgtcaagatcaacatgatcgggtaagcgcaataccctccttcctcctcgaaccctacacctccatgtgccgtcccgtgtctactctcgctcgtgttctgcagatacctgactgcgaaaacatttggttactcgtcgttgaactggatgattagctcgtaattcgggggaatgttggatttcggttggtgattcgaccgatctattcgatccagtggcatcgcgttgttcatgatttgaaattgttgtttatttcctatgggttctcagatgctgggaacggtatttgaagtttgggattgacatccagtagcagtatgtggagacgtttgtctattagattagtttcacgaatggacgtggagtaacgtggagtgactgaggttatgtggtgttcatctgagaggaaggaataaccttctcaaaccttgattcctcacagtttgaacacattcgggagtgctgtagttgcaatggaatcatccgtggagcatgtgaatttattgttaaattgatgcattagtgttaccaatggctgcaaaatgattatggattagtgggttttttaaatagaaaaacagcaggatgttgtttttcttaaatctctagaggcccgttatcgtttcttttctgatgtgtttctgatagtgatgcgaaattggatggtggttgatgttatatgttcagttggcatgtttttggtggtgattgaagaacctgaatgatgatccaggggcaaactagttagtctgtttgtacagtaccatttaagcctatgatctgtgttgatgtgttctaatctgaaagtgtgctttgttgaacttgaactttaaagaaagtctgtttcgagtttggacaataccatttaggccgggagatcagatcatttaccgtttagatggaaaattgaggatttaccctcctatgccaatgacatgtttgagtcatctaaggtcatttacatgtgggtcagcagggtgaatcctcaatttcaatcaaaacggagggtatatggtcaaaattttcgtttagggtatagatctgtgtcctattctgaaagtttgctttgttgaacttgaaaccctacctatggacataattcgattagcttccttttattctgttttataatgtgaagttactcattatgctttgccacttatgtgaatgttatttcttggtaaaatttgcaaactaatttatatgtcagtatgttcttgactgttaaatgcttatgtgctatgtggtttgagccactgatgtaatccgatattctgcacatggttggatcatgattcgttattgctaactaaactcatgctttgcaacagatctcaagtaaatataccagaagagctaaacatgaaaagttgtatatgtttctcagagaacatatatacttccaaccataaatcaatgagataaccctattacagcacatgtgcacaaatgagctatccacaaaaacccaattagttcaagaggttccttattatccgcatgaatcgcaccaactcaaggaatagtattgtgatggcagactcaccaccaccaccactaatatgtcccttttatgtagtagagatcttaattatacacagtaaggttgtatagctggcaaattgtaaattgggtgtagattgattattattgttcattcatgtgataaccttctaatggtgtagaagactaggaggatcttatgctatttatattgggacggctgttacaaagaactttcatttgacacacctttttgtttctaatattttgtccactccatagtacttccatttgtaggatcagtagtggatgcttggatggtgagaaaaatgcatgtaattgcgctaattatgaacacttgtaatgtagtattcctctttagggaaaaaaacatgccttatggagggcttgcagaggaagtttgtgaagcatttaccttgaatatactttggtgtgacacttgtggtttttctagtgaggcactgtgaggtgagagctttgatacctttcctgattcagatctgtttttatcatttccaagatgaaccatgggagatggacctcctcttaatattgatttagcactctggctttactcaacagtcaacagcagcatattcaagttttcagggttttttttttcaatggttcaaatcactcttttgctgcgttacatctcaaagataatggttctgtttgaaaatttgaatttgtacaccatgtacttatgtcccatttgaaggtgctttctatttactttgcattaattttgtatatctttcagcactgttgaagatgaaatatttgtggaccaagaagatgatccagagatactcaatgattatgaaataggccagaatgaagttactgctatcaaggataaagatgtctacaagcaaaaactaaaacggcgtgcaagtcaatataaggtatattcccgtgtcattttcgtttcctgtcatatgcttcttccttatccatgcttttatggttccacaatatcctgtttgttctgacagcctgagccacatcttagtgcttgttcctttgacctacatgaagttggtaatatttcctagcgtggttcaggttgttagtatgtcagcatgtcgattctagaaatattttgtggtttcacttgctcatagaccaaagccataacagtgacgagggttattctctctcttgtgtggtgctgattgaagccatagccagaaacttcttttcttagcaatgatccataagtctaagcccctaggggaggtagtttttgtggatagagattttggacatttgtgggcgct

SEQ ID NO: 10385 - DNA, 65521 bp, Oryza sativa
  unsure (1)..(65521): unsure at all n locations
ccgtatggtttcgcttttgcatgctactccctccgtttcataatgtaaatcattctaacatttttcacgttcatatcgatattaatgaatctaaaaatatatatctatctagatttattaacatcattataaatgtataaaatgttaaaatgacttacattgtgaaacggaggaagtagtatatttcctgtaattcactgtaactattcttcggaaccttgctatacgtacgactactccattcaaccggtgtccgactgaaatggcacaacaccataccacgtaacggcgtaaggcttcgtatgatgttctgcatgttaccgacgccgtgtacttcgcagtcgttggaaagttggacgctcaggtcgcgtgtgtagcattttcattttctttgttactggtagatttggtcctgcagctcattttattaatattttttaggcaactaaaaagtcataataccttattaagtcacctagcacactagtagctaggagagttaacttctgccccattatcacatgaagctcttaagtcctactgttagcgcggacaatgttgttatggtttctaccgctataaaatcgaattaatttgcaagcatatataattcatagctatccctagaaattcatcttgcttgaatcaattcatattgttcctactagtttccatgattgctacaggagaggagattatacgggagagaagacggtggcacaactcataacacaagtgaggcagcttgggtcctaaaaaatgttgagagattttaaaagttaagatggctaccatgataatctagagataaccgcgtggttttatccgcgtggttttataaaccctgttagaaacttcagagccattatgataggtgtggatactgaggcagctcaatttgttatgctaaaagcaagctcatgaaccgagtcggaaaaccttagcgagctaaaagcctgattcaactcgactcgcaagttggcttgttaggtttattaatatatctattattattctttttttgccgagaaagaccgaatgaggccatccgagtatattaataataaataaagttacaaacaaaacacgataaaaactatcgaggtcggaagtgcaccaaggtacatgaccagatagccacgtgctaaccacacaaacacaaccaaccgaaggtggaatctagcaccgaaataacccctgctaagtgtgaccgaacgcggtcaggcttacgacaacaccaccaaaacgagactctaaaaacaatgctcccacgaaggtcacaacatcaaggatgtcaccatcatccatctaagaagatgtggttttcacctagagaaacatcaagggagaggggtatcataatttcaaatctataattttatcatatgcataaacataaataatagatattaactaataaagaattcattatatacaaaatagtctagatgtaattaaatgatcaagcactatttaagaatttcgagcagctcgctagattaaggttagttatttttctcaacttcaaactttaattttatcgttttccgttagtatgcttttcaaactgttaaatgatatgttatttaaaaaaaaatctatataaaagttattttaaaaaatcaaataaatatatttttcaagtttataattattaatacttaattaattatgtgctaataagttttctcgttttgcgtgagttaaaaatctctctctaaaaaggagatataatgcaaccaagtatagtttgacttgacgtattaagacttcgacttcaaattcgaggtgaaccaaatcagattagaatcctctacagttgaagtcacgtgactttcttactctaatgatctatgggctcacatgtcggtgataaagacatcgtgcatttaactgaagagtatcttaatctaatcagccccgttcgttagtccaacaaaagttggataaacttttgaatactcgtggcacgtttttcaaactaataaacggtgtgtttcgtgtaaaaactttctatataaaagctgctctaaaatataagattaaattatttttcaagtttctaataatcaaaacttaattaatcacacgttagtgccacctcattttacgtgaaacacttaatatttattttcatcttcaggagattcaaacaccaccacatgagtttcgtatttttgttcacatgtcacaagtttgcactcgctcgaacgtttcgacggtataaacaggggttaattggatcaatgccactgtaaatgtgacaaatcagaaaaatgcaactactatttatgttatcggccaggtaccactgaaaatttttaaaattagaaccatgccactcccgttactatttccgtcgttctctctcacgtcgtcatcctcctctctcacgatggcacggcgagggcaaggcgtcatcctccgaggacgaggcggttgccggcgaggacgtcgcgagcgcggggagcaggtgcggccgcggttgccgctggcgagtacggtcacgggaggtcgcggaggtcgcgggcgccgccggcgaggacgggagcggggagcaggccggacggcgaggcagtcgtcgtccccgagaagctccggtcgccgccgatccagctcctcctccatgacgagatccgagcagcaccaaatcctgtcgacggaccagtcgaggactgggctgtcttgggcatgggacagcactggactccccgtatggtcgagcaaggtgaacttgcaccgcgcgttcatgggaccatcaattctatcttgaagaatgagcaagaaggacatgctccatggtgagccagaagctgctatggtattggtaggtgatacgccagaggggagcgggcgtccgccgccgaggacggtcgcggggaggtcgcagaggttggggagcgggcgcggccgtcgccggcgaggacgggagctggcgcggctgcggccacggccggcgaggacggtcgcggggagcgggcatggccgccgccaacgacggcgcggacgcagccgctgtcgccgccgaggacggtcttggaggcgggtgcgggcgctccttccccatccgtcgccgtgctgcactcctctggcagaagagctcgtcctctcgccgctccttccccatctcgacgcctctcgccgctccttccccatccgccgccgtgctgctctcctccggcgccatgttgcccaaccgccgttgagaccaagatgaaaggtgaagacagagacggcaaaaattatgacagagaggacggaaatagtgacggagtggtatggttctaattttagaaaattacaatggcattaactcgatttcataaataggagtgacatttttttatttgccatatttgtaatggcatgatccaattaaccctataaacagagggccgacgaattggggtaaaagtgggaatggggtaacggagatcggaacggacgcctttcaccctttccggctttccccactggttctacaggcatccgcgcggattcaaatcaaatccctcgtcgttacccattccagccttcccctctcaccttccccaatctccctgcggtagaaccctagaggaaccttctagaacccccgagccccccccccccccgcggcccccggcgaagccagcgagatgattctccggactccaccgcagcggaagcggcgggcggactccgacgtcgacgccgccgccgccaccgccaccacccggagccccgtttccgaccgccgcctcgtgctctacgaccggcccaccgccctcgtacccgctggcgtccccggggagcccatggatgacatggtctgcacgtaccactgccgtcagatggtgagatcgcttcgcccctatcttctactgctattgttgtcttagcccaatggtcggtggaagcatagcgtgtctagtaatttcggtgttactccagcctcgagctcccatttagctccaggtagtctcatatttgatatgcttagctcagttgattccacgcatgccacatcaaaaatgtagacaattatcgattgattgatcaatttgtaaggaaatagatggcgtggagcgaataattgtgtgtggctgttgcagtaagcgttattacatgccagtgtaccatattgatatatacatactggtgtgttcttttttcttgtatgtaattctcgtaggtgaaatcagaatttatggtggcattggacactgcagagaagcaagttcaggagtatcgagccacacttgatgatatggaggaacgattatccaagagtggtatgctgttcttttttcgcatgtgtaccttcttaagttcgatttgctatatccgttggtcaagatacatttatgtatcacttgaagcatgcacggagtttgggcctaccttcttcctagttgtgtttagtttgatttgccgggcgcagaaagtaggaaggacacgtagtattgaatcagattcactgctctaagcaatctactgttagaaataggtgttagcttattacattcgaagcaattgcatgcacatacttaaaggtaatcaataaacatttttttactgcttcagaggatgagagggcaacatgccaggacaaactgaattatgtcgagcaagaattggcagcaacaaaaggtcgggaaagtgcaatgcaagagcgattattaaaggaggtgggtgactttcaggaacgctactgtgatcaaatcaagaagataggggaacttgaggtatgcaaatctcctttggcacatgacctccatcccgtcacatagctggtgacttgcctttaatgtacaccccccatttcttttggttagttccttctgcaccactgaatatttgcaaaaggcctcattaactccctaataaagtgggtctggacgtacacacccactgggacattggcttgacacataagtgatgaggcaaacattcagctcctttttttaatcgtatatctgctcatctattggcatgactaatgaagatcttggtgctgcagacgcagctgaaaaaagagattgattctcgaattgctgctgaatcatcgtcagcatccgcaaaggagtcagtcaaggagttggaggggaatttgcagcgtttatctgaaaattcagaaagggagaagaaagcccttaagaagaagctttcatacttgcaagacgacacaaaattatccatttctaaactaaatgcggaggtctgtattgttgaactcttgtgcataatgatttattactagatattggcttatctgtttgaaaatgtctgatgatagcttgaaagaatgagactcagggcgctaaactctgaggacgaagcaaagttgctgaatgaacagttggaggacttaaaaaagcaactagatgaggtcagcttatctctaatttgcatgcttgtcagctcatattttaatttgcatgcttatttttgtcaagcaatatttctgatctttccctgctaagaataggctatctcattagatcatctttctcatctattttactatttgtttgatatttttgttcaacatctatattgatttaatttgtttctggtccttgccagagtgttcgtgaaaataatgagatggagcacaggctattgaattgcagttctttatcttatgaacgtactccatcagacgatcagaagttgataaagcttttgcaagaggagctccggaattatgtgagcattataaatttgatatctcccagataggttcatagctgattctatctgactggttatttttcttgcttctttcatgcacttgtacaaactacaaaatgcttctttggatacacgtggctaaacagcgaaataccagctattgatgactggcagaatcttatgtaactaatcagtgtcttgccgatataagccttacatcgttattaccattacctgcttagtattattagatagcatagggccttcccattcatagtgcagggtaataacactgacagaatgtgtcatattaaagttctgcccacccacccccccctcgccccccgataccgcaacattattagcagtgactagttttttttcctcgagaacagcacttgctagtaattactgatgcaaaatttatgttttagttccaagggagttgtttttctatggccagctaccataaatgtagaatgttcaagctgtattgaaagctctaatcttcgcacaagtgcgctaggctgcttgttcttatattcttcttcttggattctagatacaatgctttcctgtagctgtcttaaaattggatattgtacaagtgctgcttaacttcgttcatcaagggaccctttctccatgcaatgcacttagttacccccttcccctccattcttcagctttaggcatatctgaagttttatttcttacctgtcattatattaggttgtctgaaatgaactattgtccaaaatgaatgcatttttacctgtatggttctgtgcatttaggaaaaagaagttgatgaagctagaaggttgaagtcttcccacacaaatgttgagttacttaaagaaaaaatattggaggaacaggggtgcagggagagagcagaaatggaattatctaagctgcaggaaattgaagctaaagcacagaagttggagcttgaattagcatcatgcacagcattgctcagcaacatacctgatgtatcttcttttggtgatatacctcaaaagatcgcagatttgcagaagtgcgtgtccattgttacaatttcaatttcatttgtctgctataggcgagcgctatcaattatctgtgcttctttctttctttatgtaaggtttatatggttattttgatttttaacaggcaagcattgacaaatttaaataaagttggtgaggtaacatcacagttgaaagaattaaaggttgcattggaatttgctgatcttagcaagcaacgggcagaaggtgaagcaacccttgccaaagagagggctgaaagtgctactagggagatcaagcggcttgaacttctggtactgttgtttattgctatttttataattactactgtgatgctagtttctactccccccctcagtgcaatgcaattctgtagatccacttgtggcaccatagcaagttcataatctgttcatgcaacgataactcttcctctgtacattctgtaattacattgataacttgttctttcataccccatgatttcatgctgtcattccatttgctgtttgttttctgaacagcttgctgccatcagtgaagaaagggatagattaagaaaggaccatgctgtgtcgaaatctagggatggagatgatgcatcatccaaggtttgtgatttttttaataaaattgacagttttgtgcctttatcattcttaatggaatgcacaatatttcttgtgaggtgacaatccagaatatggaatcggatctatctcgaatggaaaaggtagtaacagaactggagagcactatacgtgaccagagagaactaattagtcaacagcacactgagctcaatttgatgaatgaaaaattgagcattgaatcaagaaaagcaaaatcattggagcgagatggagatcaactacgctcacaggtggctttacttgagtcaaaggtaagggttaagatgaactattgaaatggtatctacatatgctcattctgttgtttagagtagtttcatttcgaaaaggcacccttacatctcatgtttatcatggtcccattttcttcatattgcttatatctgtctggaacatcataagtttggattaattgttccagtccgggcaacctttatttatttgtttatttgtaagcaaactatcaagaatttggctccatttatagagtgtactgagaaatgaagctttattccttttagtaaggtagcatgtctatctatcttctctcatgagctggtgtgaggctgtgaggtactggacagggatgcttctcctgcttctgtgagaaagcatgattgggaccattattttttttcagcttcaaatgaagcttggctgaatgtttttgtgcttaatttctgttgtgtttgttgtatgttgagagttaccgtttgctgctggtgcagtgatatattgttggagtctcaagtgaatgaatcttcttttttcaatagagttgtttttcacagttgtcagaaatgccactgtaaacaatactaacttagctgttgattaaaaccatgtttgtaccttgaatgttcttgttatgtttgacagctgggccatggagattactctgcctctagcacaaaagtactgcgtatggtaaatactcttgcagtggacaatgaagcaaagcagactatagaggcattgcaagctgaattgaagaaaacgaaagagaggctacaagcagttgaagaactaaaaggacaagctggtgagtggttttattcatcttttcgtccttgtgacagtgtccacattttttgttggaaccgtgtgatagagttactacctaaaggattgtaggctgtagcattcattaatcagttgtcacctactcagtttttttaattattcaacaatatctgataactcttttttttctagtcattgctccatagtctagcaagatgtgagaatcctcagatcttcaacgcttcatcaaactttaaatagaatatttattttactgcagatgttggaactgtggttgatgtgaatattgctgaaaagctagcacagcttaaaaatcaaattgcaaccctagagaaacgtgaagaaaggtacccactttgttatctgtatgttataagcttctgttcatactgatttgttagaaaatgaccttacagtttgtttgaaacagatataaggcagtatttgcagagaggatctcagttttccgaaaggcttgctgctcgctctttggttataaggtattattaatatgacacaacccatattacacagtggatcaaccctatctatctattactgctatttgtgcattctccacctctttttttttagagatgagggattcatgttagcatcttgcgaatcttacatagtgaatctgtatgcattagtatgccaagtcagtgttttgggatttcatccaatgtgaacctcttgaacccaaattaaaattgactctcgatcctggtgtttgaagctaaggatgaaagagtacatcagtatttgtgttgtggagtgtggacatggttagtttgatacttctcaatcatgctgtcttttggtttgaaaattttgattgccttcgattgttgcattggtcatgcctatttcagataaccgtgctcatcattttctagcttcaacatttcgtttgattttttctcatgcctttatgtttgatgtcaatactatttgacgtaaccttttcaattttatggttttagatagtgatgaatgatcagcaacagtcaaatgggatccctgtaacacgttttattctgcattctgtttacgcccaaagtgatgatgagaagcttgagtttgactacgaatctggaagcaccaatattgtggtaggattattaccttgctgaaattatcattcctataatttaacagggcattatttgatgttattaatgtatatacaggtcaatgactacacttctcaacatgaaattgctcagcaggtattcagcgtattggttgcatttgactgtatttcttttttctgatgcatggatgaaataactaaaaagtaatgttacagatgtgtataggaggaaagtgtggaaacatcgttatttattcttgtctaatatgactatttatttatgtcctctagttttgcatctaggttgtatgctgcacaaatgaatagtctggttggtgtcttagtgaattgcgttaggatgcaatagataaatcccagtggctagataggtgtacatttacttaacacatcacatttcatttaaggcatatctcttggggtgctcaggaaccagcaaccaagatgtttctaatgagaatgctgtacacattttctagacatcagattgtttgaagttggaacaaacatttgatctggacacccataccatgatggtcttacaacagcaaattacagaactgtttttaaatcttgtgttgggccacttggttttactgcttctgatgatgcaactatacattttcaggtagatattttcatacgaaagatgaattctatcccggccttcacagctaacctgacaatggaatccttcaacaaaagaagtatctgttgaagataaaagttcagtgagaattcatattgttggattttgtgagtatgctttcttcgagtcaccgaagattggaaaatgtatttcattttggaaacactctgggctcatgtctttccgatgcattatcacagcttctcgtagtaactggagatgtccaaattgttatgttgtggcagccctggaccgtggtcgagcaagctcctagatatagcaaggttccccccaccctttttcatatatactaaggtgcaattgatataccttgtggttttttatatgttttaacgatttgttcaaatgtcaaaagctgaggagcacggcgtgttactaattggacatgagtagagagttgatgccgggctgtcacatactcacatggattcacctctgttatgatttttgacaaagtatatatgaatgcgagcgttacttgtactgtggcctggactgaagcatgagcttttgtaaactgtagcgaactatcatatgtaactgagccatgtgaattgttaattaccgcaaaccagaattggttttcttaacatgctatcatcataacgtaatgcacgcaacgcgtagatcccagccgaaagcagttaacttaactttaccccgttcccctgcattttctgggctacaccgatccattcccctgcattttcggggctacaccgatccatgattggtacatagtacgccggtgaatccgacgtacaatcagcacacgtaaattcgttgtcatgcatggatgaactctcccaggtcaggtcccatgtctcacacgctcagcatgaggcgcctcacacgaaatggccgccccaaaccgaaccgaaccccgcgcggtgcaggcgcaggtggccgcggctggcagataaccagcgcgtttcgctcgcgcgccggcacataaatcgcgtcggcctccggctgcccgagagccgtacgtactacagaaatacaagtgctaacttagcttattagcggataatccccccagcgagcgagcgagcgaggctgctgctgcgaaatgatggtttgtgatttatcctgtcaattggttaagttgttgtgtttagttatttttgggtgaaataccgtatggatcagtggctaaagtgaatttcttgtagacactgtcgacgtcggagcggcagccgcagccggagaagaagccgccacggacgaggccgccgctgccaggcaaggccgtggccgcgctgtgcgtggcgagctttgtcgtgggcttgctgctcagcggccgggtggtggtgccgttgctacctccgggctcgtcgtcgccggcgagcaactacaagacgtccttctctactggctgcgagaacaaacgcgctgtaagttgcatatacacagagtccaaactgatctctaatttcaaacggttgcatgcatgacaactgagcttgcacgtacacaccctacttttttttttttttggaatccccaattgacaccctatatattttttgtgtcctggtcggctgatccaactctggaaaatctctcagaagctaggcgagagcaatccaacggacatcatgaacgaggtgtccaggactcaccacgcaatccagtaagcattttccttcgatcaaagcgaatcataacgtacgtatctcatgcgagcccaatggtgatcgaactgtgcgagctccctccggcctataggtccctggacaaggcggtgtcttctctggagatggagctcgccgtggagcgcgctcggagcagcgccgccgtcggcgccggcacggccgtctcatccctgggcccacagaaggccttcgtcgtgatcggcatcaacaccgccttcagcagcaagaagcgccgcgactccctccgcgacacctgggtccctagaggtcacaaaaacttacaacaatttttcagtgattcccaaaatgcattttttttattttaaaaaaagagattaggaggagaaacgtcactcaaaatatttttttaagaaaaaattatgagctgctgaggattaaatacggaatctcgaaattgaaataatacatcctctcatcactgcactatcaggtgcatctcccaaaatgttttgttttggggaaccagttccaagtatcgatgtgtatggttgtgcaggggataagctgaggaggctggagaaggagaaaggggatcgtgatccggttcgtgatcgggcggagcggctcggcggcggcgggcgacgggccgctggaccgcgcggtggacgcggaggacgccgagaacaaggacttcctgcggctggatcacgtggagggctaccacgagctgtcctccaagaccagggtctacttcaccaccgccgtcgccacctgggacgccgacttctacgtcaaggtcgacgacgacgtccacgtcaacctcggtaatgcaccatgcaaacacaaattaatacaccattattcatgctcgaataaataataatctcgatcttgttcgtgaatgaatgaacaaattttcgttgcagggatgctgacgagcaggctggccaagtacaggacacgaccgagggtgtacgtcggctgcatgaagtccggacctgttctgtcgcagaagtgagcaaatggagattaaaatcttgtgttttgtttgttggtagcctgatgcatggatgaatttgtcggtgttttgttgttgttcgttgttgcaggggagtgaagtaccacgagccggagtactggaagttcggggacgaggggaacaagtacttccgccacgccaccggccaaatctacgccgtttccaaggatctcgccgcctacatctccatcaaccagtacgtacgcttgatcctagcttgtgtgcttctgaaattgtgacgtgatatgctctgaatttttcttcttctaggccgatcctgcacaggttcgcaaacgaggacgtctccctcggcgcgtggctgatcgggctcgaggtcgagcacgtcgacgaccgcagcatgtgctgcgccacgccgccaggtcaatctcagctatcgattcttttcatgatcatcttcctagctagtggtactactccagatcagaatttttcagggttttttgttttgttttgaactttctttcgcatttttcactggcagattgcgagtggaagaagcgagctgggaacgtgtgcgtggcgtcgttcgattggtcgtgcagtggggtctgcaagtcagtggacaggatgaagcacatccacagggcctgcggcgaaggccagggagcagtctggagcgtcgctacgtgatgatcacatcatcagctttaatcgtagcattaatctttggttttatgatggtgcaaagcagctagcgggcgacgaggggactagtttaactgaatgatcgattgtttcagatgattaggaaacgagccacgtagaatggatgaacgtgcatgatggtggaaaatggaaatgcatgggtggtaactgtaaaagtgtaaaggctttagcatccaatttccagggggagttgggtcatgccatatgcttcacttattaatcacagctctttctgcatttttaagggctccttcagaacgcaagtttttttttatgattagttgaattcttatagtcaccctttatatagttcgtttacctttcaaaaagtgcagccgtgagatgtaatttctactctcaaactaaaaaaaggctgaaggatgcagaaggaactttcacatgaatcaaaatatattggtttttaactataaatctataatgaccgaataattataaggttagcttttaacaatatcaactaaaacagtcaactccctccatcccaaaattgctggtcatcccagaattgtagtggtaaattagcttaaggtgaaaattaccacgatgccccacattattactagttgcatgttgtcatttcaattaggggattaccacaaaaggcactagccacacaaggaatattttttaagtatagagttaactaaggacatgttcaatgcgtacccctggaccatgtccctgctcacgccgtcggtgcttgtcgtcaagccgtctcctagcagagggccacgaccccaatacaggggacgcggctctatgagctcctcggttgggggaccgggcgaggagtcgcactgggtcggccgtggctaggggaggagcctgtggacatcgctttctccccccatttttccccttctaccctcgccagccgccgaagagagagagagagacagagagtaccgccggcgccggcgaggtggaaggcgacgagtcaccgttctccccggcaacaacatcggcgcctgcccgccactgtctcctcgttgcggcgcggacggcaccgctccaacccgatctagccgcggagggccagatccacccacgacagcgccggatctgccgctccggccggtgacggtgcgagacggggaggtcagcgacggtgcaaggcagggaagatggcaatggcgcgacgggcagcgacgtgggaaagagagggagagagaggcggcgacggccgacaagtagcacgagagagaggggcaaatatgaaagagagtgagagatagagtgagagagacggatggaggtaggggtaggaggggaaaaaagtctatgtggcttcttgggttgggatacccgttgcgggctggagtatctccatcaagtggcatcaaattttaaagaacccattaggggtatcctccattggaagatgagttccccagagaatacccttagttagtgagagcactctagaggtggcttcggttgtatatgccctaagtagtgtcactagtacaagcgttactactccaatgccaaaacaaagcatggaaggacaaacgctaagaggtaaagcgttaagcaatctgggacggagggatcggagtaacatttaacctcctcctcaacaaacggttgtacttgtctagctaccaaccacatgagatatcttaaaatcttagtacatagggctttgttcgactgcaattaatttcattgttgcgcaaccaacacaaatagtgttgtgtctgcagctgcatgcagcggctgtatcggccagtcgaacaggccctatattacctttggatgtgcatccaactgttactactcatcttctccaatcagcaaagctattgcaggggggagtctagtacgtgaacgttcgtgggaggtgaatctggcgatccgttttgataggttagcctttcttcgtactaaatcacgtgcctaatcatgatttgcatatattttatcgtttttgttataatcaaatctgtgaatgcttcgtcctttttttttctctaagtttgtttagattggactcttttttttaagaaaatattcactaaaatttctaattgcagatataatttatatatagaaagtttttatatataaagtctatatatatataaagagtttaaatacataaaaatttatatacataaagtctctatatataaaccttttatatgaaaaatctatatatatataaaagggtatcagaaagtctacctgtgaaaagttttcaaaaaatagttaacataaaagtttccgttaataagagtaagaaaatctgaaaaacaatcggcttgaaaaaaagaaaaagaaaaaccagttctcgtaaaagaggaaagagagaaaataaaaagaaaacttaatcacgtaaaagtgtaaacagataaacaaatacgcgtgtgaagaaatatcgatcccccacctgttcgcgagatcggctatccgcgaacgttcgccaactagctctttcggtttttctccaactagttgtcatccaattgccgaataggatttgacgattatccgttttatcaccttacatgtaaaatcatctatggaatggctaaatgtacttaacaaatagcgaaactatatatttataattcctctgtttggttttgactttgagttgtcttacgatcaggggtggatctaagaagaactgatatgagggtatgaacaaaatataaaaaactatatccctatcttataatgaatgtatgatagaaaattttagtgataacttaatgggggctccaatggatacaagggacctacggatccgtcactgcttatgatcaccaatatatttgaataatctatttaacatcaaaggtgtacgattaggttcataatctaaaatacattactagtatcttacattcaaatctattcgcattcacattgtcgatgagtgatcctctctagcgggagatcgtgagacccccctttcgtgagttcggctgggggaagaagctcgcctctagaaatcgcgtatccgtccccaaggctcctagctagctcgcacacaaccaaattatacaggtttgggccgctatgaagcgtaataccctactcctgtgtataggatttagactgagagttacaagggttcctaaactcgggagaacactcttacttccctcatccacaagctcagattttctgagagtcgtcccctttctcggtgggcaaggtcctccttttatacctcaaggggacaccacatgcaccgcctctacctactcttctttcgggtggggacccaccctatcttgactggaactcgacccgtgccttcgcctggaagctaaaccacagcttgtccttgagcggggcccagcgccgtccctcgcctgacacgggggacagccctgtcattccctcattaatagatgaagacttgtggtggccaccgtccgaatgaccctccgatgggacgggtcatacatacctccactccgccggaagcagatgcgacgtgggagcattgttgtccgtccagtcacacgtgaccggcgtcaggccggtcacagaccggtcattcttgaccatcgcgcgtcagtttagcacgccgcacgtctgccccactgcattaaatgcgacagagggcagttggggcgctgcgcgcattaaaggaagttcagtctaggccccttcctcgctgctccccccgccaaacggcggctgggtgagggcctcggggcaaagcagtgcaagggcccgaggggcatgacgtggcaccccgaggccccgaccccccgtccgctcctgcggttcgcggaatgcggggacaggaccaggctgtagggacacgtgacaggatgggaaggtagattcccctcagttcgcatacccccgggcccatatctccgacagtagcccccggcaccacatcggacattggcctcctgaggtcggtctgacgtggtgcctcacgacttccaccaggtatatcggaattgtttcactaagtggatcaaaaatatttcactcgtttaaattgggtgttgtttcaccttatataaaaacatgtttcaacaaatagcgaaagaatgtttcagttcactgcaacattagatctatacatagcgaaacattgtgagtacactaggtgaaacatttttcggtggaacaaaaaataaaccaaattcccttaatagggggtttccaaaatatgtgggtttttttttgcaatggaatgtttcgttcactgcaacattagatctatacataacgaaacatttttcggtggaacagaaaataaactaaattcccttaatagaggattttcaaaatatgtaggttttttttgttgcaatagaatgtttagattatttcagttcactgcaacataagatctatacatagtgaaacattgcaagtacacttggtgaaacatcttttgtgaaaaaatgggatagataagtggatgggtccagataaggagaggtgagcgcacgtatggggggagggggagcgaccgatttttcccacctcccccggtcgcccgattataatccatttcctattaatatctacgtttatactgtatttctcgtaaaaaaatcattgggcagccagccgtccatagaagagggacaacgaacactacctaaaattgctagccgtctgattgagaatcagggggcaagatcggcatgacaagagagacagcgacccatcatcattagcacgcaattaatggttagatgatccgaacccggagttccagacgctgctgtcgtgtccttccaaccttgaggcatggccccaccaccacgtcactagtgacgacgacccaccccctttccttcctccctttaccagttttgcaatttcctccctcccctaagaacgaatacaataacagactataacctagctataaacacattctaaataaataaaaaaatagatagaagagccagtaagatcgctgcagcacatattacaagatacatagatgtatgataggtgggaccaaatattaattgtgtactactccctctattccataatataatacacaaccacttttcttaaatgttccataatataatacatgcatgcaagcatgcaattaactatgacatcttttttcattaaattatcttttttaaatcatccactctcatattatctaattctattggatacatgcattatatttatgaggatgatctaaactacaagatgataatcattatttcttgttctttaggttaagggtggttgtgccttatattttataatagagaaagtatatgtttctaggtacctatgatatgaattggctattagattaattaaatataatttgaagccaatagttgtttatactattaaacttgctctaaacccggtccagaaaagacggcatgaaatccctatcctgacggatcattatccccgggctgacggccacgtgtccctccaaatttaggcgggcgaggtggagggagaggagaggaggcgaagcggccggaaggaaaggaaagccgaaagtttttgttgctctcgattcgattgactggacgcccggctacggcctcccgcggtccccgcctcgcgttttggggagggcagtttcgcccatccgcgtgccccttgcttggttgtgtttccgtgtttccgtatttgcccctcagcgtccgtttgattcctctatgctctgctgctctgctctgatctgctgggatctgccgttctgctctgctttgccgcagccagagcagggttagtactggagtggagtggcgtgcagtgtgctactgtactgacagccagtgctatgagtaccattcattttcgtgccgtttcgttcctattcataatttaaatatatactataatgtatattcctaatactccatcctttctaaaataactcaacctagatggggtataatgaatctggattaccctttatccagatttgttgtaataggatgtgccagatctatttaaaatctcttatattataggacggatggagtactagatatgtaaaacatgtttgaaagagtttaaaactatgagaatatactggttgataattagattttgagaatctaaagaagttaagttttcccggttctggcttgtaatttatttcctaggttatacaactatatatttttagaatttgggtcacaccttgaattgttaatggagttgaagactatgtggaaatttatagtagctgctaaaaactttcccaaacaggtccgcgatactaatctcatggcttcggctttcaaattctaatactatggtatgtcacattttgtattatatttttttttactaaggtagagtttgataattgtgctactccctatactagggatataatacctctatctcacaatataacaatctaaattatgacgagaaactatataatataacgaatatgtactccctccgtcctataatataagggattttgaatttttggttgcactgtttgaccactcatcttattcaaaaaatttatgcaaatataaaaaacaaaaaatgtgcttaaattactttggataataaagtaagtcacaaataaaataaataataattctagctttttttaataagacgaatggtcaaacagtacaagtaaaaatcaaaatcgcttatattataggacggagggagtatattatattatactaaagagtagtatagtagtgagaaaaaaaaaagagtagtattggcttggggtgttgccacgtcatcacctggtggcccaacatagcattatctaaccggatctactactgtactggtggaatagttcaaaccgaggggaggggcattccgggaatttcggcgacacgaggacacgccgatttccccgcggaccctctcctccgaaaaccaggggcctgaaatgaccatcgtacccccaagcctttattccctcccatttctcccgctcactttccggaaagtaccccctcggcccgtcgaacccaacccaacccaaccacccacccaacaacgcttaaccctggttagcgctctgccacgaccctgacgagcccatcccgccgcgagccacctacacccgttccaccatacgccggaggctgaccggtgggcccggaattcattgcagagcgctggtgttcaaggacccggcgtacggggccaggcttcccctcgaaggaatcgaccccatcaccttcctcctctttatctcgtagccgccgccgccgcaaaccctaacccgagttccgatctggttcgacgacgacgacggcggcggcgagggaggaaggcagatctgaggagatccgacggcgggggagaagggggagatggtggtgaacagccggccgctgaagagggcgaggacgcgggtggaggccagggacttcgctgggttcccgccggcgggggacggcggggctgccgggacgttccgggaggcggtgagggggttcctcgcgaggtacgcgcggctgctgcctctcccctctatcttctcgccggcggccgccgcggcaccgccgcatctgttgacgtggagggtgtcgctgcgggtcggcgaggagggggacgaggagggcggcggcggcgccgtggagctcaacgtcgttgaggaggatgtgctccgatcgcgatctgtgtattgtgaccagtgcagagtcgtgggtgagtagctttcctctccttttatttttctttgtcttttctttttgggttttcttggaaaaacatttcccccgatggaaaatattattttattattttgcctttatttttttgtgtgatgattgctggataatgtctttcttatagagtattactttagttttttttagcgagttcggaatgcaacttttcttcgaaaaatgttacagaataaatgttgtgaatttttttttgggaaataacggggtgaaaggggcaaatgacgccgtgtctgtttccaacagcaatttctcttgaatcttctcgcccccttctgtgactgttagcctatgcaagtattgttggcctgttgcttttgatgtacaatttccacatttgattgctgtcacaatccttttgcaaaagagaagaaaaaaattcaatcctacagaagcagtgatgtaatcttgcgcgatgccatttgtttggttgcaggatggagtggtcacccggtctgtgggaagcggtaccatttcatcatcgagaacgacaacaaccaggtgtgcggcaagcgccacagctgctgcctccgctgcgggactcccacagtcgctggagaatcaaggtgggaagaacaagcaccgttagtttcagagaagataaatatagtcaactgtaacaccacgattggtttcgggcggaaggatgataatgtgcctagtttatttcatatcgtggtgtagttgtcgagttgttcttatcgtgcctagatgcaaagattaaacttgtgagagatttggtgatcgaatgatgctgccctatgctaattgtggttcgtgctaactttggatgcaatgttttccagatgcctcctatgcaactttgatatggatggcgaggagctggaggagtgcgggtacatgcatctggacgacaacacccacctgctgcacgctgtggtgcatgcaaatggttatggccaccttctgagggtaaatggccgtgaaggtggctcaagatgtctcacgggccgtgacataatgagtttctgggatcgcttgtgcaaggtgctacatgtgaggtataaattgatcgatatgttttggttcatgtgtcgttcctacaaaaagagggttattcagcatgccataaccctgaaaatttcactaacctcactgcaggaaagtaactgtcatggacatatccaagaagcatggaatggaatacaggcttctgcatgccatcacaagtggccatccttggtatggtgaatggggatacaagtttggcgctggtagctttgcactaacctcagatacttaccaagaggcagtggatacgctttccggtatacaactcgcgttgtacttctcacatcgccagcccattcggacccctctgcagaacacgattgctctgtactgggcactctctgatcgccagcttgtgactgttcgggacctcttccggttcataatgcacctgcttcatcaagcacgcaagaagaacgagacatcaaaacccacaactgatgaacacaaagaagttgcatctaatgtgctctgcaagtggacaaaggaagatattgatcgggcagaaactgcaatgctcaaggtcctacgggttgttcagcctggacagtgggtatcatggcgtgcacttcggggagctgcatcgaaggctgttgattcacaggagctacttgactattctcttcgaggactgggtggaaaactgatggacgatggccatttcatagctgtccgctgcaatgctgagacgagtgcaattgaatacaggtgagccctatgttcagaatgttgctcctatttggctaactttgttataaactatcatgaccctcctcctatatctgctgacaagcaggctggaagataactccaaccagtcagttgatgcggctgcgtttgggccttctgttgatcatcttctgcacgatctgaagttcctctataacgctttgctgaacccagaaaccatgttggcttcacagccagaggttataggtgcatcatcacacagtgcagcagcaaagattctcgactgcaagcagttcatcaaacattacgatcagcacaccccacgggctcctttgaacccattcctactttctgtgaggtgttccattgaacttcttgatcacccaaaagactacactgcaccaccggtggaactagtgcttttaccagcaagtgctacccttgctgaactgaaaatacaggctacaagggcctttcaagaaacatacctcatgttccaaagctaccaggttgaacagctccctgacttcccaaattttagtgacacaaccctcgtgaagcatgtgcttggctcaagccagctcgtgagggtaagaggaaggtgcactggggataaccgaagaattgtgcaattcaggatggaaagggggttggagaactggacggtcgactgcacctgtggagccaaggacgatgatggcgagaggatgcttgcatgtgatgtttgtggagtttggcaacacaccaggtgttcagggattagtgattttgatgatgtccctgagaagttcatctgcaggaagtgtgctagtccacgcagagaaangggtcgtgtgggtgnaggtgcaatgtggggtagcagaatgaatgtgagcgctgcaggnaggtgcnaagnattagatagantcatctgttgncggtgcaggcaattttgggcgcatggcacntgttgnatgactgtacataatgtgtgaaatgtaaatactganggaagagtggggagtagcacctgaggcctgtgtgaaccttcatggaatcttgtctttctgaccagtgatatgatgttaatctatcctccttggaagcaatcctttctcagaattgttcagcacgctcaattctgcatgcacaatcaagtatttttgccaagcttttaagttagaaatataacacaagtcaacaaaacgtacgtaatgatggatcaatatgagaatatatgtcagtgacaaaactaggcttctgggcgttacatttcctctagaatattgctatcaggatatatgcaaatgcagaaatggctaacagtaagcagatgaacaagcagcatcgcaaaaaagggataggaatgatctattatcacttgaagattatactaaacgagtagagcttccgaacgcacctgcaatacaaaaatgaggaaggcttagtagcacatgtttgttagggtagtttgctaaagacttactgcaaaattttcataacatgattgttaggcagttaactggtcaaaactggcttgcaaattttctttacccattcaagtgcagcataaagagggtgggatgaaagatgacaatcttgaaatgaataataagatatctaacgaacactcattaaattcttccaggcttccatgtcgtggctttacactatgaaaggcagccatatagtagaaagtggtgtcctgcaattttaacacagaagttccgttgatcagatcaactagatgcagcataagggagggcaggatacatcgagcatgaaacatttaataagagtcatgaaaggtgaacccttttccaggtaacaattgggatgttaaattcgagaaaactacttatggtgaacaagagcaacctttagtagttcgaaattcaacagagccagtgatgttagtcctagttcaaggcatccgatgtacacattttttttgtgttagaaatatggattcgcagcaccagtctgcaatgtttgcaaacctaatgctggtttgtataacttattccagtaagctggtaagtgatggacatatctaaaacatatttcagttagcactaccgtaattacccatgcacccatgcgttcgatactaaagaattgctgagctagttagtggcacgaaaaacaaagcatgtgattagcacataattaatcaagtcttaactatcataacttgaaaaataaatttatcttgttttttcaaaaattatatatatatatatatatatatatatatatatataattttttgcacgaaacagataatttggcacttcaggtagtgtgcccatgataactgatgaagtagcctagcctgtatgctagaaagaacgcaacctaaaatgtctaaaagcataggatgttacaattctgcaagagtaaggtgactttgtgattcattctttctcagtgttaggtccttactgcataaaacagtgatattatgcatatactacagcactttgcacactcctagtcctatatcttaaacataaagaaaagtagagctaacgagtgtagggagcagtgtacataagaataggccaaaaggcattcaggcctaaaccctattgaaccaagaatgtgtaatcaatcacactcagaattgtcaccagctatttatctaaaattatcacccaaacatgatagaatatgttcacattgagttacggatagatcattgaccgctaatttcaccagttatccattaggttgagcaaggtaacagaataatggcacagatgcataatatgatgttacaaggagtatatgacattttatacatggaactttcaaaagcgactatcacttatttgcagtttatgaggcttaataaaagcaaggatctttgataaccagttaggattataaactaagttgattaacctgtattgggaatttggcatgccaattttcacttcagcattgtccatcaaattcctaggaaggatttatgaactctacttagcacaactagcattttagttaaacagagagtcaatgggttaaatacagaagtttttcagtgttaggtctttatccctaggtatgatctatgactccacttgtttactaccagacacttctataattatcatgatcacacaattgctcttcacccgttgagccatgaatgaaaaaccttagacaaggttagattgccaaataagaccatattaactacatcaagcattgagagatttttaaaccaatgaataccaaactcaaaccctgtgaattaacacttgatcaaactactaccacattattcaataagatgtggtctgacatagcaatacaaggatctcaaaactaccaaaacaagcaggttcaccaaaaaatgaatacagattacctgaacagagctgctgcctgctggccttacacctaacaagtaacgagaatatgaggcatcacctttccagcacctatcttagcacataagacacgaaagtagaaaggtttagatcctaagaaaatatgaaccatgtaaaataaatgtaatcacgatttaagtatacagactagtataagaacttctaatccagccaaagtataaactgtataatcatcaatcaagtatgcaataccgatccaacaagcatcaaatcccatagtttgatcagaaaaacaaaattttgaactctaggccaaaatgtgctgctaaataacgctcatttgattaattgaagcaccataaattcaatacgcagaaatcagagggaacccagaggtagactgccaaactgagtgcagtataaacaaattcagctctgacgactaatcgcaaaatggaccgaggtaccaagcaaaaaatctagccacaacgaagcaccagtaacgtaaaaatcacgtaagcatcagagaatttgaaagatcagacgttctagccacgccgccaatcggaatcccagcgaacggagccagccaaatgcatgatatcagcacaaaccaaaacagaaacaatcgcgcattggatccgaacaaatcatggaaccctcgacttacttactatgccctagccacaggacgcaaatagagaggggaaaacatgggttacgcttaaaccagttcatgaggtcaatacataagtcgtagcgcaaatccaaaccgcgaacaaaccctaacacggatcgaaacgaagcattaagcgcgaataagatgaattcccaatccgcagcgcaaagtccaatcgcagcgaacacaggggagacacccaaatttccacaagcgcacaaccctataacaactaaaaaaaagcgacaaatcgaagtcaaatcaaacgcgaattcgcaaccccatcaccgaaaaatgctagagggggagggcggctacgctcaagcatagcacgactcaaatgatcgaacaaacgaagcgcgccgagcaaacccaaaattccgaccccaatcgagcatcccagcccaaaaatcccaaaccctaagcagcaccatctccaccgcatcaacaaccagaaacgcgaaagcacagaacccctaacccaccaatcagagcacataatcaccaaacgaaccaaaaacctaaccaccgacctggccgcaatgttgcgagctcgaagcaggcagctgaacaaaccaaaaaaaatcccccccaccgccacgggctccgcatcgcgcgccccccagcagcttcatcggatcgagcgaggcgtgggaggcacgccccctccgcgaggcggaaagcacccgggaggatggcgtcgctcatccgcctctcctcgcggtggagataccagcagctcgaggaggggggaaggagcggtgcgaagagagaggagagaagagagggggagaagggggcgaaggaaagggggtcgcgcggtcgcggcgaaccgaaccgcggtttggcgactcggatgcaagccgcgggcacgcacaccggtaggtattgtggttagggttctcgcgtggcggccgtgtggctgcgccgtggggcccgcaggtatctctctcttcttctctttttttttttgcccttttaccgcgcccttttcggtgccctggactggtcagcgccgactcgcgtcagagtccgtcccgggttgcgcaacgcaaaaaggccaggctttgtgtgactcgtcaacgcgagcggctacgatttcacatttcgctagctgaaacacggggcgttatcttcccacatttgggtggtcgttacgcatcgttgtaaaggaatggagttttgcctcttccgtagcctgcacagtgcatgtacgcatggcaaacgcaatgcgtagttgctataacttggtagcgtgttttattcgtgcatgcatgcgaagaacggaacaagtcaataataatggctttccacccggccgggggcaaagaactgaataaccatctggttcgattcatcgtgtgtactgtactgcatccaagcgtcaggagagttcttcagccttaccgtgaagtgtagtaactcatctcaattctcaacagcattactactgtactagtatctctccacagatgagtccatcttatcctgaacttctgcaatcttgggctcttctgttctgctctttgcaaacgacgattttttgccatggggaagaagggagcggccaaggagccgcgcgcacgggcgtgctgttttcagggaccatggcgcgagaatgaggacatgtgccggtggggaattctcctcactctgcaatctgcatccacccttgctgaaaagtggaaaaaaaaaaggcatcacctttttgccgcttatatatctcatcagtgcccggtgaatcacaagcttgtcatagaaaattagaaatatagtacaaatttgcaattcgtgctctctaggtctcgttaagcttgtatagcacctagatcgagtaactgagtagtaggttctccaggtacagggaaagatggcaaattgcctgcttcgtgatggtcgctctcgaccacggcgttctttctctctggtctcatttgcaatcttgtctacccaacaaatagcttagatgtgatgtttacttttgctttaacttttggaaatgctgagtgcatgtatagtagctagtgcagtacttatgataatggtgtctgttttgacatgtcgccactgttattgctttcagaagcagtgtcgttttcatcacgtgtcaggttcaagagcggagcccccacccactggaatcaattgtgagctgataattttccttcagcgactgtcctttgtaggagtaagatcagagaacagccaccagctactgcagggcctgggtcacgttcaaaagcgctaggtgccaactagctagcttagaacaggtgacgcggtgaagaatcaaaagtgatgaagcggaaacatcactataagcaagtcagatccaaaattgctcggtgctcactcatgcagtattgctgtcaatacgatgtttctttgtttcttcctcctcctttctctcctttcccttgctatgaacacaagcaatacgttttatcttgagttcacctgcgttccaatttgcacccccacacttgtctttcttgcctatgctaacgtgttggaatcgtaatgtcatatcttgcggaattataatacttctgtagaacaagtgttgatgaggcatggcctttaactgagtgcatatacatggttagcaaacaggtctgattatttcatgtttcgatcttaattgttcaacacagatgtactacctctgtcccaaaataagtacagccatagatatccgtgtttaacgttttaaccgtccatcttatttgaaatttttatgattttttttttaaaaatagtcacacgtaaagtaatactcatgttttatcatggaataacaataaaaatactaatcataattttttttaaataagacgaacggtcaaacgttagatatgaaccgtgctaaaactgtatttattttgggactggtggagtactaaatcaccgtgccaatcacgaaactacctttgtttgtctgcaaaaggacatgatatgggcttacacgagtttacatgctgtaattattttcctgtcgaactggcgaattgcaatttaataacgagcatttaacaggtctggaaccactgcacatctcatcaagagagagcagagtgtatatatatatacatggaacgcaaaccgtcagtgccagctcttgctctcctcgtcctcttctccttcgctaggggcctagggctgatcttgacgccgacttgctgagcggccgactccggcgaggcaaccctgccaaggtcaccgacactcgtccgagctttcatttcatttgccggtaggtgacaaccatcactctgttcgggccagagagcctcgcgttcgacggcggccgcagtgggcccgtacacccagcgtctccgacgagtcgtattatcctcaagtggggcggcgtcgtcgccggctggaccacctccgcttacagcggcaactaccggtgtacgtgcttccgctccaatacgtgcgtacgaacagacaggtcannnnnnnnnnnnnnnnnnnnnnntgaactccgtgctggtcctccaagaacccagtatgcaacttgtaacggagagcatgtgcaggaggcctctggcccttcggtcccatttgaaatccggcgacctctacatcgccgattcgtatgccgttcatgctcgtcaatggcgtcgtcgacggtcgacatcgaccaggtcactaccgcgatgtctacttcacaaacagcagcagcacacggagtatctaatttgatttgattcgtagggttgtatgtcagttagtcgtcgaaagtaacgcgtacgtgcattgaacacgagcgatcacgacggggcggctactgaagtttcgaatgggacttggaggctgtacagagcaacggagacacggagtatgtctcttgttaattttatcactgtaaaatgtgtggcatgactaagggtgagtttgaggaggaggagattgagaagatacgcaaaacgaggtgagccattagcgcatgattaattgagtattaactattttaaatttgaaaaatagattaatatgaatttttaaagcaacattcctatagaaaatttttgcaaaaaatacatcgtttagtagtttaggaagcgtacgcgcggaaatcgaaacaaactcactcactttctttagctgccgaacgcagcctaaatgtttacataagaaaacctctcacgcttgacctgaggaatgaaaatgatcatatcattcctcgcaccattttactgtgcagttaattcaagagtggaaaaccatggaagagttaggccaatgttggctactccagtttgaaattagttgacgttttagctcttgaagcattgtgtgatatttcttgacgttttagcttttttgttgcatcttggacctgcttgcccatgcatgcatgcagccggccattactactcccattatttccaacgtcatgcatgctttgccttctcgtttcctgttcaaccattgctctcccacgcgctgagtaatttccttcttctatgcctgcttgttggctctttgccttctactcgcctccttgtactacattcgccattttcgccatggagcaggtcatggcttcatgttcaagttcatgttaaacagatggagtatgtagggagttggagcgtcaaactagctagtattgcacagcataaatagatggagatggcaaaggggattctgctgcaaaccagcgccaaaatttgagttattggcggcaaacgcacttggcaaaatttttgttagcagcgcgcgagtgaaaaatctttcccggcgactgcgcgcatgaacgcctgaaaaaaagtgcatgcatgccaacagtcacgcgtccacagtgccatgcaaaaaaatgtggccaccaagaatcgaactcaggactggtagcttcacttttgcatgagatggccactcaaaccaagagcaggttatgatttggtatgcctcaaaaccatatttattaggggtaaaacaggaagtaggcatactaattaatcactcattggtatgtgtaatcctgtctaaaacgtcaacaagtatgggctaaataagctttagtcactcctatccttacaagtgaggccttctttgtttgccaaggcccatcctaacgggacaggaaatttgggctaaaattgacccatttgtaaagatgggccaggatttctgccttcagaaaaaggaataaggttaccggaggtccctcaacttaacaacgagattttttgagatcccttaactacaaaatcataaatgtgtacccctaaactttctcaaaccgttcaccggaggtccctcggcagtatttttgcccggttttgctgacgtggcatcctagtcagcaaaaaaaaattaaaaaattgcgtggggcccacatgtcagctgcacatcttttttttttctcttttgttcttctcctcttctctcttctctcttcagcgagtgcggcagtcacaggcggagcggcgtgatggggttctcctccgtggaggtgacgagcacggccgcggctgtgacggcaggttcccagacccggagccagcgcgttcagccggagcagcggctgctacaccgacgccgcattctccggcgcgcgctcctcgccaccgcccagatgctgctgctgcgcctgcgtcgttgttgggctcaccgtcagcttctccttgatcgctcccgtcaataaaaatgtggacatcattattgattgctaggagcactacgtgcttgcagacggcgaacgacacgacggcgccggcgaagcccgccggggccgggccgcagctgaagctgctggtggacaagcgctcgcgtcgcgtgctttacgcgaaggcgcgcaaggacgcggtggacttcctcatcggcctcctccgcgttcgtctcgttcgtcgaggccgacgccgacatctcgctggaggagttcggtgactcgctgtgcccgccgatcccttgcaccggcgaactcttgaccctgccggatagcaacttcgccgtcgtcaccgaccggccactactctacgtgcaggtacgtacgtcgtcataaaacttgaataaactttgcaaattttgcaccatttgtattgtacgtgatttacgtgttcatgatgccatgcatgtaggtgacgaggctgaggtgtggcggcttcgtgttcagcacccagatctgccacaacctcgtcgacgcggcggggatcacgcaattcttgcaggccgtcggtgagctcgtggaaggcgcggagcgtccggccggtgtgagtgagggagcccctcgacacgcgccacccaccgtgtccggcgtacgaccaccccgagtacgagccggtgtccgatgaggccagcgacaagctccgtccaggcgatgagctcgttcaccgcaggttcctctccggccccgacgacgtcgccgcgttgcgcgaccagctccccacgcgcctcagccccggtgctcgcgtttccttctcctcgagtccccgggcccagaccgccgcctacagccgccgacgccgcccttccgcttgctccggccgcgggccgccgcccgctgccgctcgcctgccgcttgccaccgctgcagtcgcgctctcccactgaccgccgcccctccacctgctccagccgcgctcgcccgctacttgccgcgtcggcgtcggcaaccgctggctccgggtctgggaaccttctgtcgccactgcggccgtgctcgtcgcctccacggaggagaaccccgtcacgccgctccgtctgtggctgccacgcttgctgaagagagaatcagagaagagagtacagaaggagaagaaaagaaaagggaaaaaaagtgcagctgacatgtgggccccacgtaattttttattttttttctgactaggatgccacgtcagcaaaaccaagcaaaaatactgccaagagaccttcggtgaatggtttgagagagtttagggggtacacatttctggttttctagttaagggaccttagaaaatctcgctgttcagttgagggacctccggtgaccctattcctcagaaaaatgcttaattttggggaaacatgttttgatcaaggtttagcatcttaaatagcctacctaaattaggctctccaaacatctccacctcttcgatctctgctattataaaaactagcatggtggcccgcgcagattgcgcggctagcataattatattttctctcatataatagcatatatgttttctcattatattattaaaatatattacaatgacaacataattttaaattttgcaataactttacgaaactactaatgtgtaatattcatattgtattttatatacgtgttagttattaattatttttaatatcaaattttagttatttataaattatatatattcctatatggactctagactcgtcttttaatatttctttttttaattctgaacttttattatttctaattgtatttctatgtggactctaaactcatctttcaatattctttaatttttaatttcaaatttcagttacttctaaattgtattcctatattgactttaaactcttctttcttcttcctatgtttttcttaatttcgaattttagttatttgtaaattgtatttttatacggactctaaactctacttttaattttatcacgtttattctgaattttagttagtttcaaattcctatatggactctataatctacttctaatattcattattttttaatttcaaatttctatttttttcgtaattgtatttctatatggactctacttctaatatttcttatttttaattctgaatttcaactatttctaaattgtatttctatatggagtctagtctcatcttctaatgtttcttatattttaattccgaatttcagctattgctaaattgtatttctatatgtactctgcttttttctttttctccaattaatgtgagaatttcttgatcatgagagcgaacgcggaggctcctttttattccaaattttagttagtttttaaattcctatatggactctatactctacttctaatattccttatttttttaattccgaatttctatttttttcttaattgtatttctatatggactctatactctacttctaatattccctgtttttaattccgaatttctattatttcctaattgtatttctacatgtactctatactctacttctaatattccttatttttaattccgaatttcagttatttcctaattgtatttctatatggactctagtctcctcttctaatattccttattttttaattgcgaattccagctatttcataattgtatttctatatggactctagtctcctcttctaatattccttattttttaattccgaatttcagatatttcctaattgtatttctatatggactctatactctacttctaatattccttatttttaattacaactttaagttatttcctaattgtatttctatatggactctagtctcctcttctaaattctttattttttaattccgaattttaactatttctaaattgtatttctatatggactctagtctcctcttctaatattcattattttttaattctgaatttcagctatttctaaatgtatttctatatggactctgctttttctttttctccgattaatgtgagaatttctaggccatgagagcgaacgtggaggctcctttttctattcctttaataatataataatagattgaagatgtttccgctaatactttggtatgttgttcgtatttgagtctgtttttaagtccgtttactattggaaatatataaagagtcgtatacgaaattattttagaaacttgcatattaacttgggacgagagatggactcctaattgcttcaaaatccatgccagaccataagaaaacaacatacagggtatggccatcatccccataaaagttccaaattagatattgtcgagggaagatcctcgatagcggggaatcatgagaccccctatcgtgagttcggccgggggcagaggctcgcttcttggaaatcactcgctcgtccctaagattaccggcaagctcgcacgccgtcggattatacaggttcgggccgttatggagcgtaacaccctactcctgtgtttgggattatggatgagttttacagaggtttcttcactccagagagcgcactcgctttctttcttctggagttcaggttttctgggagtcgtccccttatctcagtgggcagggtcctccttttatagctcaaggggataccacatgcgccgcctctacctaccctccataggagggggatcccactccacttttttctgggcttcaaactgtgccttctcccggaagctaagcaacaaccggttctcgagtggaacccggtgccgccccccgcctgacacgggggacagccctgtcattccctcataaatgagtgatgacttgcgacagcccttcctcgagtgacgctcggatgtgacgggtcataccaacccccacttcgccgggtacaggggcgacgtgaggacatgattgccctatccatcggatgtgacggtaacaggccggtcacacactggtcacatccgatggacaggagtcagctaggcgcgctgcacgtctgccctaaccgcattaaatgcggtgagggacagttggggcgtcgcacatttatggctgttcagcctgtgctcccctctcgctctctccctccgccgcgtggcagccgggtgagggtctcagggcgaagccgcgggagagcccgagggggtgacgccatgccccgaggcgccccccccccccgccgctttcatgactcgcgtgacgcgtgagtggggccaacttgcagagtcacgtggccggagggaaggtaattcccctctacttcacatacccccgggcccatatctccgacagatatcaatactatcaaaaataaaattcccatatacttgttagacaaaaaatctaacaataatatgattaaaatagcattcacctgttgcaacgtacaggtattttttctagttaatataaaaagtcacactgattgcttactccgacaacctctctatttaaccttctttaaaataacaacgggacccgtatgtcagcccctgctcctcctcttatttctctcttccttcctctctgttgcccaacaaacgaacatcatgaggagccgatgcggaggcagcacggggaggggccgaaggcgggacggcggtggaaataggcgatgggagtcctcttgcacagactgcagcacgacaagccactcaatgtcgtggatgacgtcattggggcgcactatcgtagtcgatgaaggcgggtggcactggagagtgcaagatagacggacagcaccacaggtgaagcgggaggcactggggaggggccgatggggaaagtggatgggtggcaggatccgcttagttagcaatgatggctcgggaggtggtgttagcaacgacggtggtgctaggtagaggcgacaaccgcaggagcagcgggacaaggtgttatagtgtcatggtgacgaaaaacaagcaacgatgatcttgtctttggatagtggcgacacttacctcggacagacaacaatgcatcgacggatggtggccttccagacgacgcagaaatggtgatggtgcacaaccatgggcaccgacgcttgtggggagtgcatggatgggagagagatgggggaaaccggcgcaagcccattttcggcaagccaacttgactgtcaagtttggcgagcagactagtttggttagctggatggcttggcaagtcagttggataggttgttggatcacaattttttcgctagaattgtgaaattttagcttgaagagttatttggagtggctctttgagtatctctaatagtcctaattttgactcttaataatgtttgattggagccataaaaattattaagccacatgcatgttgtaaagtccaatggaacccatcaaagatctagctagctcacgtgaggcaaatacacaggcaacaccgtcccatgttcttgtcaacgaaatcaagtcttatttactccaaacgatgaacatgacaaaacagaaagaccaaaaaggggaagcaagaactacaagtacaactttgatctcaacgtgtcaatcagaacccaagaagcttcttgcacgccttgaagatccgccctttcttcttcgtgatcttctccttctttcccgtcgcatgatcctgctcttccctccgtttttgctccccatcctggaacgccgcctgctcctgatgctcgccagccgcgtcgtcgccgtccatgtcgtcgtggatcctccagtacccatccgcgaagctggacggctgcctcctcatggagaacgccctccgcaccacggcctgcaggccaccgccgttgccaccggccgtcgacctgctcctctccacgggcctgaacctctgggaggctgacgagaagttcctcaccagcgtcgccgccccgacggccacgccttcccatttggtctcggcctccacggcgccgctggccaccggaggcgacgaggtgaggttgcagtatccattcaccatctctccaccctcctgtgtacaccaactcaccaagtgatgtgttgctgtgcgctagctagctagctagctgctgatatgggaggatttgggcgtggttcgtggagttgttcgccgcgggggccgggggtgtcacgtttggattttgcaagcgtgctgcgtgtgagaagtggagttgatgaggctggatgcgatcgagatggtgcgtgcgcgcgcggtggcgtcgggagcggcagtagtggaagacctgacgcaggggagcgtggtgaggcgagggagtaggaatcaagccgatcgatcaccgactgtttctgtctgcgagtggcggaaaacggtggccgtgacgagatcacgcgatcaaaccacggaacgcgaaatcatgagccgttgagtggtgggtgggtgggacagtgggacagtggaattgaagcgtccagttttgactgccacgccgcacggcaagcacggtttggctccaggaaaatgtgggttgtggaaatggatttgtagtcacgagagaacgggacgaaattccgtgcaggaaattatcggcccaacacaaatcgcatggaatgtttgcatcggtccatttgtccatgcatatatgttggggaagcagcgaagccttctaggcccgtgtacctgtggttgttccaagtacatgtcaagttatgtagcactactaactggtatagtattcgtacttctggctaatggcatgtatgtttaaatcttgcccatattttatttcggagttactaaaaatatggcgccacatgctatagtcgatttttttagccacttacacagtagttacacctcatttacaccccacttacatatgtaattagtatataattttcgaatttacatatgtaattttagtacttacatatgtaattttgagacttacattgtaaatacactaaaattacatatataatttagggacttacaatgtaaatacatgccgactattttttgatgaaaaatatagcgccataaatatagctatacccttttattttggattttccaggactaatccggcaatgctacgtatcaggccacagatgcgctgagtaattcatgtttcagtccatgtattcagatgttttattagttgaatcgaaatattgcaatgaatttttggtggtgtttcgtttattttcttcaatgtatttggatctgttgatgtttcaatacattttgaaaccgatgtttcatatgttgtagtaaaatgtttcaagagtgtttcggttctgtttcaccatttcaatagttgaaaacattcttttattaggtactgaaacattttggtaaaacaacaccctatatgttagaaaaatatcatactccgatttgtagtcgcataaggattaatcccgtgctttgtttagaatgtgggagttacccctattgttttggaaatttaattattattttcgtaaattcactgttcttttaaacagaagtgagctttgctgcttaactttattcaattatactagccataccattaaaaaaattttggagcacacattgtgaatctcaagcctcttggaccatgcatccagctttgattgactacaactcagtgttgacatgggaggtgacaccgggcgcaaatttctcatctgaattccagccatgtccgacgggcagggcacaccgaaccgttcttcctcctctttgccgctgccaaccggtagacagttatggcttcatcgctctcaacctcaagtcctcaaccccaagcggacgagtcacatggcgtgcttgtgatgcagcgtctttccttttcatggcggcagctttcgcatgcagagagcggcaaactcgaaggaggcagttgggccgtcccctcaaagatccacttgattgtgtactgcacgaattcaccggtgatgagaccattgcctgctatggcgatcgaaaaactacacgatctcgacacacctgcgagtgccatgcattgcaagcatacgacgcgtacgagcaagaaccacgggcatgcaaggcgagctactaccagcgacaaacgaggacaagacaagacgcccatatctatatccaacaactcttgtcactctcccctgcgtttattatttacagcgtctccgctatacagcaattcaatcagcaacaggattcgatccatcgatcgatcggtcggttggttggtttgacagcgtgtgtctctaacatgttgttccactgcaacattgtacgcgagatctcgatcatggcggcatgtaggagtggtggacgtcgtggtcgtgcggcggccagtgcaccccttccctcgggcacggcgccggcggaagcggcgccggctgcgccaggtacgtcgggtaccgttgccccggcatcaacaccgacaggtccgccgcctgcagcaccgtctccacctgcaacaatttcagagcagcaaacacctcaacattggatcatttcgctctgtgtaagtggttggcgacgtactacgtaccatgggagggctccggagcttgccggcgggagagacaccgtggcggcggcgcgcggggcggagcgccgcgctggcgaggggcgggaagacgtggggcttgatgaggtgctcgaagatggccatgaggaggaacatggagacgaggatggcggtggccgcgaacccgaacgagatggcgtccatcgacgtgccgaaggtcctgagcgacgtcgacgcctcgccgcccgcgtccgccgttgcggcgacgaccggcggctgcggaggcgccggcgacgggtcccctggccacggcctcgaccttccgctcattgcttgcctgcctcggccgcttcttggcctcttgcaggttgcaaccagcacgtctcctccctgcacgccatgtatatatgcatgtgttcgtcgtcaagaaactgtgtcgaattcaagggctacaattcaacgttgacttcttttgaactgtaatctatctacttcatgcatgacagatggatgactcatgaggaatcaagaatcacatgagaacaggttggtgagctgtgtactacacttgcacaccggtacacacacagcaactttatttcagcatcttcactagtaggaaagctgaaaagcaaatgcaaaagggaggagaaacaacaggagaggaggaacagaagaaaaacagttccaaaacagctcatttagaggcatcgaacatgcacattgcaggcaaaagaggatacacaacacaccttcagagttcagattagcaccggcaccctgcaaattgtcctccctgaattgaatgcagaaactagcaaccgtcttgatgtgcctctcctgatggaatcatggcttcatgggacctattgccgaatgccaagaacgggagaacacacaggaggatatctcagcttggctgcctctacttaaagacagtccccgaatcaaaagtgagatctcagctgatttggtggtggcaatgtggagagaggagaagaaaactacaggaaaaagcttggagtaacaaaaaggagtgctgcaagaaaggctgccacacttggcactcctatagaaataaactaggagatggatgatgataggggagtcttcaacagttgatgggaatggaaggctgcaagattggtacaaaaaataatcttggaatcatgtttgggcacatcaaaagagtggctccccactcccatgcaagcacactcacacagtaatagcagcccacatgatcctccaaagagcgtttagtgcagtgctgtgaagtgtagggaatgattcaaagaggctatgttagccaaggccaagccaaagggaaaagcaaaagaaatgggcaaatgcaaggagggaaaaagcagcgctcgtggaaaggagggaagttttgtgtggcctttgtgcagggaccaatcaacctctgatgggcatcatgctgcaatgtcagttaactggctgctcacaagaagtttactcttttctagtacaacaccctcacatgcgatgtgatgtagtatgtgtgcttgctctcgattatcaggattagcaatgcaagcttaattacgctgttaagcatgtgtataaaagaaaaagactgaaactgcaactctcttttgcttgcaagggagtattcttctgtttgttgtgacggggaagaagaaagatgcttatgtcatggctaagcgagtgactgtagaggatgcgagacccctactgccggacggctgtggatcatctgtgcccacacgatgtaagatatttgtacgaacacgacatgccgttgcctgtccatatatgctcgtctgtctaaaatatatgtgctgatcgacagtgtggtgataaagagatatagcgtgagacaagccattttgttcccttttgtacgcttcattgtgtacagataactgattgagaaatggtttgtttgtttcagaaaaaaaaagggtgagcttctcttcacacactaaagaagaaaaaaaaatcatgatttacagtcaattgtaataataccctagtactatggcacaaagtcatcctgaaagtgtttgtcacgtcgattcagtataaattcagtagcatcggcttgtcacaagtggcagaaaagattgagaatccaatccagcaacatgctaataacaatgtctgtggaggaaatgaggaatgattaacctacaaaaaattgtatagcagctgtagaaagtactactacactactactagccattaagttacagttcccatggtgaacactaggacagtaggagtaagaaatgtaagatactgatccccagttcacattccaatggattgattatgcgtgcagtaaaatccttcttaggtgctactaagatccacttaggaaactacagagttaactaatcttccaaaagttgcgtgtcagcgtcagtatactgtctagttttagctcttttcttctttctgttactgatagtctggaacagcaaaactgcatgtgcattcttgtttctgaatttctgaccagatgatgttcagacttcagagacagaggacttaatttttttacttcgttaatactaacatagttactactagcagtaaaaatcagttaactgttaactgatgattacactaatgaatatattaactcctttctcaggtagtcctcaacgcgtcatgtatggaatatgaattatctttgtccctgactccatccccaaatcatcttgtctccttgccttgagcaagcatcaatctaagctaaagagaaggctattaaaatcactaatgcttgcttccaaagtaagtgcttggtacctgtgagttgggagccaactaataaagtgtcaggtccattacttaattctgagcatcatcgcagtggctggcaaggaggagagcatcaacaagggccatggatagttattagctgcactttttttttcatctccagaacatataattctgtgcatttgacaaactataattcacttccattcttggcatgcatagaacccacatgagtgttagagaggcaaagacatatttaggaatgagagaaagggagccaaattatgaaaaggaaatcttaatttgaacttcttgctcctgctttaagttgcagcattgccccaacagaagctatcatccaaaggaaaacaaagcgaaaaggcatgaagtagtagtagaaagcacaacacaagccgagaaaactaatcacctagctatgggtattattctggagtagaaaaggcttaatgataatgcgaatgagatgcatgaaagattagtgaggtgataggaaaagcttagaccggatgaaaccagctcaaatagagaatggggaataccttgaaaggttaacaagactgcgtcaaagataatcgtaatgctggacgatccgtactgctgtatactgttagataattgcatcgctatttggcgagatctatcattgtaaagcgtacatcgaaggaggagcagatgatgatagctaggcaacctaaaaaggggaaatgaggaaaaggccttttcccgagctgaagaccacatgcttgatgcttgtggaggggctcacatgtcctcctcttcctcggctcacagtcacagaggaagaagaacaaaggagatgaaataggctgtgagctggtgtgatccggctcagataagaacatcggcaccaaggccatgttggaaatataaaacgagatcggaatctcagtaaaggaaaagaaaatttgcagagaaatgtaaaggagcaacctcatacttgtcgattgctagagctgaaatcttgaaccaatgttttgagtatttaagcatcaataatgtgagttaaagtatacgaactgatcgcatggagataatttcgtttgattttcttgcaattcttttcgcagtatatcttctcgtggtagagtatgaaaagttacaaaagaaaaggcttacattttgtgatggagggaaacagaaagtacaaaggtggcagtgacactgtccatggagagtagagcacttcttcctgggagtggattctaatccctcgaaagaatatcctctcgtatatctttttctttcaaattcgatgtaaatagttgtgaaaaattctaaaaaaaattagcaatgtagagtataatgatacctactaatccaccaaaattcaagttcaaattcgatctacacatcgagaaacaaaaaagacaaatttagatataaatagtacgctactatttatacactgaatttgtttttttatatctcgacttgtgagttgagtttggacttaagattttgtggagttgtatatatgagttgtatgaatgttgtcaatttttttcaaaatttttcataaccgtttagatgatttttaaggaaacgaggaaacatcttgagggattagaatagtttccttctttttttagaaaaagatctctttctttttccagagaagtgcagttcttaactacggatgctgaaatagtaggatacgcgagaacatcagtgtgaactgggccgtcagtttgttatacggaatatctgggccgtgcgtaatcaagtataggagatctcagctcgttttgaaaaaagtacaccaaaggtccctcaacttgtcatcgaggtacagaattatccctcagccgtaaaaccagacgtaatatctctcaacttacaaaaccgttcactttttgaccccggttttatccaacgtggtggttgagttagcgtggaatacacgtagaccccatatgctaggtgtccacgtcagcccccctctctctcactcatcttttctcctctctgcaaggcgacgcacgggtggggaggtcaccggggcgaggcgggagaggagatccggcagtcggcgatgcggcggtggcggctgcgacactggagaagggaggcagctcatggcggcggccgacgacgatgcgggagaagggagagcgtcaccgcgcgtgcgacctcggggtcggaccatcaaagaggcccgggaggtggcggcggcggcgacacggtagaaggggaggacgttgccacacgggtgagctcgaggacgaagatcccagtcgcagcgaggtgagcgacctcaaccgcatcgcgcccgccgtcgacgacccacgcaagcacgcactcgtcttagcagtcctcgagcttcgccacccagctgccgcccacgactcccgcgcacggttgcttcctgctcgcgccgttcccactttgatgttgcctccccggaggagccaagcctcagatggggatggcgatggcgaggtggctcgagggcaccacgacgatgagcaacggggacggggagagcgaggacgctaccgtcgtcgtgtcgcccgtcgccatgggaggaggccctctcctctcttcccccacctcatccccgctgccgccggaggagccaggcctcgggatgaggatgctggcgctgccacggcgacgagcagcggggacggggagtgagacgggagagcgaggacgctatcgttgccgcgtcacccgtcgccatgggaggaggtcctcttgctcctgtgtcgtcatcgtcgccgctgagtcgcccgttgtcggtcgccggccgttggtagccgcctcggctcgccaagcctccttcctacccaccggctagcctgccccagatgaggataaaattgggagaggaggaaaggagagaagaggggaaagggaaagaaggggatgacgtggtcacattgacatgtggggcccatgtgggtcccacgttgactcggatgccacatcggataaaaccggggtcaaaactgcctgaggacccaaagtgatccggtttcgtaagttgagaaacatatatctggttttgcggttgggggatgattttgtaattcgatgccaagatgagggacctctggtgtacattttgcgcttgttttctaaggcagcccaaagcacgccagcccatcatgactccatcgtccaagaggaggccgcaaagttcacggcccatatactgaccgggcgaagcggagggggcctctgttacgactttaggccggtctagcacgcgcacggtgcaccgtatgccgcggctccgctccgttcgccgtgcgcgtgcgcggtgcctctgccggtcaaatctgccacggcgccaacccacgcgcgcggccgaggcgaagcggacggaagaacgcaggcgcaggcgtgcgtttccgcaggatttgcttccgtcgcgtgatccatcttggccgccgtggcacgcgtggtggcgatcgacatggagaggaaaaaacgtacagccccgcgccgcgcgacagcgtgatccaatcggtggcctgcgccctgcgccaccggtcaaccaaaggccaggcgcgcaccaccgattcacgtaccgatcccgactcggcggtactgttttttcctgcgcctttatgtcagtctcagcgcctttgttttacgccaatgcgaaacacgagcgcctgacgatgttactgttgaccactaggcactaaccatcatcgtcgtcgtcctcgtctatgctattcctgtgaaagatcaatgccatagaaatcaacatctgtatgtctcataaaacatgctcctagggttaaaactgcgtgccacgagtgacggacgaagaaaccaaacgtgcgagtacggacaagagaagttgcattaatctgactttgggaacacgggaggatcatgaaagaaacgtaagaggccagcctgcgtgcgacgggagaagtccacctctgtctactggctaacaggacagtaatctggttggtgtaccgtactaacagctagcctgattttacgttttgtcatggcgaaggccggatcgatgcagccttcaccgggcgaaatttcgcggggagatggacagctcgttcggacattgtcagcaaaaagtccagtggatcgccgagcggattgctcgatcgatcgcgcgatgctgcatatccgtggtggactggtggtctgatggagtagccgctgggacgccggcgttttccgtgatttgctttcttcgcctctctcacctatcacgcaccgaggcccgcatgcactacgctccggcggcatgggcggccgatgagtcggcgacgtgcactgcagaggccggcccattataccttttccgaagcagagacgttgctggctaacgcacctttgttcttcggtaggtcgtcggtttccacatccgcgtgtctcctgataatgtggtagtgactgttgaattagacacgttttgctatacatacatgctccctggctaaggcatgggctataaccctacaactgttgtgtacactgtcctaagtgcgctcgaaggtttggtcaggccatcgaactgatggcacactagtactgtaggtggtgcatgttggagaagaacaaatcatttggtgccaataaatcattcacatggaattgtttttggaaagaatttggcatggaattttgggccgtccatcgatgaccacgagcaataatttatgcattgggcggcttgagatggagatcagacgttaacttgtttcaatcacgagttcgtgatagcttgccgccccaaaacacccggttttgtctggaagcacgcttgcagataagcgcatatatggtctaaccgcagctcgttttgaccccctaatttatagtggtaaacagctacaggttgcatcatgttacggccatatgtgatagtagtatatcaaaggaaagttactttactactcacgttttgttgttttggtgcaggttgtccgttggattttgcaggttacgtaggcttgtaaccaagcttcgtagtaaagatattatgcgtccataacccatggcgtcatgcctgaatattacgcattactcaaaaagtgttatccgttactactaaagtgctcactgaatcatctcgagtatgacctgtgaagaagcacctcaatggaacattgaacatatcccatacgctgttgaggcgctgactacaactaatcatcctgccagtaacatccctgggcgtccatctcacagatagaaatgcagaatcttgagtgttgagacctctactacacctagatacctagccattcaggcaattgttaaccacgagttctcaattatcaaggaaacagcaacattgttccagcccttcagcaactactcatgcagttgcacgatcgtagtggctgcattgactagtgatagtccaaacctactggcaccaaaagacactgtctcctcaagttgcaggccaaaagaggctaaacgctagtatcttatcatgtccttgacaagaacatgagaccgaattccctggtcattcaagtggatcataagccagaattgtcactgcgtgagtgtaataatgcaggacaggtccccaaatgtatgaataaacgcattctggccaatcagaaagatcaagaatgagtgtcccttgacaatgtagcttcaggttatttgtacttggagatggacagattccactgttcatcaacagcttgaataattattaaacaaataattccattactgtctgcctcacacggtcacaccagggacaggtcaaagctcacatgcaaaaagcagcatctgctcgagcagggacatccagtgcagcaataattaaggtttgatcttaacaacagatcagcactaaatcgttgcactattccgggctaaaggtgatgtaatggcagttaacttcagtgatcctatgcctatatttttgaactgtacaatgcagagacaaagccaactggtacttttcaatcagacagcgcacttccctgcttgtgccgtagtctgctcctgtgactggaattatgctgcatatcagttcacggggctaatgttgtgccaagaaaaagaagaacatctcaatctaatcagtcatgtgtgtacaaaactgtattatttcttcttgtacaaaaatactagtatgccgacgtgttcgagccactccgtagttgataggaatactttacgtgccacgcgtacatcatgaggaagaacacatatgacaaatgaatcggcgagagagttgctcctgtggctgggagccaggggcggagaccggccaggcagctttcggttttgtgctcttgctatctgaacttgtagcgttgtccatgtagggcacgggggtgaatcagcagatctttgaccccaatttctgtttgaatatttgtcatgccgctcttgtccccttgcatgcatgcctgtcgagacgttatgattgctgcggtgtttttttttctgaacctgagttacttgcgggcagcggtgaacgaaacagagacggaattctacccatcacaggttcagaaaacaggagccttcttctcctttcgttttacaggtgaggattccaaactctatgcatggtacacactgcacaagaggctactactccagcccatttttctgaaaaaagaaaagaaaaggaggctactactcccagcagctggtagtgcatgtacgttagcacattccacggcgaggggatgcgcgagagttgcgaaatatctcaccaccggatcggcagatgtacgcgggcaaagtatctcgaattctcgatatctaaagaaaagtataggagaaaaaacgggagaggattgcagcaacaacggtaggccggtagcggcagcgggcggtaggccggtagcggcagcgggcggtatctcctctcggtgtgttctagtagaatcaggacacgcgcgcgcgtgtgatggtgcgcgcacgcgggcgcgggcgcgggccggtccgcgagagagcaagcgggccgcgcactcccgtcgtcccattgcgtattcgcggcgcggtcgctttcgccgcggcgggcaagtggcgtggcgcgccgccctgcgcgatccacaggatgcgaagattccgccgagggggctcgcacgcccgcgtacgtacgttcgcgcgtgcggatcccgagacgcgacgaattgggtcgagattgtgcccggcgcatcggacggcgcgggaggtgggggctcctcgaggcgggcgcgcgcgtcaaacagaacaagaggcgccggcatctcgtgcccgcgtggcctcttcctccctccgcctcccgccgcaccactacttgccccccatatccatccataataaaagtacgcacctcgcgtccgcggccgcgcggctatatatcagtaccgcgcctacgcactcctctcctctctctcctgtgtgctagcggaggcggagcactacacggttaattctgcggttgctgctgctacctgcgaccttctagcaggtgcgtttcctcctcgctttgcctatatatatatccacttacatttctcggcttgatccatggattagtctgtcgatctcttccatgccatcgatctcgctggttaagattgcgctctagtgcttagcttgttgcagagccttgactttctttctctgctaagaactgaataacttgactctgagtaagagcttgcatatatagctcttagtatattcttcagattttgtcattgatgttatgcgacttgtgcatttctttgactgatatcatgtagtaatcactaaacttcatgcctgactctaggttgtgagttgtgagacagcgagagttagtcggtgtagtttcatcaggaagggccgcttagacagtgagaactgagaactgagaaatacagcagtaggaaataaatacccgttctactctggtgtcagtcctagatataatttaccactgtgtttcatgcatgatccgattcttagttttctcgacaagaggtggtaaccacatgtaaatattgttgtttagcatagctcttgtgatcaaagaggatggaaaattcctggtagggtcagtaagggaaggaatcagcattgcgttcccattgttcatatatctgacaaatgataatgatgtcttggtgtccattgctactggacaaaatagtacaggttagctgagtcagaagggttcatgcagaaagtgtagaacttattgcagataaaaccctttgcaaatcatgtacagcagtagagcttcatactgtcaccggcttactgcgcagtccccaacgtttgatcatgtggtccataaggatcaatcgttcaaactgcatcagaattcagaacctaagcatgaagaaatactacctcgatctaccactagacagccatatatgacattgacaacggcaataaggaccgttgctttagaccaaaatagaatcagcagtgcatccacttcctggatgggttaaatgctgatacgaagtatgaacagacataacctaatcttaattaactgacaggctgaaaaaggtatcgggtatattcaatgaatctggtaaaatatctggctgatttattgcgttagtatcaagtgattagtactatgagatttggtattgctactcaagattctttgtttcttttttcatgaaagaggtcttgagaaaattcgtagtgtaagcatttgttttgctgaagagaacaaccaaaaccataagcccaggcaaaagtgtgttcatttaactcagtaaactagtctttcctgatccgaagtttggagcaaactttaatttttctaatacacttttgttttaaagagagaacaaaaaagctgatatttgctaaaggaacaagtatctaattactcttttattacttggtccccatgattattcagtaactggctttcagtataatgatacaacttttggtcttttcacacttcactttccttcaatcctattcaactatcactgcactgggagctaactacacatagacatagctttcattctttttctgaagtttaaataatgtttacttttctgaaaatttcaacgtattgatatcatcatcaaatccagtatgacatgccccaaactaacgtaagattcatacttttcaggtacacagtgctaacaagtaacaacacaatgttgcctcagcaacttcagatatatttgtgcttcatccttctgtctctgaagttcggaatatctgcatctctacctcttgaaacagatgctctcttggacataaagagtcatctggaggatccacaaaattacctaggcaattgggatgagtctcattcaccatgccaattttatggcgttacatgtgaccaaacttctggtggtgtcattggaatatcactctccaacgcctcactatcaggaactatatcgtcgtcgttttctcttctttcccaactacgtacgctggagcttggtgcaaactccatctcaggcactattcctgctgcactagctaactgcacaaatctgcaggttcttaacctgtcaacaaacagtttgacagggcaattacctgatctttcaacatttatcaatctacaagttcttgacctgtcaacaaacaatttttctggaccattcccagcatgggttggcaaattatcaggcctaactgaactaggtctaggagagaacaacttcaatgaaggtgatgttcctgaaagtattggaaagctgaagaacctgacatggctattcttggggcaatgcaaccttagaggagaattaccagtttcaatatttgatctggtctcacttgggaccctagacttctcacgcaatcagattattggtgtgtttccaatagcaatatccaacctgcgtaacctatggaagatcgagctctatcaaaacaatctgactggtgaaattcctcctgaacttgcacatttgacattgttatctgaatttgatgtgtcccagaatcagctaagtggtattctgcccaaagagatagcaaacctgaagaagctgaagatctttcatatttaccgaaacaacttctctggtgtgcttcctgaaggattaggggacttggagtttcttgagtcattttcaacctatgaaaatcaattctcaggaaagttccctgcaaaccttggccgattctcaccactcaatgcaattgacatatctgagaattatttttctggtgaatttccaaggttcctgtgccaaaacaacaaattgcagttcttgttggctttggacaacaacttctcaggtgaattccccagctcctactcttcttgcaaaacacttcagaggtttagaataagtcaaaatcagttcactgggagaattcacagtggcatatggggattgcctaatgctgtgatcatcgatgttgccaacaataaatttgttggcggcatatcctctgatataggcatttcggcttctctgaaccaactgtatgttcataataacgtcttctctggtgaacttccaatggagttggggaagctttccctgcttcagaagcttgttgctttcaacaatagattctctggccaaatccctgcacagattggaagtttgaagcagctgtcattcctgcacctggaacaaaatgctctggaaggatcgataccacctgatattggtatgtgcaacagcctagttgatctgaaccttgcagacaattctttgactggcaccattccagacacactagcatctctattcactctgaattcactcaacctatctcacaacatgatctctggtgaaatccctgaaggattgcaatatctgaagcttagttatgttgatttctcccacaacaatttatctggaccagtccctccagctctcctgatgatagctggagatgatgcattctctgaaaacgacggcctttgtattgctggagtttcagaaggttggaggcaaaatgccaccaatttaagatactgcccgtggaacgacaaccatcagaacttctcgcagagaaggctatttgtcgtgctgataatagtgacatctctggtggttctcctatctgggttggcatgcctgagatatgaaaattacaagcttgagcagttccacagcaagggagacatcgagagcggcgacgacagtgactcaaagtgggttcttgagtccttccacccccctgagcttgatcctgaggagatttgcaacttggatgtggacaatctgattggctgtggaggcactggcaaagtttataggcttgaattgagcaaagggaggggtgttgtggccgtgaagcaactatggaagcgtgatgatgcaaaggtcatgagaactgagatcaacacacttgggaaaatacgccaccggaacatcctgaaactccatgcattcttgaccggtggggaatcaaactttctggtgtatgagtatgtggtaaatggcaatctctacgatgcaatccgccgtgagttcaaggctgggcagccggagctggactgggagaagcggtaccggattgcggttggaaccgcaaagggcatcatgtatcttcaccatgattgctccccggccataatccaccgtgacataaaatccaccaatatactgctggatgaggagtatgaagcgaagcttgcggatttcggcatcgccaaattggtggaaggttcaccactcagctgcttcgctggtacccatggctacatggctcctggtaagatatgaacaattctgctcttgtatgttaaatgtttatggtagtagttagtattgcacatgaattccttaggaaaaaaaacaaaatgcgtaatacctcttcttccagcccttacccattcctctcaaccatctcgcggatgaattcgccatgccgctgctctcttgctcggccgccgccgccgcggcgccaccttgcgagcaggtcgaccgccgtcggcggctgtgacgcgcatcggccactccacccccttcttccccgacaggcgcccccccccccttctaccaccgccgcggtgctcgagctcccacctccctcccattccctccccgcctgccgccagcaacctccccttcaaccaccgcccgccgcggccgtcgtagtcgaccgctactggccgcgccatccgccgccgccatcctccagtgcctccgatgcggacgaatttcttggcgattagccgattacatgcggtgaatgagtgggagtcccaccgggaatggtcaggctcatatgaagatggtatctttagaaataactgaaaataatttattaataaacgtttaactatatttttcatggttttaaaccgatgctgaaaaatatactactgcaacgataaacaaaaacactgaaatcaaacttaaaattaagtttcagaattcaatttttggttgggctaataaactaacaagcaacgagggtagaattgctactaggtattctggaaaaaaagagagagaaagaattgctactagtcatggacaatgttattaaaaaaaatattcatacatttttatatgaaagcaaatggcatccatcataattcttcaaaaggtgtaattctgacatgcatattatgcgtagttctgtagatttgacaatctaacatcagctcgtctcaaaatgcagagcttgcttattctctcaaggtgacagagaagagtgatgtttacagctttggcattgtgctgttagagctgcttactggacgcagcccttcagaccaacagtttgacggtgaactggacattgtctcctgggtttcatcccatttggccaaccagaatcctgcagctgttcttgatccaaaggttagcagccatgcatcagaggacatgacaaaggtcttgaacattgccatcctttgcactgttcaactgccttctgaacggccaaccatgagagaagtcgtgaaaatgctcatcgacatcgactctatctcagcaaacgggaaggcaaagaacaagaatgataagaagtaagaacagatgccccgtttctttgtaagaaactgctgccagaaagatcaaaaggcacccagtagcaacagtctgggtgctgccgtgctgccaattaggaccttaattagaatgcctgactagtgaatagtaactagtaggctggtaataaactgaggttttagcagcctctgaaaagcttgcacatatgtacaagctaccctgtacaaatttcagtcatgtactctgaagtttctgtaaaaatgatatgcgaagaattatgatgtaccagtaccacactgcaatgccagtagaatatgaccataccgttaaaaatggaaatgtgctgattttttttttagacaggaacaggaaatactaaaaggcaaaggccgttgtacaggttattccaatactactacatattccaacctctttctgctatgttccaagttccgacctgtttaatcagataggaacaacctaatgtgtcaatatagctgatccagcaaagttcagagttccaaatctttcaggaaccggccggatatccgagaaaattgatacacagagacacagaatcagagtccagaatcctacattgttgtacaactcgtagctgttttctgtttgtcactgttctacaatatactgcagcactgcttttagctgacagttttgaaaggggttgcaaccttcaggctatcaacaatgtcagtgacagagccaatgcccactgccaccgagatcatcaagcacaccatgctcaggccttgcaggagataccacctccctcccctggtgatcttctcctgcgcaatgtgcatgctgatggggaagtaaacagtcagtggccagaagctgaaggcgccgaggagccccagcaccgcgttgaagaacggtatcatcatcgccaccaccgtcgtcgcgatgactacgacggtccggaggacgagcttgtacggcgccacggtcaccgatcctcgctggatcagcggcacgtttacggtgtactcgctgttgatgaacttggcctccggccaccgggaggagatccatctctccattgtcgcaaatatgggctgtgcataaacctgcattcagaaatgcacccggtttaagaataatttcacggtgatctctactaataatattttactaccggggctcagttacgaacttatgatgtactgacctgatatgctccgatgagatggaggatgaggcacatgttggcaatgtcgacgagccagaagggccccataccggacgccgtcaggatgttgcccggagcatctgaaccgaacgcggcgtacccggcgcagccaacggagatgtagaagatggtggtggctccaatcccgtacatcgctgccttcttcatggtcttgttctccggtggtgacggtttcagtgtgtcctacaaaagcaaaacagacggaaaaaagcgcattagcgttaagaacgtactagtaccacattgctactcgcactaaaaaaatattggcacgaacaaaaagaaaatcctgttcgtgtatgttggttcagaggtagtatctgaatattgtgggtgacgaatcatcatcgatcgtgcatgcaaacctggatctcaattagcacttctgcaaaggtgtaggcgaaggcgatgttccccagtgcgagcagtacgttccagagcttcttgctggaggacgccgcggtggcgccctggatcctgccgctgaggtggccgccgtgcgacacccactccgccacggacaggccgaggccgatgaaggagtaggcgaacgacatgacggcggcgacgacggacagccaggtgatgtgctccaggcccgggaactgggacagcaccacctgcacgatgctgaacgccagcatgagcaccgtcgccgacgtgttgtcgcaccgcgcggcggcgccggcgccgttccgatggatgcaatccgacctcctgatcgcgcttcgcaacacaacggaaagaaaaagaaaaacagacgaaatttagtagcctgaccgatggcgaaaagttcagttcggagggaagttggagtgatctgttcggttactcacaccatgcttatggttgcggtgattgtgtagccgaccatggtgccccacaggttgacgtactgcgcgattccgcacatgaacacctctctaggacctgaaaatatttttggcattgcgttcagtttaaccaacaagatggagatgagagaaaaaaaatgtgagtgtacttactgaggtatgatctgacggcgtccatgtatgtgcggttcctggtgccggtgacggggtgcggcgcgcggtaggcgttggcgagcagagtggaggtgtagtaggtgacgcaggcgaagccggcgagggcgagcggcccggccacccaacccagctgcgccacgctccacgccagcgccagcacgccggagccgatcaccgccgtaacaatgtgcgccgtcgccgtccataccgtccctgcaaaaacaaacccagttaaccggaaccgccgccggcgcaagccaaccaaaacaattctcaattcttaatcccagcccaactcccatggcctgtttagttggagggagttggcgatggggaatgtgagtttatgatatatgggagtttaagtatgtagtttggttgaaagatttgggaatttgagtgggtttgggatagggaattaaaaggtcgaattcccactaatctcttacctaggggaggcatgttaattcgtgagacttgaagagaattcgatatgaaaccacaatagatgaggactaaaaatgtaactctcatgaccaatcccaccatcaactccctctttaaaactcccattcctcttctctcgccaaacaggccgccaaggtgtcccaagaaaacaaatagtcgatcacccatgcggcacgcacgcccgcacgcacgccgtaccagtcaaagaaaaaccccaaaaaccgggggaagaaatcactaaatcaggaacaagaacgaacacgcacctgtccgctcgtgctcgccgctctcgacgtcttccggtgcggcgttcttgttcatgttgtcggcgagccccgcaggtgtcccgtgagggagagtgggcgaggagggatgcggccgagtcctgaaaccgtgaacgaatctggacggtattaggccgtatatataagggaggcagctgaaagtgggctttaatcagggctcctgatagggccggcacttggaccagtagagagcgccggttcggctcttccggactccattgggcagagtccggatgcaatgcgtttgacgagcaaggacctcatcgtttgcccaaaatttgaatttgattttgattttaatgatatctaagttttactcacatatcaaataagctgtaagcaaattgttaaaatgaacttgtgattggtataaattgatgtgcaattcgttttgataaaagaaaaactgattttttttaaaaaaaaaaaactaggcagacttagctggtgttatattaagtagagtgaaaaatatttacatgttcactaacggcgaaacaaacagagaaaaatgaaaaaaagctgggcgatgctatgacaattaacgttctcgtgatatctttactggcttgtttaattcgtgcacgattttggatgacgggctcccaatacgcttcatcatgcataataaatttgtacttgatgcatgcatactccctccaccagttccatattaattgatgttttagataaagtcgaggtcaaatttttataactttaaccatcaataacttttaaaaatatttagtttaaagtaactagaacaacatgtatagatttatctttcaaagcactataagtaaacatacatttatttattatatatattataatagaaaaatatggtcaaagatatattttgtagaccgtattattatccaaaacgtcaattaaaatgaaaccggagggagtactccattttgcttattttctctcatgggggttctgtcaataagaccgtgatattttctttttaaatttttatttagacaatcattttgtaagctcaaatgttatggttacgtatatcctaaaagtagaggttgaggatgcaatcatctttttttatcttaaaaaatgtctgggttataataccgctcagacatgcccctgctacctgattcagctcgaacctacaaagatcctactatggtataggaataaaatgaaaggaaaaaaatatttactcggggttgagtcccaataatcaaggaatttaggaacacatgaattactcaattgagttaattttacgcctcatgagagaaaatagtacatgtttgtttagtaatttttttaccaccttttctgtccgtagcccgcgtagcgacccaaatcgttagccccggtacaaagtacaagtgattgtaaactttcatgttattaaataaaaagatgaatgttaaaggacatgtagtatagtgattgcaatgacctaagtagtactcaagattctgtgttcaaatctttataggaacgaattttagattgggctatttccataatgaaactatacttcgaaatcaaaaaggtaaaccatgcatcgatttctgcattattttttttcgattacacaccaatacacacgtgcacacctgcaaatatattcctaatacacactcaaaagatacgaagactaacggtaaatctcaaaccttgtcaattaaattcctactaaaaacataaccgtgtatgtaaagcatttagagtggatatcatgatttaaaccctaactaataagtaaaatcatatagtaataaccatgactttaccatcataccacaaatacttcttaggtttccacgatccaagcattccttgttatagtcaatcaagtacgcaaaatttatctccacggttgttgtcattgttaggttgtagtgttaaataggaggaattaagatgtataatcaattatctggagtgatgtcctcttaggccagtcacaatggctagtgtcattgcacggctacccaaaatattataccatcttctctcaaatgaaatcttttatgaaacaatccccacagtggaggggtttcactttgacgtttccaagactaagcaaagcatttaattgatacaagttgctgggatcatttgtacccaaaatccggcgcggcgcgggagaatgcagaggtcgcacggcggaggcggacgcaagagatccggtgaatgaaacgaatcggcctcaacgggggtttcactctgttaccgaggacttggaaacgacgctgacaagtttcaccaggatgaaactctttccttctctctcatccccatttcatgcaaataatcattttttattcagtcttacccctattaaatgtgcatgacacaccagtgaaacccccattgtgactggccttagtactacatgtagggtgacgtcctcagtactcctctccgagaacaaattaaaaactactttgctgccggttttgtcaaccaagttgaataataataatcttctcaaaactgaaaccattgttatatgaacccaaatgattgttacttcctccgtttcacaatataagtcattctagcatttcttacatttatatagttgttaatgaatccaaacatatagtatgtgtagattcattaacaactatatgtatatgggaaatgttagaatgatttacattatgaaacggatgtagtatatgagatcaaatagcatgttgttgacaccaaaaagtcttgaccggcatccacacacacacagggtcatgcagaaccagtgaaccacacacacagaaaccagatgagatgagtgcagtagtgtagcgcaacagaaaaaggcaaaggcaaaggcaatgcatatacatacgttttcgcagctgcgtcatcgtcattcggttggagagacgtatcagagtagatggatggatcatggatccgtctcatggacatccactcggacagcaactttgggttgggaccttgctttctgcttcgccgtcatctgctacgactgccctcggcccttacatccaaaactgaccacgcaaacttgcaacaaatgccgcccgcgatagccgatcgataggtttgccggacatgtgcgcgtgtgtggtatcatggtgcgcgctcgatcgacgcagtgcgcagctgcggacacacacgtaccaatttcccggtcagaatgtcagctcgcagcagggtagtgataagtactgaagagactaaaggctggcgacgtatatatgtccacgtggggagaatgagatcgatcgagatggcatgccaggctgagtgcccgacaccgggccggtggttgccggccgagatgctagcttttttccaggattgtgaggaaaatgcgtcgcgctgatcagtttcggtttctctgcttgctacattgcaatagtagaaaggcagtgcgccagtgccggtcacgggccgctggtgaatcgtgatggttcgctggatggtttgacatgtaattccatatatgtatgctaagatgtcaggttcttgaaactgttggtaggcctatgtggatagagggaggtgaagcttgattgtgatatttgtttttttacggacagaataaatgagcactgccacattccatctatctgtccagaataaatcatcattccatctatctgtccagaaaaagatagatgctccattattcagttgcactctttgcaattgctttaaagagatcaatcagtttgaggttctctctccactaaaatgaatcatttaccagtaaatgccagtgaggaagttggtttgtataatacagttacaatatcatgttattccaaagaatatcatgatgcttgtaaaacttgtgtagattcttgagcaagagagtattgttttatgcatataaattgatctctcgaatacctctatttgactgtggcatacagactttatctcagacaataagagggtgtgttttgcttcccatatcggatcccactaagatgttcggttaatatcctcataggagagagattaaggatattttttttcacacctattatggtgtggaattattccccatcaattctctccaatcccttttaacgctcttcaaaccgaataaagcctaaaagagaatgtcttgtgtatttttcgattcgctgcaccactcttacggttagtttcaagggtagaaagttgagagtgcaaaaagtatcgacttaaccaaattgagtctattcccataaaaaatatgcttcctatgtttcatattataagtcttttgattttttctctagtcaaacctttttaagtttggccaaatttatgaaaaaaatagtaatatttaaaatatcaaattagtttcattaaataatatattttgatattgtatttgttttatgttgaaaatactactatatttttctataaatttggtcaaacttaaagaagtttgactagaaaataatcaaacgatttatatgttataaaagttagtcgatatagcggaacgacgactagcattctcgatcgcttcagtcattgatcacccatgacacgccagatgatgacacatgaatacacaatatttgttaacgaagttcagccgaagcctacatccccgaggctctaattatgggcgtccccaaccaacataacacctacccggtacgagtccatggccacgccgccatcgtctccttgcgtgtctacgctatattgtagtcgctatagttacattgtggcacctcctctctatttaagagagttgtcgatcgggttatagagtccgactctaactccacctccatcacctattacaactccaaatctaactgtaaccaaatagaactggtatattcaaccactagtacagatccttctatgtgtgacgggctctaacatgcctggaaatagcgggccgtcacaagaaagtcatctcaatcgggctaaaaaagtgcccgattaagatatggtcgcacagacatattagatggacataaaacttaagcccgtcacagatgacacctatcagtgacgggccgtagtttagacccgattgagataatattccatatctcaaacgggcttgaagttggggcccgtcacagatgaccatcattcgtgacgagcaccaactttaggcccgattgagataacattccatatctcaaacgggccttaagttaaggcccgtcacaaatgaccatcatccgtgacgtacactaacttaaggcccgtcaccgatgagtattttttctatttttcatatgaaatgtttatatttgtaagttgaactatagcaaaataattaacttgcagtataataattcattttacgagtcaaaataattttacgggtagtaaataatatcaaatggaaaagtcatcaacaacaaaattgtataactcatcaagatctataacttttattttggtcatttttctatataacattttttgaacagtttgaatttgaatttgaaaatatgacaacttcaaacaacattttcaaatactaaatgatttcaactgaaaaagttatcaacaacaaagttgaaaaactcatcaagaactataacttttattttggtcatttttctatataacatttttttgaaccgtttgaatttgaatttaaaaatatgataacttcaaacaacattttcaaatactaaatgatttcaactgaaaaagttatcaacaacaaagttgaataactcatcaagatctaaaacttttattttgttcatttcttcatctgacaaaatgttagtaaaattgttcataaattttacatatatgtgtatagtttataaaaccagataagagatat

SEQ ID NO: 10386 - DNA, 18027 bp, Oryza sativa
tacatatatgtgtatagtttataaaaccagataagagatatgtcaattttgtgaacaatgttactatcactttatcagatgaataaatgatcaaaataaaagttatagatcttgatgagttattcaactttgttgttgataactttttcagttgaaatcatttagtatttgaaaatgttgtttgaagttgtcatatttttaaattcaaattcaaacggttaaaaaattgttatatagaaaaatgaccaaaataaaagatatagatcttgatgagttattcaactttgttattgatgactttttcagttgaagtcgttcactaacaaaaaaattctatctgaatttctcaaactttgaatttaaaatatcaaattgtttaaatagagttagatggagaaatgaccaaaagaaaaattttgcacctcgatgagctctacaactttggtttcggtgacttttccatctgaaatcatttattaaccctaatttttcttcgaagttgtcaaattttgaaaattcaaaatttgaattgttcaaataaacttatttgtacaaaggaccgatacaatagttgtagatctcgatgagttatacaattttattctttatgatttttgatggttgtgtatgtgaatgaatgtatatgaatgggggatgttggggtgtgacatatcctggcctagggcttaatagaattaatagaatgctcataccaacaagctacaactactcttccggaagtagttctccacaaaaaactttgatattaaacgtgcttggtctggagcaattttaggatgggtgaccgatcgggaagtaaacttcgtgcacacgaataaggacaaaaaaaaaggattggcctgagaggggctggacagcatggcaaggctagccaaaaataaaatttattttttttaggattatactcatcagtgacgggcattaacttaggcccgattgagatgactcatctgtgacgggctatagtttgacatgtcgtcagggtcaaagctatcagtgacgggctttaattagggcccgattaagataggttcatccgtgacgaccgtttgcccgattgagataacttttcacattagtgacttctagcctgtgacggatgccgtacccgattgagatgggggttgccgccagattgagataatggtatccgttctagtgaacacatattctaacattatagtataaaacataagtatctttttttctttataggaatagactcaatttggttaagtcgatactttttgcactctcaactttctacccttgaaactaaccgtaagaacgggtagatggtttatccatcagttcgtagctaacaagggtcgttgcaatttgcaaaaaaataatatcctataatagtaaaaaatagtgataattaatagtattacgtacgactgtgatagttcaatacgatggacaggaagttagattgggacatggaagcagatcatgcatgaccgtctcaatcgcgcgcaacaataatctactctcttcgtccttaaaaaaaaactaaagtaatctagtcatgagttataatatttgactaatttgtcatatcatgggcaagataaagctactagcagatgggattgtacgtgattaaaggcacagaaaaatgcttcatgaggtggtagtgctgagctttagcaagcttgcgtgcaacgctctctcctttgctcgacgagcaccagatgaccccggcaagagaattgcatagcacctggtaatcccaccaactctatcgtcctcccactagtgaatatttcctccatttttctttcagtgtgggttggatcaaatcatattctctacactttcttggattaatttccgcgtaatttccaattaaaaaaactgcagcactctcagctagccagcttgatgaacactactagttgttcctacaattttcatgcaaatcatgtagtaaatacagctctataagagacaaataataccaccggcagacagtagatccaacgcatctagacggtttttcgcagcatcaaagatttgcttccaggtttcctagtgcctctcgagtaagcgcactatatggacacttggacagtgatgcagagcgtggctaaaaggagatggtatgattcttatatttctgctttttgttgtgcaacacattaatttggtctttccatctaaatcgcgtcgatgtaacagactttttattttccacaaagatgaactttcgctacccaaggttccgaccaatttctatggccacagtatttaaaagttttcgcttggtattttatatacatataaggagcatatgtaaaagtgagagagtttgctatctatggaaaacagtagttaaatttactagcatttgcaagttgcaatcatgcatggaaggatggaattgcacattccatatatatgagtaaatttcacagaactacatgtactttaaatcaaattatcgtaaaactatatatttaaggtaatgtgtcacacaactataaatttaagaccaagtataaaaaaactacaaatttaataacaaaattatcacaaaactatagggtatgtagtttacatccttacctctaatattatgtttgagttataattgttcaaattttgtgattaaattggtgtaaaatctgtagttttgtgataactttgttactaaatatgtagttttgcgatattctaccttaaatatgtagttttatgataaatttagtgttaaatttatagttttgtgatatatgttaaatctgtagttttgtgatagtttggctaaaatccatatagttttatgaaatttactccatatatattgaatatattattgaatgttggctcctatcgtgcttttctcttctgagggactcttgtaatgtatatatgtctagattttggagtaagataagtttaaataactctttctttttcgccttgatcaagacattgcatcaattttgtaaaaaagaaaggatataaggaatataattacatccccacgctatatagctataggacacatataaccataatgtttgaataaggtgaatgaagcaaatacattaatgctttccatgaaacacacaaaaaaaaccatgtattttttatcacaataattgaacaatttctgcactatttctttagaaaatcatgcgatccaactagggcctacacgcacatttgcaaacggtgacatctattgccatgtttattctaaacaaataactcttgtttatcaagaatctatgtaacaccaatatttttttaaggcaacaaaccaaacatccacactttaacgaaatataacggattataatgtatcccccctaaccacctctcatttaatttttactcaatattacccctaaaggcccttccactcctcacataccccttctctaataagtggcattatagttttttccctttaaccttaatctctcttagatgagtacaacatagtatttattaattctaaatttcaaaaatattaaataaaaaatataagtaaggcttcaagttgaataaaactctatatctattattataattctagaagttatttaaaaactaaatttagagtgcataattagtcgacatggtattgttaattaattactaattactatagtaaaacgctggataccacgaagggacatggtagcgatcaagagaggaatgagcgctctaggagtcgaacatgagacgtgcccgcgctccacagcagccccttttgccacctgcactagcacgcagtctcacttcctaaagtatcaactatcaagtaaatacattggaacattaaaataataattgataaaggtactaggatgattctatatacaatttagaattagactacatttgagttttgtatctataaatgcaattatattgtttattatatattaaatggtatttaaatataatccccaataaataagataactgattaacaactaatattgttgttaacgcgaaaaacacgcaatggcctaagagatatgcttaactctagtgcaggtccaaagaaattgccttcaggttctcagcgtgctagctggtttgattgtgcaaccaacaagaaagaaaaaggaaaaagttaaatccaccaacgatagcagatcggctggattgccgatgacgtatcttccggagccatgccgatgtgacttgcatcggaccagcaagggaagataaaacgtagagattattagatctacttgattggctgtagatgtcaatgatacatagcctatccaacgaaacacacttagatcgggtgattgggatagatcggatgttatgccgagacagtataaatcactcaatatctaactgtacctcaaagcagaggttacgtaggttcatagcatagttgatggggcaaacctaacgtgtatcggctagtactccgataccgctttatactaagatatcagcgcagataaaatatacaaaacaaagatcaatatggcaagcagggtgcattaacaaattgatatatagaaagcctaatatgctttaagcgaatgagatcttcatataaagggcagatttagacgatcaagaaccgggtagggaaacaaaacggctaaatcaggtaagatcggctgaaaccccgatactatctctattagtaatcaaagaaagagctagataagacgtctcaagatagcacttaacagatcgaacctaaccgatgcaacattaagcgtgaaaagaaacataagatctaagcaaatcaatgagaactcattcaagatggtagatatactgcacaatctagcttggtgtcgatatctaaatttatcggccgttttcgatgatagaggctagccgatgaagttagatgacgaaatctatctagattatacagcatatatgataactcggtgaatcacataaacaggattagagtgtcataaagatgtaagcactaatccagagaacacaaaccgccatagcaagctttacctctttgtcggagatcgaacccgatgtagcccaactcgaaagcaaaaactcgtcgaaacaatgagaatagaaaagggtggcgatgcgccgaagtattattgaactgtcgttctgtgattacaaggtgtcaggtcatatttatacccgaagtcagggccggcccttgccctatgcagccaaggcgaccgccgggggtgggggggcaacacctaatactagtaatctagtaccttatccgatgttgagatcaatgatttttattcagaattaaaggtattgcaagtgagttttctaaattcttcgatatgatgtccgcgcctgagattctgaaatttgttatgaatgcatatttctatccaaatgtttcagatgcctattgaattctcttaaccgtacctgtgacggtagcttcagctgagaagtttttcaaaattgaagttgttgaagaactatttgagatcaactatgtcacaagaaaggtcaaatggcttggctatgtgctcaattgagaaggatatatcggacactattgatcttaattccgttctggatgattttgcatcaagaaatgcctgaagaagtatctttacataggaagcagtggatacgatggggttctattcttcattaagttaatgaataatgatattagttccaagtttcaaatatattgttattttggtcgactttatttcttaataattaccaggcatgttaaatttaatatatggatgtattacaagaatatgcggatgggccaaaaaaataaatagtttgggccagaaggaaaagaaacagatgtgagaaaaaggaataagttcatctaaggtcccttaactttcaacgaatccgattttcgtccttcaaccacaaaaccagatacaacgggtccctcaactatcaaaaccggtgcagattagatccctcggcggttttgaaggcggttttggctgacatagcacctatgtggctagtttgacttggtcttgatctgacgtggcattgacgtggcgcttacgtggcaattcgatccggaaaaataataaagcccgtgggacccacatgtcagtttcacatagaaattaataaaaaatggtggggcccacgtgggccccacatgtcatcctcacccctcttcttcctcctctctcccaatctcccctctttcctcactgaccggtggagcggggcgatggacggggtggagcggggaggccggcggagcggagcaggttcgcgggcctcactgaccagtggagcgggccgatggacggggcggagcggagcaggttcgcgggcagagcggcggcggcggcatgtcaccctcactcccctcttcttccacctctcaacctttttgtcggtggggagccgacgcggtgactgggcatcggcggcgcgccggaacacaaggcaacgacggcgtggaggagggtggtgccgttggcgcggcaagggaggtgctggtgacgatgggggcggtgggagaggaggagagcgtcggcaacgcgggaaagggcgacgaacggcgcggcaagggaggagttgagcgggcgggtggcgggagagcgagagagggcgacgggcggcaagggaggagctgagcggcggcgcgcagcgggagagaagctgggcggctaccgccgccgccgaggagggcgtcgcaacgggcggcagagagatgggcggctgccggctgccgtcagggagaaggtgcagttccccgcttcttaccattgccgctccggctaccaccgctccgcgtgccccgctctgctccgcccgcggcccgccgccgccgtgctccgctccagccgccccactccaccggcccgctccggctgccgccgctccgcctgccccgctccgctccgcccgcggacctgctccgctccggccgccccgtccttcgcccgctctagtcgtcgccgccccgctccaccggtcagtgaggaaagagaggggagatggggagagaggaggaagaggggtaaggatgacatgtggggcccacgtggggccacgtaagcgccacgtcaataccacgtcagatcaagaccaagtcaaactagccacgtaggtgccacgtcagccaaaaccgccttcaaaaccaccgagggacctaatctgcaccggttttaatagttgagggacccgttgtatctagttttgcggttgaaggacgaaaatcggattcgttgacaagttaagggaccttagatgaacttattccgtgagaaaaatatttgggccaggagacaagaacatccggatgggccaaaaatacagtttgggccagaagaaaagaaacggatgtcaaaaatattaaaaacaaattggcttcgcccggactcgaaccggagaccttcagtgtgttagactgacgtgataaccaactacaccacgaaaccgatgttgtacttcgttgaaaaatttgtttttaatattattttagtacccctaactttagttgctttcagaaataagttctaaatacaaaaggtgctaatactcataattgaattctttcacccgaaattcctatatgctatgcttgacgatcccaaccggaataacgtacacagttttgtccataggataaccatactcctcaagtcccatttgctaaattcagaggtataaaaacagaggggcttgtactagtagtagtagcttgtaacacgacagccaaattacaccagcaactagtacgagtacagcaacaaaagtagtaggagtagtactacatgcataatctcatcggctgcatgcgtccatccgggttcagagctgcgtttggaagatggtgacgtggcgcaggcgctgcgccatgtcggccaccgagcccaccgccgcgagcagcgacacgacgagcgcgccgacgttgagcgcctgcagcgccacccacttccggctgcctctctgcaccttcgcctgcgccatgtacatggtcaccgggaagtacaccgtgagcggccagaacgcgacggcgccgagcagcccgagcacggcgttgaagaacggcagcaccagcgacaccaccgtcgtcacggccacgaacgccgtgcgcagcaccagcttgcacagcgtgaaccgcaccgcgcgcccgccgcccagcggcaccgcgtactcccggtggaagaacgccgactccggccaacggctcgccagccacttctcgtagcacgcgaacaccggctgcgcgtacacctggtacgctccgaccaggtggatgacgacggcaacgttggcgatgtcgacgagccagaacggctcgaggaagccggtgaggacgttcccgggcgcggcgttgccgaacgccgcgtacccgacgcacccgatcgacacgtagaagacggtcgtgacgccgatgccgtacaggctcgccctcttcatcgtcacgttctccgacggcggcgacttcaccgtgtcctggatctcgatgagcagcatggagtaggtgtacgcgaaggcgatgttcccgagcgcctgcaggaagtgccacgccttggtcgacgcggtgacgcctccggcgccgaccctgacgccgaggagggtgccgtgcgccgcgccgtgcgacgcgaccttagcggcgctgaggaagagcccgacgaaggagtaggtgaacgacatgacggcggcgacgacggagatgagcgtcaccccctccaggctcgggcactgggacaggacgacctccgcgaggccgaacagcaccatgtacatcgtcccggacgagccgcaggtcgcgtccggcccccttgtagtggtggcagttcgtgcgcaccactgacctgcattctcacggcccaaatcctagtacatgttactgaacaaaaatttgccaagatttttcagggtggccaagaagctggagctaagcttacatgatgctcgtagcggtcgtgatggtgtaacccaccattgcgccccagagaatcgcgtactgcgcaatgccacacacgaccacgtctcgaggcccttcacacgatcgatcaaagcaacagtcttgtcagaaatcgcagagattttgcaggagaaaatgcaggtaagtctcaaaggttcttagctaccgaggcatgagcggacgacgtccatgtaggtgtagttccgcttgccgtggacggggtccggcgtgcggtagcagtcgcagaggaggacggcggtgtagtaggtgatgtaggcgcagacgacgagggcgatggggccgagcacccaccccatctgggccacgctccacggcagcgccagcacgcctgacccgatcacggcggtgatggcgtgcgtcgtcgccgtccataccgttcctgtgaaaaggaaacaaaattcagtttcgtcagtgccattcttgcgttcttgtgagaaaaaaaaaatcctgtgagaatgtctgacaggtcactgtcatttacattacgtgtgacattcttgccttcttggtctcttggaacacctggctgattaagcatgaacatcaataaagatgcagtgcattgaagagattgccatatcagcgcggctaaaaagagatcgccagatcatagatcaattacagtgggcatgatgcaacattgcacaagtcaacttcccagtagtgtaagaagccatcattttttcaaaaggatctccaggattccatcatgtgtcataaacaaagaatccgtttgatctactgcccatgcgctggataccataacgtaaagcagaccaactaacgagtacaaatagagcaacaggttcatatattacgcatgtgatttaatcaccatgtcctaaagcagtaacacttaaaacaactaaagaaatatttgctgtcttacttgtgttaaactaacgaatcatcgcaaatgtataaacagactcttttgaacaacgtaagcacgcacatgaatgaaaacacttatgtaatgctctggtggcctatgtggagtatgatgtggtatcccaaccaacatcaacatgcaaaggaagtatgatgtgaaatcaggcacttgctccctgatgtaaagtactagcagggctaaagtacagtcaaacttttgtccagtaaaattccttaattacaatagacaattgccccgaaatcctattatttgacatgagtgtacttatacttaactggtcattgtcaagactgcttaatggcccgctcttcatcacagcctatgatagctagtcacaactcacaacagtacacccaagataaccagaaaaaggaagtagtagtacaacagaatatgcactatgttttactttaataccatgaaagctatttgtcgaattaggatgcgtgatgtaagtggagagagcacaagctgcaggttaatttgcagccattcatcgatacctaatccattgctccctcacgcgaagaagaaacgttccaataggctattgccaacaaatagtgttttccattgtttctgggattccaatataacattaggataatgattgcacatattgaaattctgcctataatcctggagtattagtactgctgtaccgtataacactagtaaagccaaggccacttggacttggtagggtatatagtagagtagaggtagtgcctgccaagtcattggcgatttggatcttgcaagaggttgcgtgctgtaactatatgggaattaggacccagttcctgcataaatactatgccactaacactgttactatccttcacgttgtcctagtaaaagcagtggtaacagaagcttcacgcaatggatttcgcattttcaggtgttggttttatccaataatgctagcatatacgcaagatgcctctattaaatctatcccgagtttcagggatgttgctgcaatgctgtgacgagtgttgtgtgtaaaacagaagaaagaatatgtgcgtattcgggagtgtagcatctcattagctagacatgcatccaagaaacaagacatgtaaaaggggacaactcttttacatggcatttctttaagataaaacactaaaataggcattgaattcattatatggcagtgtttaataagagaagtgtaaattccctgcctctgcatttgcagtgtgtatttgtttggttcttccagtacggcgcggcgtaaacaaaatggaaaagaagggtttgactttcagtgcccatgcatgcgtgtatgctccatcagacggcttggacagcaaaatcatgcattgactaattccaaatcttttttttttttgcatgtacttggagaagcaaaacgagagagtcctacaaggtttcgaaaggatgcaagacaaccgcatgttccatagcgcgctgaagtctgaaagcgtctttccactgggcacacatctggctagctctcacttgaaagagaggcacaagtcaataaccaccctccaacgtacgccagcaatgcacgtttctgtccaaattcagcaatgacagaggctcgcagatctaccacactcaacggtatgtggtgacaatgaacatgcagctaaactacgatgaacaacggaacagagtttcagaggaaacagcagctaaatactctgcatgaagcatgaactgttcaggtgccttcctagcagaagaaagacaggcagggtagccgtaggatagtagtaggattttcggcgacgacgacgactgtgcaaacgcgaactggaaacagagaggatcctgagaattacctgttctgacgcggccatcgtcgtcgacggccacctccttcctctccaccttctccacgtccatactctctctgtgtacgagtttccctctctctcagtctccggcctctcttatctgagcggaaaggattttgagcgaattctgaagcctgtgcgctgcagctatatatagagctggcgagcttttgcacctgacctgtttcccactgtagattcattcttttaatacggtcacgaaaccccacgaatcctactagtacctcagagtcccctgtagaaaatgaaggttttccacgtcatttttttagtagcaataactaccaccagattatatgcctgttacatttagttgaacctaccaaggtgttcacaaaggtgcagaagttctggtgacttttatgaatctgattagtcaatttgggatgaatctggttggtacttgcctactacattcattccataataattatattcttaagattttatttttcctaaaataattaccacgatagagtattaatatcatcaatcacttattcaattttcccatattctattttcaaccattctctcgtttttatatgtacaccatttaatgaagcgagcattataatctttcttttcaaatcttaatacgtagtacctgctaataaattataattataattattttgggacggaggtagtactttgtaaccacatgattgaaaaatctgaactaataccttctgcagttgagttagtgagcatgttatccgtctgattttggtaatttctaaatatccctgaagagaagacagtgatgctgatgatcattcaggtggtagaaaatgaagtgctggacatatctcagcctctcaggggctcagggcttgacccaaaaggaaagccatcttctgcttcatcatgcggccgccacgaagcacacattgctacaaagctgcatgaatcatgagattgctgctcttctcctctcatctatcatcgtgagatcatcgtccatctcttgacgccaccaaaagaatttcaggttcagaaacaacaaattgtttcttgcgattcactggaaaatcaaacacggctcgtaattcacggccggaaaccatcaaagtttgctgcgtggttccaaaaccatcaacattatgtacaccctgtaatctgcctatatatggattatatttatggatatgtgctgtgtgcaactgtgcaacagcgtgtctttgctagctcgtgccaacgcagccaaacagcctcacgtgtcgtcatatccctacacacagtagattcagggctggtttggtttgaggcctaaattaggcctaccaatatttgacaatttcaatagtgattagtgtctatttggtttgaagccaaattttggcatgccaaaaaaataggccatttcaatagtgaacttaggctattttggcttcaatccaaacgcaactttgccttactaaaattagtcatgccaaaacttaccaaaatttggtactgacaaaatttgataaggcctatttaggccacaaaccaaaccaaccctcagtgacgaagctgaacacctaaagctgggctgtatgggccagtttgggtccaaataagaacaccaattaacgccataaggctgtgccacggcccaggcccaggcccaggcccaacccaatcttacaaaaaaaaaaacaagtaaacaaccccaagccacggctccgagaaatacaaacacgaacacggcacacacgtctacgtgagcccacggggattattgttcgagtcaaatatgttacaagcaaacacgtggttgcatgcggcgagccggcgtgcatcgcgtcgaccggttttcagttcttggcggtggtgaagcggtacgaggcgtaggagagcgaggcgttgctccagctgcggtggatcagctccgccttggccccctcaccggcggcgccgagcgcgacgtgcagcgggaggaagtggtcaggcgacgggtgcgccaccctgccgtgcggcgccttctcctcgtaccgcttcacgtcgtcgtgcctcccgccgagcagcgcctcctgcagccacccgtcgaactccgccgcccactgcggcaccggcgtgccctcgggccccatcctgcggaggttgtgtgtcgcgctgccggagccgaggacgaggacgccgtcgtcgcggagcggcgccagcgccctgccgagctcgtagtggtacgcgccgtcgcggccgctctgcagggagagctggcacaccggcacgttcgcctccgggtacatgaacatcagtggcacccacgcaccgtggtcaagcccgcggctgtggttttccttcaccggcccgaacccggcttgctccagaagctccttggtcttcatcgccagatcaggagcgcccggcgcagggtacttcagctgtttgcaacaacattattcggtatggtcagatactgatgcgatcatgcaaatgcaacgtcattattcagaagggtagatactgatgcaatgaaattattcagtactatggtcagagatactgatgtagtgattacgttatacgcatataccttttgcttccaggaaatataacgttttccatgcatgatgcatccttttgagcggaatggatttaagttatagtatgatttagtaattgtttggttgcatataagaaaagagtacaaaatctttctattgaaaagttatcatacgccaacaatgaatctaccttcaaccacacgactacaggagcatatatgatggataaatagtactccattcgtcttaaaatataataacttctagcacttaagatttgtcccaaaatataaaaacttcttcactaacattcttttctcaatcaatcacaattcttcaccattcaattttcctacatacctgcacttctctctcccatttaattctgactactttcttaatacttgtgtccaacactaaaaattcttatattctgggacggaggaagtagcacatacttataataatgcatatatagtacctaactaaatacttatgagtagcaactttccttcgacgaaaaggaccaataagctactagatgagtaatcaaatccttatggtgatgcatatatactacctaactaaatattttgtacggcagctttgatgggtgtggtttctccgataacaggttcacccaaattaccagagtacacacccatttttattcgactggcttaaaaacaattgcgtaaatatttactcttggccatcataacctttactagtaatatccacaactatcttatggtgtatatgctagtccttccgtcccaaaatataagctattttggtgaatgtgacacatactagtattatgagataaaatcccttatattttacaacggagggagtaactcaaatgctgaacagagtaatgaaaatgaaactaaatttaattagccatttagacatagctcacagcaaaatccttgctgactgatcgactgaacgatccggcagatgctagtgacaagcgcactttacccacttgtagtagtttggtatgcccattgcccacaaatattccctaattttgctcacagcctcaaacaaaatacacaatgtcatgtctgcatcagatgggatgctggggttggtaaaagttcagatcagctaaacttttgggcatctcttcctactcccatgtttaagtggtaggacctactcccatgtttaataagcatatctaagatgcaatgggacatgtacttcacaaactagcatgaaagatctagtataatactagcatgttttagtctttgattgcgctccaatcagtcccacgtgatataaaatatacaacacgagatacctaaatactccatgcataataatatatagtagtataacatatatggagaagtaatcttcacctttgaccagtttcccctacatcaggcgcggggttatcacaccccagcggtaagtgaggttaccgtgcgatatttgtgacaaaccatacaaaatttatcgaaatttcatttattattttaatttataagaatttgttggggttattgcagtattaccattaccatatccggaggtaaatgcaataaccgtgcaattacggccgattttgtaaacctgcctaaggctatgagcatgcggagaaatggtatcatgctgccatggtgttgcctacgagtaaattcagaccagttgccaaaccaggtttcagcaaccatgtagtgtggttttccgataaccaaggcagaaagatcgatttcttcccatatattctgcgcgatttggaatcaaaaccatccaaatttgacgtcttccctatagcatgtaggaaatccgaatacccaatccttgaggctgtgttcccaacatcttcaacctcgttttccgcgcgctcatttccgaaagtgtaaaatgcccaaagtagaagatgctcgaacaaagaaacgaacgaccaaggtccaattttggcggaatcgctccacgttgtacggccatttctcaatcaagaaacaagggattcgattcgagggaaggagacggacggacggacggaccttgtacatagccttggggaagccgtagaagtcgtggatggtgtcgttgttgccgcggatgacgttgaccgtcggcgcggccgcctcccagtggcccgacacgacgaggatcgcccgcggcaactccgcgcccgccaccgccgccggcagccacgacttgaagaatccctgcgccgcgatggtgtcgtcgatggacagcgtgggcgcgccgtgcgacaggaagaaggtgtccatggcgccctccgccgcgcgcctcgtcgtcgtcctcctcctccccctcctctcggcttcgagggcgctcccctgctgctcgtcttcccccggcgtcggcgtcggcgtggtcgtcgcgcgcgcgtgcaccgcggccgccgggctgggctgcttgctttgcctctgacccatcctcttctcctccttatacggggccggcggccgcgcgcgcggtgcggaggatgactgtttattttgcggtgtttggtaagtttagttggtcgacgactcgacggtctggaccgcggactcggcccctcatttggactttgggatgtcgctgccggcgcgcgcacgggcgtgtaagcagtgacgtaagaaagcgtacttcgctggaggcgcgtgacaagtggagaagcggatttctggaatcggccatggtctggatgttgttggtcatgtgaatctgtgagactgtgatcctaccaacttctctctccttttttaaggaagggtctcatgactctcatcgaatggatgtttggattgatgcttttcagccaaaacccatcgaattgcttattaggctgataaccaccagccacaaaaaatccttatcaagttaaataagccaaataagccaatcaatggtttttctttagcttaaggggaaaaagctaactttggctgatcagctaaagctcttggcttactgatgagggccgaaaatatgattggctgttatatcttgttatacttgtgtctcgcccatcctaggggtaactgttgcactgcgaatgatactacataccgtgttgttactgtatacttgtacaatagtacttcttttttaacgattacactatatatacatacgtgcgcacatattactacacatgcaacaccacatttgcactttcacgaacattttcttaaataaagaaccaactgtttatatctgattttattgaatttttgttgaaggtccaattgcacctactaatctagcttggatggcatgatatatgttactattggctacagtgtttgagaccttgcattgcttgtgtgttggcttcactgtcagctcgtccaatgtaccgcagattattatataggagtagctacttcaatgccaaacaaaggcaaaaaggtaggattgccttgtttcattgctagagaaggtaaaacatcaaccacccaaagaaaagtaaacatcagaacgccagcccaacagacagcaccttatgaacacccaaaacttaacaaaaacagactacagagtaccttaaacaccggacaccaaagcatacagcgaactattgacattcagaaattcgacaaccatttctataaattaccatcgacaaacatgtttttttcctacaaaatatcattgtacaagtgtttttgtaaattcccgttaggttttcatttatagacctccgttaagtcttctaaaaggtctattttactctacgatccatagaacactatgtgaggggaaattattttatttgatctcttgaggggatgtcccctcgttgtttgcatgtcactgaaatgattatgaaaaaaattgggatgatgtattaacatgtga

SEQ ID NO: 10387 - DNA, 31591 bp, Oryza sativa
  unsure (1)..(31591): unsure at all n locations
gtctttttcgttacaagatgtagaggttgaatttgaacttgcatgtttgtggagtgatatatcacatgttaatacatcatcccaaattttttaaaattttttcataaccatttaagtgacatgtaaacaaaaagaggggacatcccctcgagaaatcaaaattcacttccactatgtgagcacttactggattagaactcttgaggggagataacataccatccaaatgattatgaaaataaataacaagacagattaatatgtgatagatcactccacagacatataagttaaaatttagcttctacaagttaaaaaataaataaactatgattagttaacttatattcatagtcaactttatttttttttattgcagctattagaagttgaatttaacattacatatttttggagtgatctatcacatgttattttttttatttttttaataaccaattggatgataggcaaataacgaggaaataccctagaatagttctcctcgcagtcttttgcacccatagttaaataacaacatattgcctaattagctgtcaattttttttgactgaattagctgtcaaatttgcacacgcaaatacggttcagtgatgaagctgaacgccctgttgcttcctaccttgctcggtaggatgggccagttcgggtccaaataaacatagcagttatcatagtgatatcaacgccatgagaggctgggccacaacccaaaccaccatgcatgcaagtttattgcaactgaaaaccacaagacacggccgttaggaaatacaggcacgaacgtacgtctacgttaataggagtatattaacgtagatcccacggagattattaattgttaagagtaaaatggcgatgatataagcaagacatgtttcactctttgcatgcggcaatcggtttgttcttggtggtggtggtgaagcggtacgacgcgtgggagagcgtcgcgttgtaccagctatggtggatcagctccgccttggcatcctccccggcggcgccgagcgcgacgtgcagcgggaggaagtggtccggcgacgggtgcgccatcttaccgttcggcgccttctcctcgtactgcttcacgtcgtcgtgcctcccgcccgcgaggagcgcctcctgcagccacccgtcgaactccgccgcccactggggcaccggcgtgccctcggcgacgggcgccatgcagctaaggttgtgcgtggcgttgccggagccgaggatgaggacgccgtcgtcccggagaggcgccagcgctctgccgagatcgtagtggtacgcgccgtcgcggccggtctgcagggagagctggcacaccggcacgttcgcctccgggtacatgaacatcagtggcacccacgcgccgtggtcaagcccgcggccgtggtcctccttcaccggcccaaatccggcttgctccaagagctctttggccttcttcgccacatcaggggcgcccggcgccgggtattccagctgcatgggatgccatgcatgcattattcagttttttttttaaatttttgaaaggagggaacaagctttgcctcgtgatcagatcacaaggcaacaaacatgatgcatgcatggtagggaaggacgaaacgcgaacagttggacctggaacatggacttggggaagccatagccctcgaagtcgtggatggtgtcattgttgccgcggacgacgttgacggtcggcgtggccgtctcccagtggcccgacacgatgaggatggcacgcggaggctgcgcgcccgccaccgccgccggtagccacgacctgaagaagtgctgcgccggcatcgtgtcgtcgatggagagcgtgggcgtgccgtgcgataggaagaaggtgtccatggcccccgcgccccgtagtcccgtacgttgtgtactcctcgtcctctcggtttcggaggccactccctgctagctgcttatcttatctcgccggccgcgtcggtgtcggtgtggtcgcgtcggcgcgcgcgtcgcgtgtgctgccggccgggttgggcttggctttggctctgcccccatatccttctatttatatacgcgccgcgcgcgcatgggcgcgtggtgcgttgcaacgtcgccggcagccgatgaggcgtgcgttggttgcagatgattgggagtgcgttagttgcagatgattgggtcagccgatgaggcaccatcgtacgtactgtacgtttcacagttgtgcagtagtagttggtcgatatgacttccgatctactactccagtctactagaccgcacacctcacctcaagttgccggcagcaaaagctgcgcttgaacagccagcagctctcgcgttctaaatggatgttaagctttggatatagatagaatatgcatgatggagcaaaattctcacatggttgaattaaattaaatattataaattgctaacaaatagtatagaaaaagtggtctaagcattcaagtagatgtttaaagtggggcctcattcattcgctcaagatcataacatgagctacttcaatgccaaacttaaatgtacgtataatgctagctcaacaacctcactagtagaaaaaaggtcttcccttactgtcaaaatatgcctttcccggtggctagactaaccgctagcgtcgaaaggctagtgaaaatctaaggttttcacaagcaaaactttaacagctagcgataatcgttttcgcttgcggtagtgttataccggccgccagcgataatcgaattccgttagtggcagagataatcgattttggggaaagaaaaagaaaaaacccatgcagctgccctctaaccgccagcgaaaataaatatgcccacatgttgctaccctgcattaaaaaatccatagcgccaaatctcaaatcccaaatccacaacaagcacaacttccaaaaaataccatcacagatcctaaatccacaaattcacacaaaaatttcacatcacaacacaaattccacatcacagatcgagcacaaaaattttacatcacaaagattaagaggtgaggcatcacagatcgagcacaaaaatattacatcacaaagattaagaggtgaggatggattcgttgctcccaagggagggcgtggatggccggcagcggatccgctcgccggcgccggctctgctccccaccgcccctcccacgcgccggtgccgccgagcgccgccactggcccctccccccgtgcctctcccgaggacaggcggcggcggatccactctcccgaggctcgccggcgccagatccgcatctcgttgtcgagaaccaccgccgcttccttccccgcgccactgccgcacctccttccttgcgccgccgcccccttccccactcagcaatggagagtgaagggaggctggcggcggtggagaaagaagggaggctggcggcaatggagagagaagggaggagggatagaggagggaggcagagggaccgtgcgctaccgcgcacttgccttccgtcaccgtcgccgccgcgcgctgccgcttgagaaccgacgtgcgctcgcgttttgtcaccgtcgccgccacaagccgctgctggagccaccgcgcgccgtcgcccgagaaccgtcgtcggagctgccgccgccgcctgtggggagtgagtaggagggtgcatctggagggaggaagaggaacaagaggataaggactaggtggataaggagtggtgggtggtgattttttaatgggcggtgatatttttaagtgtgtgatttttttaagtgcggcgtttaaacgctggcggtaggttaagaagcaatagggttattttttgaaatggacttcttaaccaacctcaagcgaaaacggattttcacttgtggtcctagactcaccgtcggcgaaaatgaattttcactaacggttctaaaccctctattcctcgttagaatttcacaagcggatttcttatatgaccgctagctaaaaaaatagagtaccgtcataaaaaatcgtttcttaagctatggggttgggaacccatctcatctacacgaaaaacagagcggtccgttagtacgttattaattaaatattagctatttttaaaaatagattaattttatttttaagcaacttttgttttttttttaaaaacacaccgtttagcggtacatggttaggaaaagcgagagtacatggttaggaaaagcctcgaacgaacacagtcacctcacgctcacagtgacactgacacaagtgcatagccgtatacacgacgacatcatgcggaagtccaagcagagcaacaccgtccccaggcagagcaatcttagtatacctcgtacgcagccatagggaattcgtttttggtcacgaggctttacagtttacagaggaaatgaagtttatctagatgcataattttgactaattgacttggacggagaccccgctgttgaaggtcaagaacgtgcacagtatctcgatccctcaaattcccgtgcgacacgtctgctgcttccatcgcttgctagttacatagtccatcctggttcagctatataacttgatcaatttagagatagtgagcaccaagaatcaatcaatcgagcagaaatttgatctgtacatctccagtcaccatggctgccgccggcagcagcaaaaccgcgagcttgttgctatgcctggcgatgatctccttcgtgcagctggcacagtcctcaccgagcggcgacaaaggcatcaaagggtttcacggcaagaagctcagcttcaccctgtaccagcaggagaccatcaacaagaccagctacatggtcgtcgccggcgtcgccggcgccggcgtcagcgagaccaccacgcccttcggcaccgtctacgtcttccgcgacgacctgacggtgcgccccgagaggtcgtcccgggtggccggcgtggtggaggggacctccgtgacgaccagcttcgacgggctgaggagcctgtcgctgggcaagatcacgctcgaccaccgcggccgccggggatccatgtccgtcctcgggggcacgcacaacacccggccgtccgactgcccggtggtcggcggcacaggtgacttcgcgtacgccgtcggctacgtccggacgtcgccggtgaacctgcggggatcgtcggtcacgttcaaggtggagtttcacctgtactggccaccgtatgctcattacgctccaacttcaaagcactagacaagtcgctgtcttccaccttgatgagcgcgtctgcgtgtgtactcgtttctggcagtccgatattatatcatgcatctgcctattttttttcagtctctcgctgagtagttaatatagagtttgaattacctctgggaggtatttccgtatttggtgtaataaaattcaagattgataatctgaggaattttcatgaaaaaattaaactactacggatgatgcgcttatcggacgcttgttgttcggtgatagtactacttaaaaaagatcctcggatagtcagactttgcagtatacaattatgccaatgagatatgaatcttgagccaattatatcactaacatatgggtattgggttctactttcgtacggttcacatgtcagaaagtcaggaaagcctcatccatactactttcccaattcaatgtttaagttggagatggagaggttgtggattgggatcacatgcagtggctatagccactgcaacttatgcagtcctaaggacatcattggaatataaattaacgtcctagatctttccttgatactgttcacaaatgaccgtacaaagttagtttctgtagcatgtactgtagcaattactgtttaaaacaactgtagcatttatttcagccgttgattgccttgatccaatgatgaaaaatggttccaactgctaaacttgcagtctgtcctatgactgcaccggatctggattcaactctagtcgggcatgcacaactgaaaccgacaacaaactttgttccatttctcaaaccaaacggaaaagttattagcaatgattaattaagtattgattattacaaattttaaaaattgatatatttgattttctaaaacttatatatagaaagttttacatcaaatacactatttagtcgttcggaaaatatatttaaaaaaaccaaagagtagctagctaaaaaaactcagccttggttttttttaactatcatggcacacacctttaaaattgtcgaatggtgtattttgtagaaaaactttttatatataagtttttcaaaaattcaatacattcatttttaaaatttataatagttaatagtacttaattaatcattaatctttcattccattttacgtgtggccgttaatccaggtcaaaaagctagcgaacactgaaagctcccgtgcgccagaaacacccgagaatagacaaccgcacagtaacatacacacggcagcttcatcggttttccatgggcactttcggtgtttcacgattttgcgcacgggttggcccaacccaaaccataccgtgtgcgattttgctatagatttgtcgtgtgattttttctctcggatttgtccttttttaggctgttcgataagtgccaagattcgtgcacatatagcgatgggaatccgcataggattcagtcggacgggttagagcgctaatttctttttttgcgctttaaaaaattgatatgcacgctgttctctctcgttctctctcaattgaaactaaaataaaaataaaatacaaaattacagtcatatataactaaaattatatttgtaaattcagttgatatgacatgtaggtgcattgtaattttgataaaagtaattatgtaactaaatatgtatttttattttcttttgtagtccgttggatgtaaatttaagggtagaaaaaatctgggtgattttttcttagaaatcacctgacaaataaatagacaatccctaccgtgtgtgcttaaacacacgagaaccttcccgtgcggatctagactcccggtaacattctatgtaacggactctttcagacggcacggtggcttaccgtgtgttcgaacagcaataatcaatcaagcagccatctccatggaaagctagtgagcagcaataatcaatcaaaaggattatttagcagttagcaccacctaagctcaaattcttcttccgtttttctctttctctcggtttcaataggccaacacgggaagctagtgaacagcaataatcaaccaagcagccatcgccatggcagctaccaacacggccatgagcttggtgctgtgcctgctggtaatgatcatctgctccacgcaccggttgctgcatccccaaccccagcttgcggcgacggcggcgtcgtcgtcgtcgtcgccgttctcgtcacgcagcaagataggcaaggacatcatcgacaagacggtcagcttcaccctgtaccagcaggagaccatgaacaggacggggtacgtcgtcgtccccggcgtcgacgcgcccgcgcccgcgagggtcgtcgtcagcgacgccggcgagccctccgccgacaggcagcccttcggcagcatgtacgtcttccgcgacaacctgacggtgcgcgccgacagctcctcccgtgtcgccggcgtggcggaggggacctccatctcgacgagcttcgactgcgaggacggccggaggagcgtgtcggtggccaagatcacgctccaccaccgcggataccggggctccgtgtccatcctcgggggcacgcccaacatcaccaggccgtccgtgtacccggtggtcggtggcaccggcgacttcctgtacgccgtcggctacgtccggtcgtcgccggtggacacgcgtgggcggactcggacgacgtacaagatggagcttcgcttgtactggccgctgcacgcctatttcgctccaattccgtagtaacacatcgatcaacgttcttccattcgcgtcttattccaactataattccatgcagaagttatttttggagttaatttgatacatgaactaagaaagatttaaatgattttattgccctataaatattattgtacatttcaaatggtgcattgatagatcatttattcatgaggcacaatattgactaagataatgtaaggggaataaaggaggtcatatgtgatgaggtaattaatttgtttccacgtccattactcctggttaatatagtgatactgaaagttgctcaatccattccaaataattgacaccggcactatttaattttaaatttaaccatcttttgcacaaaaaaaaaagaatacatgaaaaatatggtatactagcgaacaatgtgctgtcaaaaatattatcatacaaatttctttcatcataatataattatttaaaagtatttatggttaaagtgaaccgactgtagtcaattatttgaagaacagaggtagcaaattctgagtttaaacatgaatattttggtatttagattttaccataacatttaccacggaaggttaaatggcctcacacctctttgtgcactcttattatatagattctgtttctattttataaatcggcgggatgctctaggatttacttggatggaagttcaaatgtggggcagacacaccaagggtgcgctccacattatatatgttttgtacaaactttatcatttgttgagaaggaggtggtatggactcacaagaagtgtgtgcttttataggtctggtaataggctccaaacattgatcgatgaaggatttgcacatccattcaatctaaggacttaaatctagctaggcgaaacgagatgcacatcttaagttatgcttagctcccccaattattttttacattgaattgtacattcaagcctgtttttctcgcatgtttccgtatttcaaaagtacggtcgagttgttttgtttgcactaaataaaagtactgctcccaacgttcaaatataagaatttctgcgtgtttcccaaattttgaaaatctcacagaaaacacatatattttggaatggacatagtactccgtagtttcaaccgtacacttctctacaaattttcccagtaaaaaaaactcaactagcatcaacggtagcaattaggtcgaaaactgtgatacgataaaaccatgttacatggatacacaataaagatatggctagtattggactagcgacctaaggtacctttttttttctggataatctgtttggatgctcacctcattttgccacaattttgtgctaaaagtatatcaaggtataaattgtgcggctccaaaattaatggtcatatttgtgtcaaactttggctaagaaaagagcctatgatttgtgggaccaaaagataagaaatcattgcatgctaaaattgtagaaaccaaccaaacactagccatattttaccacattttgccatataatagtcaagagtggtaaaatacaacaccaatgaagcatgctctaaacacttgaatgattttgtaattgttatttaagggtccaaacaaatcaattgactattagaagttaaaatagatttaaaataggcttttaaagaaatttatgtaatcaaatttttatgaaaagttaaacatgaagcatgtcatattaatccatgatacccaatgtgatatttgcccattgtagtggggcctgtctgtaaatatcattgtgctttaagctagtttaataaagtatatactttcttcgtctaaacaatatccaattatagagatataaaaaggtgacaatatcatctgaggcttttggtctcagttagtcttgcaaaaaatataaaaaaaatgcttttgaagtttttcacaaagtttacttttatattgttaaaaacacatatataaaaaatttatttataaattattttttatttataaatataccgtttgtgacttaccagaacaaggagagaagagtctgttcatcggtccatcacggccggacaaacctcgccgcttcgcttcgcttcaccctttttcggttcgctctagctcctcatcccgttatgccttccccacctgccgctaccccacgcccccttcctctccaggtctcccccctccccttgtgcgacttgtgtcgaacaccgcagccgccacccgtagacgcgacctcagcaaccccacccacttcctctccgtgggcgcccgccgcgcgtcttgcccccagatccggcgcccaccccaggtaaaagccctcgcccgagctccgttgctcccgatgcgcgcgtgcagggagggatgggatcaggggaatgggattgggggtttggggcgggatggatcagttgaatcggctgcgctagtttggaactcgaacagcttgcagtaggataggtgggttgaatggtcgcaggtgttgcgcttttctgatgcggtttcgtttgctgctgctgctgtgtgaaggtagccggttgttgcttgcacgcgtggatcacttacagaaccatgcggcggtaggaacttgggcaagattccagatggttcgcttgtttggtgagctcttgtagcattgattgtgctccgttcgatttcattttggtgcaatccctagcactctaatttttcttgcttggaataaatggtgtaattattagactttatttcagttattaaacttacaatgatcgatagttatagttcagtacttcggttaccctgtttcactgtgctgttttgacttctgttatagcatgctgaaaactgaacttgccaaacaggcaattgatggggactttccttttttgagccagcaattataaacttataattattgatagcaaagttcagtattccagttactcaatttcatactgttcagaatactggctaaataagtcaattcatgttgttctagtcttgtgaggcttccttttctcctgttccaaactattgtcacggttttcctcccgatgtgcaaacattgctttgttttcacttaaatttatttgactcatcttgtatggttagttacattttaatatggcttaaaaccataacggatcattactgcagctttcttatgaggattaataatgggagaatgaagatgaggaacaaacaacggaaatcatctgctctcaactttgatgcaggatgccgatcttccttgtcttttattgtatggagcttggtgggagttgccctcattgtttgcttcttttctgttgtccgtcaagcagacactaggcagaaccatatttatttcagacatctatctgctaccagagagttagaagagattgaggaggaacatttccgcttgccacctcctcacaaggttaatcctcgtgcagtgaaacggcgggggcctcgcaaggctccaaaggttattgatcaatatctggatgagtcatcagcagtgcatgccttgttcttccctgatgaaagaagtgcagtgaacccaacaaaaggtggaaatgacagtatgtacttctatcctggtagggtgtggctggacactgatggacatgccattcaagcccatgggggtggtattctgtatgatcatatcactgccaaatactactggtatggagaaaacaaagatgggctaacctaccaaactcaccccaagagtacatatcgggttagtataaattctagtataatatcttccttgttttagtgactggttatcttagcaatttgttctgataccaaaaaaaaaaaggtacaacaatggattttgagacaagtctgtggctgattggtccttaagtacgtatgtactgataagtggttgtctttataattttccaggttgacattattggggtaagctgctactcatcaaaggacctatggtcatggactaatgaaggaattgtgcttcctggagaacctactaatttcacccatgaccttcataaatctaaggtgcttgagagacctaaggtgatatataatgatcatactggacaatatgtcatgtggatgcatattgatgatgcaaactacaccaaagcatctgttggtgtagcagtcagcaactctcccactggtcctttcacctacctctatagctttcgcccacatggatttgaaagtagagacatgacaatcttcaaagatgatgatgggtcggcttacctcttctactcttctcgtgacaatactgagcttcatgtcagtccattgacaaaggactatcttaatatcacggtagcaatgaggagaatattaataagacggcatagggaagctccggctgtcttcaagcttcaaggaacctactacatgatcacctctggttgctcgggttgggctcctaatagagcattagcgcatgctgcagaatcgatcatgggcccatgggagacattgggcaacccatgtgttggaggcaacaggtttttccggttgacaacattcttatctcaaagcacatttgtgcttcccctccctggcttgcctggtacattcatcttcatggcagacaggtggaatccttcaaacttgaaagattctcggtatgtttggttacctctgttcattgggggattggcagacgaaccgttggattacagttttggattcccggcatggtcgagggtgtccatttattggcacaggaaatggcgcctacctgaaagttggaagggttatacctgaattttgccctacgcacatgaagtacatacaaaaattacagatgatagatgcaatcatggaacagacatagtttgaagagtttggtgattgttccgaatatttcttgagatatctagtcagtgctttcgtaggcctttttgtaacgcaaaaatagtctgtcaagaaaaattgtataacagtgcagctctcaaaacaaatatttgacttgctgtaacatcctccaaaaagaaagttgaaatagcttgagcgtgtgttcatcccgagattatgctggtaacaactaacaggtagtagtgtttctagttactgtatccgttacatgattgatcccaatgaagcagaactacagttacgcaggcacgcttgaatgtcgaacctgtgatcacacatcttgtttaacatccattttcttcgaaaactcaactgattgaatgcctgaatctgataaactagtctcgctggggattgtttatgttgacaagcagccaacacacatgaactaattcatgaatacttgaagccgatggaaacaatgttccatacttcatagttgcatgtgctactttagtacttaagtcatgtcaaaatattgtcaacctcagaaagaattgacatggaacaacagatcacagcattaacaaaagaacaacaaatgactcggataaattccgttggtgatctaccgcttaagaatctaccagattgggaaaaacaaaaactgcctgttaattgctaaagcaaaattttaagcagtatatgttgagtaccagtgccataatataacatcatttccccaaaatagctagagctgtttcctcttcttggtctttgaccaactagatgcatgtttcttcaatttgtgaagtattgttctctcgctcacccgcagcaccaaagaatgatagagattcctttcgttgacagaagagcatgcttgcagtttttgcctgtcatcttccaaagtgtttgaaccatagaggctctccctcatgtcaacaagggatacaagtgcagaacaaacgctctcattaagcaatagcttcttaacatcaggcaatttttcaagcccgctaatatctggatgttgattggagcttgttactctgacaaccttaagcacactactaatgctgtcgacctcatcatcaccaatcagatcatgagccacgctggccagcttgtcataagcatcagacttcaaggagatgatataaagcaggatcaaaagttcaagctggggctctccatcatatgaaatctcaaagtagtcagcatcttggctggtgcaacctgaatagcccagattatgccagagtgatacccttgctcttgcatatcgacgggagtacttagaagagcaccacttagtaaccagagctaagtcgatgttgacgatgtcatatgagttgtccatctctgtgaagccatatcgatgaagcaaagcagcatttcccatggtaccgtatgtgttaaaaacctacagtggaacaagaggaaacataaagttgcctcaaaacaggaacctaactgatatctaacagtgatacattaagcaatactttggacccaaataaaagatggtaagcacacaattacctcctccccttcattgacatctctcacaacaatcatttccaaatcttcatcgtcatctcctacatagtatgaacaaaacaaccataatgagtgaagctcaaaatcaaccaagtacatgtctaaataaggtctaatgatgttacatgcagatggtcatggatgtaacctgaagggatgtcggcagaattttctatagttgactgttcatcagcagaagcattgtttggatcttcaccatcttcactatctgagtccgaggcttctaacactgaagtgaagtggacatgttccccaccagtcttgtggttaaaactgaaacaaattggatggagggcatttccatattaacgctcagacttaagaccagcacaaatacatcatcacctaagtatgtgcacacctgatgcattgtttccaaataaccaggtaaacgagaaataatctaattacatgagtagattgtaacttacaggtcagccaggggaaccattccagacccatgatagctatctattcggaaggacctcgacgaaagtagactcttagcagagaaataattctccaggctaaaatcatctgggtcaacctcaagttctcctgacaaaatgagtggctcaatacactctttccagtcctcacatatgaactgcctgtcttgcttcactatctgcctagaaattttgccgtttttagagccatcttagtgatcagccaataacgcaatatgaaacatgaaatgtgtgcaacaggaaagtacatcatatgcataattagctcgcattatgctgatttgaaaaggaaaaatggccatagttgtaactccagggagccaaacattgcaagatagatcaatttcactgcctaccatcgaagcatcaaggcagatacaaatcgtggaagcattgcaacttgttactacaatagaagggctcaccttatcgagctcggtgccggccaggaggcgctcggcctcatcggcgggccagacgagcggcacgggctcccgctcggggatcaggcggaggtaggcgtcccacggcgactcggcgccgcgcgcgcgctcatacatgacggcgacggcgagcgcgaggggcccgccgagctccgcggcctcgatggcctcggcggcgccggaggtgcgcggggtcaggcacgcgccccgcgggatggtggccacgaggtccccctcccggagcgcggcgagggcgcgcacgtagacgccgccgccaccgtcctcggcggcgtcgaggcggagcgcgttgctgcagacgacgccgtggtcccgcatccaccgcctgaaggcccgtaggcggctgcgcggtcgcggaagggtcacggatcgtagcgcggcgggggagcgcatacagagaagagcaaagcagaggatcttaccgtgcggtggaggtggaggcggaagcttccatggctggcggcggcggcggcgtcgcgaactcgcgaccaggttttcgttgcggaaatcggtgaggcagcaaccgcgctgcaggcccagcagaggcccaccaaggcctgcaacgcgtgtatgttaacaacccttttctctttttttttttaaacacgtcaatatattagaaggaagcagagttatacttgcacgatgtaatcggccagaggatcattgccacgaaaaataggaaaaacaaaagactgttaagaaaaaacgctactcttatataaagggaaaaataggaaaaaaaaaacaaccctcttcttctaaactatgtaatctcgagaacaacgaaattcgatacaatctcaaaagaaaaaaaaagaaattgaatgagaagaagtagaggaagtttttaaaagtgaaagtgaagaagaacaagcgagagagagagatagagatcgacgaggttgaaccaaagctgccaccgctatgcctcgttaggattggtgtatttgcttaccaaggacttgcttgagaagcttgatcatgggctacatcatgggctgggctaaccaatcaacaggaagcctagtgggttcttaacagtgtagtttcccttttgcctgaacattaaatcgcaggtgagagatcggacgggcaatgatggccataattcaagtttggccgctgatcccaattgatttttgccagcagcgctctgtaatgtgcgtgcacctgctgtaactttctgcctgcaggcggccgcccacgccaaaacacagcacaggttgaggtagtactcgtatttgtttcgctgtctttcgctttgctggttggttcgtactgcaaacttgaactcacaccacaggtggtggctttaactaatgccgtgcatcagttgaacaagcatagagtagttcgcttgctcttcagcttgtcggccgcaattgaaatttaaattttaaatcttaattttaaaattaggtttcgatagtttcatcatatttttttcacgaatacgtaaaaagattgcagtcaatatattagaagaagaatagcagagtttagttatacaacgcaatcggttagaaggccgttgccaatggtcaaagaaaaaagaataaatacagaaaagataagctcatgtaaaaggaaaactacaatcgcaaaggagggtggggtaagggtcccactacactccggcctatcataattttttttcaatcaagacttttaagtcatcaaaaatacagataaaaagttatttacttacaaatatacaattagttgtacgtgaaaatataatcgtaccagcaacaaaagcatcttaatgtagccctttgcatgttctactttcagcagtagccaatgcaagagtactactgcctttagccatctgtgaacaagttttcagatagctaaaaaaaactcagggcccctttgaatcacatgaataaaaaaacggaggaatagaaaaaatatagaattctaacatgaatgtaagtgtaaaacagagaagcaaaacacaggaaaaacgtaggaatgaccgtttgattggaccacaggaaaaactgaggaatttgaggagagataaagactcaaaggatttttccatgaggttctacctcttgttaaaattcctccaaaacttgaaattcatagggttcatttctttgattcaaagggctttgtaggaaaaattcctataggaatgaaatcctctaagggcccctttgaatcaaaggatttatgtaggaatttcataaattcaaattctatagaaaattttcctatttggccctttgattaaaaggattaaagctttccaaatcctatgaaattcctatggaatgacacattgcatgtggattttggagaaaatttactaagagctctaacctcttggaaaatttcctttgagtctatctctctcatccgattcctgcgtttttcctgcgctccaatcaaatgaccgtccctatgtttttcctgtgttttgcaatcctctgttttacacttcaatttctgttagaatcctgtgtttttcctattccttcgttttttctaccctgctatttaaaggggctctaaaattcctataaatttcctttgaatcaaagcggcccttatactttcgcccgtttaaaccagcgctagatctgccaggttgatgctcgcaatgtggaaggtgtaacgcaaacactgtaaatcagtaatgatattacagtagcagtgattaggcgaaagtacagtgctacatgcacgagattaggtatgcatggttaccgaaggtacaacccctgctgcctcctgccagcgaagtaaaggaatcagcaagaataaaggggggagcgcgattagtaatcaccaacttttgcaatctgctgcagcaaatttatacacgctctgtacatgtagctgtggatcagcattaaccatggcgacaagaagacaagcgctagaaaagaagaggaaaggcttagctgttgttgacaatgcgctaattaattgatggatcttcagcaaggcgagctccaaatgcaatgcagccatgttctgatgagatgacgcagtagtagagattgaaggcaaggtcccggatggtagatgaaactgtggcagcagatgtcatatcatttctggattcactcaacaacactgatcaagctataggtgagtgaagcttggaatggatagccaagccagcagctgctcgattttcatgatcttcacacttgcattgcatgctgtgatccatccacgaagcgttatggccgagtgaacacctggacatctagctagctgtacgttagtaggagtagttcgccggcaatctatgcaatgcatctacggtttcattacagcgtcctgcagtactgcttcttgcagcagcgtagctcgatcgaatcgcagtcctgcatgccagggatcgggatggctggctggcgtatcagaagtctagacgctcgagtggcggggaactcgtcgaccgatgcttaggcagagattgtccaggtctccaggaatagctagcttcagaccaggtttctgtggatgagcatttaccggttgtgaaatgctcggggccagccggctgtgaactgtatttgtctcgtcctctatacacctacagtagtatttccaggggggtaaattgactgcctgtagattttggttatacatccttaaaaataggagtatactctctctccgtataaagaaaacaacctagtactattaaaataagacataacttagtaccacaaatataaaaaaagtttgtctagattcgctgctgtattaggttatatccaatctaataatagctttttttaagagagaatctcttatatgccactgaaaattggtcatatcccttatataccattgaaaattggctcttttttacggcattgtttagttccaaactttttcttcaaacttctaacttttacatcacatcaaaattttcctacacacataaactttcaatttttccatcacatcgttccaatttcaaccaagcttccaattttggcatgaactaaacacacccgtatacgtccaaaaaaaattggctcttttcgtgtatgcaattagtccaaatttacgcaccctctcatatcacttttgtctgttgaccgttaactctcaaataaaaaagatgtatttgctcttatgagtatacgacatgcctaacaactcagaatggcaaatacgtctttttacctttggagttaacggtcaacaaacgaaagtggcatgagacatgggaagagccagtttttcctggcatataaggattcttttttttttaatggagggtgcatgacgaaagcaatttggcatacaagcagaagaatactcgtaaaagacatttgatataaaaggttctctctctgtaccataatataagggattttgagtttttgcttacaatgtttgaccactcgtcttatttaaaaaattttgaaattattatttattttatttgtgacttactttattatctacggtattttaagcacaacttttcgttttttatatttgtaaaaaaaattaattaagacgagtgttcaaacgttacaatcaaagaatcaaaatccacggagggagtaggatttgcctctgaatattcccagtcaatccaatccccaatgcttacaccaacaatagctgtagctatgctttatcactgctttcactgtccacacatctcatctctgtccagttcaactcacaagtctgtctccatcactatgacatctcccataaattgcagcaaaattttctcccctctcctttcatcactagcgctattaatttccacagaaaagaggtcatgcagctccaagtcacatttatatgtgcatggcagcagcagcagtaccacctatcccagccactagataaatgcgaaagcctccatggctgcattgctcattgatcatctgcccaccattagagacatcaagaacactctgcactagctcactcaggttgcatccaaagatcacaagatctgaagatcacattgatataaccatgagcagttctgaagaaaggatgttcgagatggatgctgacccaacttcatcaccagaagccagccccaagcaccatcacagtacatgccacatactagaggttgatcaatctgtcactctgggctttcttgtgccattgttcatgtaaatgccttgttagcctttgtttcttgcttactgtgtctgcaaaacacacgtagcagggtctcctcgggaggtgcacgcaggtggagatggagatacaagagagggccatgaagcatgtcatggagattggagaggagaggaagagaagcagcttgaagaggaggctgatgatgaggctgaggaaagatggctacgatgcttctctctgcaggtcttcttgggttgccaccgctgagcatccaggaggtgaagtgtttgttttttttttctttacttttgtttaagatattttttttcttctttacttatcttgttgacacaaaatttttaatgctattttgtccttgttctctgatttctctgttaccatttctgtgggtgtatggttcatctgtaaatatctaaaactggactagttggtctgcagaaaatgctgtcggaacagcatgtttcttgttttggtaaggaaatatgaatcacagaatttccatcttctgcgtgaacttccatggtgatttgctcctagtaactggagtaactgatatatctttcaccggctttttaattatactctttccattctatatattttagttttgtcctaagtaaaatttctataaacttagtttacaataacatatgcagcatcaaatttgttttgttaaatctatcactatatcttgatggtgtacttatttattattataaatgttaatatttttctacaaatttagtcaatgttaatagaatttaacataattaaactaaaatgactttactccgtagtatggaacggagggagtaccatttcacaaccccagtagcagtaaaactttcagaatcttggtactcctacggtgacatacaggtaatgaagcattgacattaattattgacttagatcagtgtaccgtgcatataatcactagtaccattactacccaatcatcgttaatatgctgacattggccacagggtcagcgagtgatcaccgttagcttcctttaatttaagtggccgaaacagtgagctgaaaggttgcagatgcttttgtctcgcaggtgattacgagtacatcgacgtgctcgtggcagtaggccatggtgctgacacgtcgtccacgtccaggctgatcgttgacgtggatttccggtcccagttccagctggcgaggccggccccatggtacgcccacctgtcgagccggctgccgccggtgttcgtgggcccgccggagaagctgcggcaggcggtggcgctgctgtgcatggcggcgcagcggtcgctccgggagagcggcctgcacgtcccgccgtggaggcggcccagctacgtgcaggccaagtggctcccctgccgcggcgtgcaggcatcagcgctgccaccgggcggcgagtccgccgcggcggcgaacggcggcgatggcccgcgggcggtggtccagtggtcggtggggaaggagaggagacgccgtggtggtgggcaccggaggtcaggcctctcggtggagctatccgactccggcgccggtgaggtgagctgagctgagctgtggtgtgcagtgtgccacgatggtggttcgctggtttcattgatcttttttagctcccacggtaaaaactgtgggatcgaggtgtagaaggtacatgtactgcagactccactgtactccagtagtttagaccaggttagattggttgccaaccagtcgggtgcagtcagtgactgttctggtagggccaacgtggtatccagttttgcagttttgctttcgcatcaaccgttgtttagctgcgttgatgttggcatgcatgccgcctgtggcatccggcgccgtgttttgcgttggacattttggaggcttaacgccaagcgaatagctagtgtggtgatcaaagaacacacaatccaaagtcatctatttcaaagtttacaagcatattgtacgtactacaacaactatagtgcaattactgtgatctgtgggtgctggaggtggagtatgcctggtcctgtggaatgacagtgcggagagaggggctagcttgtgggttcttatcgttttactggtggtagtaaatggacgctgtacgccgtatatatgcgcgccggtgttgccaccgtcggcgtcgtatccggcacacggggctccatgcaggaggtgggggggggggggggggttgaacgggagggagtggagctgtgtaaccagccgcagctttgtcaggcttgggtgtgaccggcatgtcatcaccatttcacctcgcctgtacgagtgtacgccagtattgtgtggctgatggaaatgctcttcgtggcgcgagatgattgacctctctactccattgctccccatactgtgcagtcctctactatactatccccatggcccattgcagcttttgcaaggaggaaggagaaaaaggaaggtaaaagaggggaatcctacgcggagaagatagagatatacgtacagtgatctggctaccaataactgaacaacgtgaacacacgtagtacaagtacaaccaggtgttgtgttttccacgcatattttgcctaaccccaacaaacggttgatctactcctccgttttacagttgcaaaacatagtaggagcctcaactgggcctctatggctggaagaaggaaacgctatatctggccgaaagctcaactgggcctctatggataatgagccctaaaagttaggaataagttcactttgtgaccctcaaaagtgacagaaatttaattcgtaaccctaaaccacaaaaccggatatctcaacccctaaactcttaaaaacggtgcaatttgactccctcgacggttttgcagagcggtttcgctgacgtggcgcctacgtggtgatattgaccgagtctttgttccacgtggcggtgacgtggcacttacgtggcattagaattaaaaaatatgtgtgggaccgtttgtcattcacacaaaaagaaatatgcacccactgacatgtagggcccacatgtcagtcatccttccttattggaaaaagtccactttgactcccttaattatcagcagaatctaatccgtaaccctcaaccgcaaaaccggataagatgactccccgaactattgaaaccggtacaatttgactccctcagcggttttggagggcggttttgctgatgtggcgctgacgtgttgatgttgacctagtctccgtctcacgtggcgcttacgtggcattcaaattaagaaaatttatgtgggacccatctgtcattcacacaaagaaatatattatgggacccactgacatgtggagcccacatgtcatcctctctctctcttcttttcaccggtctgcaagggcgagagctggacaagcggcggcggccggcggcaggcaagcgacactaggggtctagggcagcggcagaggcggtcgagggagtggtcggcagcggcggcggtgggaccagatcttcctcctccttctctctcgctcatctctttctcccctctttgtgtggtcggcaggagtggtcggcggcggcgggataacgacgggacggccggcggctgtgtaacgccccgacattcattagccattaacacagctaactcacaccggggtgttatgcattacctgtgatatagtaccagtccaaggatacactagctggtacacacagaataaatatggaatcaaagtaaattactttattacatcactgggtagtagtccttacataagatgccatcatggataggcccatagatgagcaacacaacattacagaaaaccataaaagcgacggcgtagaagcgaacaacgcggagcactaagcgactaagcaactatgcactaggcgaagaacctaggcatctatcttattccacaggcgaggcttggggctaggcacgaaacatctagaaatcttcatactcggcttgctcctacagatactcctcggcggtcgggtcgacgtcttcatcttcatactctatatattattataagggcaagggtgattacttaacgtactcaacaagccaggggaaagaatgacatgtttggtttaaacaataaggctaaggttttatttgcgaaagctgcctttctggcaaagtgatttatttcacaaaactcctagtgagtgagtcaagttttaggtgtcgggaggaggctcacgcctcgacccattccacaagttgctttgcaacaacttgtcacgattaacaacaacaattaatttgtttcctctattagtttcttctcacaacaatacatagtccacacagttatctcagcacaacaacgccatcatcatggccctaacaacatctcggtgtcggacgacaccccaggtcacacagacccgttcctaaccacccaggttagccgtctgccacacaggcggactctggtaacgttacccttcccagtaaccacttcttcacagacatttgtcaaacaaatctacgctatgagaaacaccttatactcgcccttgaccgtgggcacggctgttcgaacagttcattaatctctgcagaggttgcacgctttacccacacgacacgaaactgacattgtttacccgtcagcaacgaaagttcgtgataaggcctttccaaagctaacccatgaaaatcgcatgccacctagttgggctaaaatccatagccgagtatcaggcaatgacaaccgtcatccactcaggaaataccgaggatgccacctactcctaccggtaccacgccacaatagaggcaaaaagacacccatgatgggcaaaaatgtgtaacactccgtctcctcatcctcggcattccacaaccattggcacaccaactcccatgtgaaaacaatttacttagccagaggcatcccataaatatccgtgtggtcgcactgtaacgtgtttggatggatttcccaaaggaatcggtccttaacgataatacgtagccaaaccacaatgactccgcatcatcaccacttttcacaacacattttattttaaacatgtatttggaataacccaagtttcccatacggcaaaacatcgtaagcatggctaagcgaaactacctcggtaatcatataacgataccggtgcaaatatttgtggagttatcaaaggtatggaaacatcaacctatgtaatataaatgcgactattaggttggtccgtcggtcgtataaacgatccgaggcctaaacatgtttttcgtgtatactaagcaatgcatttttcaaacaacatatcattgcaaatataggggcaatgtgatcaaagaggcttgccttgcacagggcgcgggtcttctccctcgaaaacaacgtccggagcttcctcgaactcgggctctaaacgcgaaaaacaaaactaaataagaaaaggcaataaaactagttcaaaacagagaaacaatggttccactgtgtagatctcaattttagaaaaatttaggaacttgaacgggtcaatcggagttacggttgattttctacggattttcaaacgatcaaagcattttctggaaatttatttattggacgacaagggaatattctgttggaatattccgctaagctaacagcaaaaaggggaggcccacctgtcagcggttgttggaggaaaagagacgcgggcccggctgtcagtggcttggagggagtaaaggagcacggggccgggctgtcagcggctcagctcggcctctcttcttcttcctctcgctactgctcggctcggtctgggacgacgacgcaccgcggcggcgagtcccggcacggctaccggcggcggagaactccggtgaggcaccgccggcgacggcggcgctaggaggcgcggcgcagcggctctaggcggcggctcagagagtgatatcgtgagaaagagagagtagagagaaatggagatggtgatggtgtggggaggaggagcttgggttgcttccccttttataggcgagcgacgcggtggcgagctggcgaactaggcgcggcattccgggggtagacggctagcagctagggcgggattccggggcggacgagatggcgacgcgatggcttggcgtcatgcaccggtggcgactcgacggcgaaaacaacggcgacgcgacacgaagtgacgcgcggagagcgggaacggcggcgagacgggggtgacgcacggccgacgacggctatggccgggatttggggcggtagggctagagaggggtgacgcgagcgacggtggcgactcgacgcgagagagagggagagacgcggctcggcggtttcccgggaggagatagacgacaagacgacgaggcgacagcgaagggacgcgcgtccgcgagagctcgggatgggacggcgcggcgtcagcggtggtggcgacgcgacatggcgatggaacggggatgacgaggggtggcgttgcggccgttatccgttggcgtcgacgcgacggcgacgggatggagactcgatggatggagtggacggcgacgggacgggggtgacgcggggcgacgtggctccgtgtctcccggagagggcgcgacggtttttttcgtggagtttggcgcgatgcggctttggcgcggcgtgcggggcggcgctacgtggccctggcacgttgcggggcgcacgggagggtggtatggtgcaacgcggcacgggaacgagggcggaacggtgcggcacttgggcgagacattttgtcgaacacctggcgtgcatgcttgtggctggtctggggaagaagacgatgagcagtgaggggctgggctgggctggcgcaggaagaaggctgtgggccggcctgcttagggggagctgaagagaggagggatggaggggagttgggcctgggagagaaaagagagaaggaggcccaattcgaacagtgagctttcacaattttcaagagatttgtagagtttgaattttgaggagatttcaatggatttgaatttgaatttgacctagggtatcacaggtatttgaaggaaatttctaggagaggatttgagatccatttggcacaaaatcaactaagaaccaaattaactccaatttttaaatgacaaactttttaaataaaagcacataaaatacggatgctacaggctgacgcctccaccctgccgcacagcagccgaccagcctcgtcgcggcgcaccggaaagaaagccctcgccacgcacatcgacgacgccgcaggtgcccatcttgaggtacatgatgggcccgtacttgcgcgctagcgacgccaggtcggcgtgcggggctgggccgacgagcgggagcgcgccgaggacggggacgcccgggggtcccaaggggaggcggcggccgccgccaggggagggcgggcggtaggagcagagggagaggttgaggaggaggcaaaggaaggcggcggagagcacgacggggtcggtgcagagcgcggcgagctccatgcatctggagcgacgaggcagggcgtcaacgacgccgtggggagggatgggcgaggacgtcgacgactcgcggggggagagaaagagaggcggcgagggggactccgctccaggttgggtgaactctggccgggatggggttggaggaggcgccagccaccgccactccggcccccgtccgccgccgtcgccgacgatctagcccccgtccgccgccgccgacgatgacgatctggcccttgctctggccttcgcccgcccgccctcccgccgncgntagcccccatcctacgctcgcgaacagaaagagagagaaagagagggggaggttgaagaaggtagataagagaggatgacacgtgggccccaaatgtcagtgggtcccacatatatttttttaattcgaatgccacgtaagcgccacgtgagatgaagactaggtcaacatcgacacgtcagcaaaaccgccctccaaaaccactgagtgagtcaaattgcaccggtttcaatagttcggggagtcgtcttatccggtttcgcgatttgaggatcacgaattagattctgtcgataattaagggagtcaaagtggactttttccttccttcttcctcctccgtctctcccttctctttcgttctctccccttcttccccttcggccggcggcggggcatgggccgcggtgtggtggcggctggcgggagctgaaccggcggcggcagcgggagctgacgcgggagctatgttagaatctctcctctctgaatgtttaagtactaatcactagcactaacataaacacttgtatttactcggtggacacaaacacacaagaactgaacaaaacacacaggcttttggttgatgtggctaatcacaactcacaccattttcttcattacatagacttaagtacatgcaaaagataaggatcagccaactaatttggccttgactcacgccttactccaacatgcagatgccatgcaacaaggtaactagctagacctattcttccgccacaaaatcacttcgtggccttccagcttgagctgcagctctgcatgcatcttaacacatccaactaaatgcttgcatgcagccgctaatcactagttctacatgctaatgcaacagcctttacacatcgtagatatcggcacgttcgtccggccgcatcgcacagctcacagcaagcacgtttcacacgtactggctcggatcctttgctgccacacactactaccttgtgcaaaacctatacaaaccaaatgcatacactctaaagacaagattattgctaacaagctagctggagcggcggcggcggcggtgggctggaggtgatatgggttctggagcggcagcaccgccggtgtggtggacggagttggtgcagggagctcgtccacccggtcgatggcgacggtgatgatggagacaagggagcggatgaggctgggcagtcggtgctgcgacggggctgaggctgaggctgcggggggagctcgtccttcgaggcgatggccgtggacctcggcgtgatgaagaggtggtcgccacccctcctccggcggtggcggcagtccccggagtggaggagtcgacgatagtgaggccagcgctcggcgagatgggacctgcgtgctggacatcaggctggccaacgccgacatgcacgctggcaacatcctcacctgcagagacgaacaaggccatggcctctccctggttacaatcgacaatggatactgtcttcctgagagtgtaagcactgacgctgatagattttcttctagctaattgatttccattttgttcgttggtgatcatgcatcgatcacgcatgtgcagtttgaggattgcacattcgagtggctctgctggccgcagtgtaggcagccattcagcgaggagatggtggagtacataaggtcactggacgccgaggaggacatcgccattctgaggttccatggctgggacatgtcaggcaagtgtgagcgcatcctgtgcgtcaccaccatgctactcaagaaaggcgtggacacgggcctcgccgcgttccacatgaggagcatcttgtgcagggatggggccagacggtccccggagtgaggagtcgacgatggcgaggccagcgcttggcaagatggggtcggcatcgtggaggaagtcgaccggcgggggttgtccttagcgtcatcgacggccgacgatggaggctgaggtcgaaggcggcggcccacacactggcctcgctcgtcggccgacacagaggcgccaatgctgaccttgttcgccgccgccgccgccgctccggattcagcttgggtgactttgtgttggcatgtcacaacgtgacattgtgaggatctctgccatcaaaaacacatccaacagctcgtttggttgggcccgtctgcaggtcggaaatttagccgccgatccatccgtcccgcgggagtcggcgcccgccgatccaacccatcccgtttcgcctcgcccgggtccggccgtcgccgcgagccagcgagttgttctgaagaacaaatcaaaagcaaactccagtcaggatgcaacaaacagaagctgtttgatgtccataggctgatgcttgtgcaggggcagtgcggccggcaagggcagtgcggcctccaggacgtcccctcctccacgcgctgagctgcagatcacagaagaaaaatgaggccggtccgccacggctgcagatcaccacgactgcctggactggctcggcagcctccatccgcagccgccaccgcacgagggtaggcctggtggccggccgctgctcgcctctactcgtgccggcagggccactgcggccatctcgacacgcgcgcgcggcggcccacggcggcggccccactggagtcccgcgacgacagcccccttccgagcggcggcaccggcccccttccaagcggcggcggtggtggttctgggggattcgcgagcagcacgctcgggcaggaaacggagcaatgcggggtgaaaaactgaggcctgcaggtgggccggcgcagaggacccttggatttattttcaacgccccagattgctctaatgtcacaccgtgccataccatggcaatgtcacagaatctgagtcccgccgctccagccctcgccgcgtggaagagggggaagaagaaagagggaggagtcagtgggccccacaaatttttatgtgtgtgaatgacaaacgagtcccacatatattttttaattctaatgctatgtaagtgccacgtcaacgccacgtggaacaaagacccattaatatcgccacgtaggcacgtcagtgaaaacgccctccaaaaccactgagggagtcaatcacttttgaggatcacaaggggaacttattcctaaaagttactactagtttgagggacaaatgatgaactttttcccgtttggctcaagcccacgcgaccatccaaatccagttggaacgttatcgcgagtaacgtgcggtgcggcccatctgtgtgggccgtggagcgagtagattgggcgcggattacgtgcaggccgggcggcctgcttatgcgtgggctatcggcaattcggagagcttcgtgccatcgtaggatggccccggagtgattacctgcgctggcccgcgcggtgcggagaggatcggaattagatatggcgtcaaacgccgtcgtgcgttgcggactcgcggtcggcaggcgggttgcgcgtgttccgtgtgggaggccttgctgcgtgccaaccagcg

SEQ ID NO: 10388 - DNA, 92798 bp, Oryza sativa
  unsure (1)..(92798): unsure at all n locations
ctattagtttgcatcagaagaacaatcaaaagaagccgattgagtttgttaaatagctccatgtgtttcgaatgcaatgataatggtgtttcactcaacatattgatgtatattgttttatttcaggtatttgttcaatatccataatcagaggaagctgtgccttgagtttgagtatttagcctagtaggtttagaagcactacagaaaagtaatgtcttttatcaggcgagcagacccgtcaaccacttacgcagataatctttacatacataaatttggcactccaaattcaaatttcgctgcacgaagatatgcgtccgacacacagctgttccgttatgggcctgaaccatacaatcctgagaactccttttacaatcaacaggcctcaccaatgccgtacatggtaacagctgatggccattctccatcttctgcagacaattcctgctcagatgtggcaaaagactcaccattggtgtccaatgtatctcagcagaattctcagtctatatcagacaatcagagttctgaacttgaagtagagtttgatgaagatgatatcaggatgaagcttcaggagctggagcatgctttacttgatgatagtgatgacatcttgtatgagatttcccaggcaggtagcattaacgatgaatgggctgatccaatgaagaatgtcatactccctaactcaccaaaagaatcggaatcaagcatcagttgtgctggtagcaacaatggagaaccacggaccccaaagcagttgctctttgactgtgcaatggcattatctgattataatgtagatgaagcacaggcaatcataacggacctccggcagatggtctcaatccaaggggacccttctcagaggattgcagcctatctagtggaaggtcttgcagcaagaatagtagcttcagggaaaggcatatacaaggccttgtcgtgcaaagagcccccgactctttatcagctttcggcaatgcaaatcctctttgaaatctgcccgtgcttccgatttggtttcatggctgctaattatgctatacttgaagcctgcaaaggtgaagatagagtgcacattatagactttgacattaatcagggcagccagtacattacactgatacagtttctgaaaaataatgcaaataagccacgtcatttgagaataactggtgtggatgatcctgaaacggtacagaggaccgttggcggtttgaaggtcattggtcaacgtctagagaaacttgcagaggactgtgggatatcttttgagttcagggcagttggtgctaacattggggatgttacacctgcaatgctagattgttgtcctggggaagcactagttgtcaattttgcattccagctgcaccaccttcctgacgagagcgtttcaattatgaatgaaagggaccaactccttcgaatggtgaagggtctgcaaccaaagctcgtcacactggttgagcaggatgccaataccaatactgctccatttcagacaaggttagtgatgtaaaatatcttcttaattctttagatccactttagaatgttccagccaaagcttaccttttatattttgtctaccaacctgtgaatgtactttcatcgccaactactgactccttatgaatcatgatagcatcaaacatctgaaacatttcacctttggtaggttccgtgaggtttatgattattatgctgcactttttgattcactggacgcgacacttccaagggaaagtccggatagaatgaatgtggagcggcaatgtcttgctcgtgaaattgtcaacatcttggcttgcgaaggtcctgatcgtgtgaaaaggtagttcccagtgctattttctacttatacagtccactctcttctttttttttccctgaaaacatgcccaacctgcaactcccaaatagctgaccgtgaacttatttatgctgcagatatgaagttgctggaaaatgaagggcaagaatgacaatggctggcttcacaccatgcccatttagtagcaatgtcatcagcgggataagatcgttactgaagtcgtactgtgacagatacaagttcgaggaggaccatgggggacttcacttcggctggggagagaaaactctaatcgtctcctccgcatggcaatagagcttacagaatgagttggcattagtcttgctgttatttaggagcatctgatgcagagactgtaaanaatgtgaaccactgaacttgtcaactgatcttacctaatcgtagatgtctgcttgtcagaataatcgagttagttgaactatgttgtattagagaattggcacatgatcgtgttgtattctggggtagaattatcttgtcgactctgcttcatgtataaaattatgtgttgctagaatatgccatatttatcatcttgggagcctaaatggtatttgagcctgtgttatgacaaatcgatcgcaaaatcttatcataaatccagtcatgaaaaagaaagcaagctcacaagtgttgcttacatagatcaatggaaatatttatatataccagaatggcagaagaaatcatttgtttatcgaacagaccgatcctgtaaaatacatcaattttctctacaacatttgaaaattgtacaatgctagtaacttgtataagcttaaaagacaatacatcgatttttttttcctggagggacaatacatcgattttctctacatcattttgaaaattgtaaaataacatgtaatctgggtgaccagactctggtagtttctgagagtatgaatcgtgaacacaatatgctatacatgatatgtgcatgtcaatcttatcttcagtggaaagcacaatcttatctgctaggtaaggtgtgccatgtattcaacgaactaccatcactgccaggttgcgttttcatgcgtttagtggattccaaaagtccaacaagggacgggagaggtcgtgggacagggacattccttgatctgtacagcctcttcaaacttgcattcaagcatttcgatgatccagtaacgcacaaggtacccctttcacaatctgttgtttcttctcctctgaccatgcaaaggtttgaactttcagcaagatttgttgattctgactctataacaacttcagacttttcaggtttatcagccaccggtgacaaactgcactcaccaataggtgaagaccggattgagagtttttctaattgccttggggatgcagcacgctgacaatcatcttcagatcctgaataaccccttctgaccatgcaaaggtttgaactttcagcatgatttgttgattctgactctataacaacttcagactttttagggttatcaaccaccggtgacaaactgcactcaccaataggtaaagacaggattgagcgactttctaattgccttggggatgcagcacactgacaagacgggtcctcatcttcatatcctgaataactctgttgggacttcgatgcttgcactatgacaaaatcagtccgtgaatttggacatgtttcaacttcactgctaccatcacagatcaaatatgctgttgaatatgccctggcttcttcaacagcaatgcgctgattgcacagttcttctctcattatgtcaatttcttcagagccaaatcttgctcttccaaacagtgtaatatctggttcctgaactggaggggatggcatgaacttcagttcaagcgtgcagatatcaaagtctgtacattcttcaccactaggagaggctgaatgatcatgatcatcatcgacagaaatcgagtgatcttcatttgtgtgcgtgtcggaatccagcaatgtagaaggggaggacactgactttcggagaggattcttgaatatcttccacagtggatcatcagcagttaagcaggtcttgaaacattttttctttacatagctcaattccatggcaaagcatggtggtgttgttgaaattacccattgaggctggagaagttccaaggcctgttctaactcatcacgagaggaatggatggagaaacaaatgtgccagaccccacaaccatccagcacagcttctgttaggctaggtttctggctttgagcacagtgcgcataccactgtgttgagggacggataaatagaggttcaggctgaaggctagcccttgcctcttcaatctttgtacatgctttgtcatacaagttttggaatccaagaatctacaaagtaagaaagttgcaaatgaaaaagaataaaatgaacctctccatgcaaaacatagcacagaccagactaaaatgaacctcttagatcctgtactagccaaggttgattataatcctgaatgtactgttctgttctagcaaacaattttagtatgaaatgtagatagagaggctggaattgactttatcggtttctttcctttttgcaaggagactggagagtgtgctctgtcatatgattgttcaataggcctggcagcaactaattttgcttcagaacaacaataggacaaaggtcacatacagtgtgtactaccatgagcatagactatgtactcatagttagggattggatcagactgggccaaccaattgtttagttcctttccaagaaaatacttaagtgcatgcgcacaagattattcactacttgccctttatccttgccagacttctatcaatattttttgacgaaacagcagctgtcccaagatccctctaaatcgcaagaaaggtagtaaagtagggcttggggacgaccacttggggtcatatgtgaaactgggtacccacactcatttttgccgggttggccgaaggattaggcaagattgaaacagttacaacatcgacaggatgctgtcgaaactgggtacccacgctcatcactacatgtagatagtccatgcagtataaactataagccatctttcccttcacatgcagggttccaaaatggagataatggaagctagtggagtgtaaaaaaattacaatggaatttattacttggactagcctaccatacctggaatcgacaagatggatcttcagtgatgatttctggggctatgagagatagagctcgaaaacagtccgagttccttctcttgtcaacataaatctttgatccaaatgtccttgacacctcaattaggatctcttcgtgaccaagaagatcacatgcaagatagacaaatggagcatgaggatgcttccatatgcaagctataacctgcaatcactgaaacatttctcaatggtgaccatccatgttgtcatatgcacactcctacagttaccaacaagcacatttaatctaagcggagaggaaaacctgctgaatagctgactccttgcttggtagcttgaggaagcatttggaaaatgtgcagtccaggaacacaaagtctaaacggcaaatgttttctttccctttctttgctatgtacttcagtggcaaattatgtacacaatctggcgtcagccgacagtcccccgtgtgcagaatgctaccgaattgaccctcgaacaagaacataaccgcccctggtatcacagaacacgcaagcattagccgtggtcaacccttcccatttctcaatatacaaattcaataatgttgcgctgaaaatggcctcatagaacgatgaatcactccgcctgaacagcggagcaaaaactacaattcccatggatctgttaaaaaaaatcggccgctgaattgaacaatcactcccaccatcacaccctgatccctgacaactaagtaatctactatttctaccagcaaattatcaacttatatatagcacggtaagctgtaacacgacggtatgcagaactgaagaagcggaaccagaattaccagggcagtgattggcgtcgtacgccgtgacggagaaggccccggcggggtcgtccaccaccaccgtcttccccacctccatctccacgaactccccccgctcaagctgcgacaccacgagcgaccattcgattagcacggcacccaccaccaccacacgggaacagaatcggcttccgcgagtcgggggggcagttttacccggggaaaatggcggagggcgaggtcgagggtgagccgcgtcgcgtagacggcgccggggcattccccggagtcggcggcgccgccggcggcgacgaggtggtcccggtgcgcgtgggtgaggaagcggtggcggcggcggcgggaggaggggccccacgtgtcgacggcgaaggggagccgccgcggcatctctatcggcatcctcccgagaactttccgaaattacagttcagtcctccgctcccctgaacctcgccgcctcgtttggtggggccatcgggttgagttagttgtgcccgtttatatacccgcgggaagtggcgccttccagaggaagaaaggctaacgggctaatggatgataacgggttttatttttttacatccatccatgacccgctaataagtagtaccagtctgattttgatgggcccaagcgttggtatgggccttcacaaaccggtggcttgatacactttcggcccaataacagtacgacaatgcaatgtgagatccataaagatgcagcccaattaaactagattttttttcttctttttatgcatttctgctcggattcttcttcattatgggggcctggggggcatacagtatcgtacggtagaaaaaaaaatgggaaatggcttcacgcttgcaagaacagaacgggaaatacagtatcatactctctcgatcgggcacgagagacagagatcagtaaaaagaaaaatcaagaaaggcgacagcaataatctgcttaaccactaatcaatccagcagcagcaacaatgctttaagctgcattcttccgtgcgtgtcggccgggcgccgtgcggggccccgaacgcgtcacacctggctggcgaccttgtcgtccgccgacttgccatcggcgtcggcgtcggcgtcgtcggcgacgaccttgttggtcttggcgtcggccatctccaccgcggcggccgccttcttcgcgtcctccacctcgtcggcggcgtcccccttcccggccgccgccgccggcgtggcccccttgtggttccggtagatcgcgtagaggatcagctgcatcaagcccagaaagctcccgcatccattggggatctgcacgtcgtacaacacaacgatgcaatttcgtcagttaaactctttgcgtgccattcgtgtgcacggctatagctgctactcctatgctccctccgtctcatgaaaaatgaatatgtggcatatcctaatactacagatctggatatatatatatccagattcatagtatcacgaatctacgatgcgtcatatctggttctatatttgtttttcatggaatgaagggagtacgtacgtacgcccaacatgtgcgcgccaagttggacgagacaccgaaaggataaccgacgccgccggccatttcgcggcattgagttgcaaacagcgttgcttgtgcagtgcagtgctgtgcttttgcagcggtttgcatgtgcccatcagacagtacgatcaatcgagatccaaacaaaaacacaaaaaggcatcgatcggattggatcatatgtctcgtcgtcaggttacgtatctttctgtaatcaacgtcgacaggttgcttgtaggcttgcagcaattgacagcgaaaagaaagacgatgagtaaattaccgcgatgaaagggtcgcggccgagcaggccgtagatgaaccaggaggtgccgcacaggaacacggacagggagagcaggaacggcatgaactccacgctcttcgtcttgatcaccagcctctgcacaccggagtcaattgatcagcgaatcagattatggttaattttgttagttattactccctccgtttcacaatgtaagtcattctaacatttcccacgtccatagcgatgttaataaatctaaacatatatatctatttagattcattaatatcaatataaatgtgaaaaatgctagaatgacttacattgtgaaacgaaagaagtactatactagatcatttgtgtggtgtgtactgtcttaccatgatggagagaggcgaggcgtacatgcagatggagaagatggtggcggcgaggccgcagaagagcttgcggccctggccgtgcagggccaggagggagacgagcaccaccatggtgaagatggaggtgacgaggcccaggagacccatcatcttcagcctggccttcctctccgcgaagatgaggaagatcaccacgtagatggcctcgatcaccgaccccgtcccgttgatcgtcgtcaccaggatgttgttcggtgacacgaacggcagcccgtaccttcaaccaccattcatcgttcatcacaaaccaacagcaatgctgtaattctggttttctttaaaaagatatatatatataagtttcagttatagttatagatcggtagatttcagactgtatcttgtcaacaaaactccatctggaaagaaaagttttgactcccagaagaaagcatgtgggcatgcacacacaagagcggaaaagaaggagattttcagagctggtgcgatatggtctctacaacttttatgatattgtgctttgccttgatattttggtactaacactaacctgcgaagaatcgactcgcggatagtgtttctcacctgccaaacacacacacacacacacctaaaatcatactggcccaaaaaagctcacccactttttcgagctacaaacactcgaacgtgaggctgcatgtgcttgcacaacggcctcttgggcccacatgtcacagccatcctggccatgccggcagcaagggctatagctgctgctgcacacacaccagtgatacagtgtgtgtacaagttccttcgcaggagtcactgtcacagcgatggcaggtgggtccaggagtagctttccatcgacgaggcaaattggacagaggctacactaggagccaaccactgtggttcccatcaacagtatcatccagtgtttccggatgaattacggcaataggagtaaacatcaagttaactttcagtaatcagtagtactattactgatgagtcaattactaggttcactaaacttgctcatgttgtggagtagtgtgtgtctatcgagaatcacacgaaacttctgagagaaaacgtagtgtaatgttgtggggggagaaatgcagatggtgtggagaggagtgtgaggtttcagttagttaccaagcagatagcaggcagttgagaagtgtcatgttgtaaggcacgccggagaagtcctccgttgatctcttcttgatgatcctccagaaggtgacactgtaaaatgaaaaagagccatcaaaattttctcaccggtcagaagaaacaagcggcattcgtgcgaccgatgcacacgcatcaacgcatgggtagctgccggtgaggccggcaaacaagcaagcaggggaaaaattgcaagattttttaactttgataacttcttttgcgaaaaaggttgaccaaatatcatggtagatgaaactaaggagcagagcaagctgacactctccatgaacaaagacactctactatgttagctccttttttttttccagacacagagactatgagttacaggtatcttttgtttcttcttcccttttcacttgtttttttttccttcttcccacctctgctcacacgttacaagacctcacaaattgggataagattgacgataaggctaggcagcaaggaatcagaaacttacactggcgaaaggaacaggaagagagcgatgacattgcctggaaaacggagccaacaaaaaacttagaacgaattcacagtagtgtaaaacttcaccaaaaattaaccagcaaagtaggtagctctaggagcacccatacaccttcatttcttcgagtgttcgaagatgggagaaacaaatactacatgcacatatagacagataggaaattaagaacaagctgcagctagccatggcggcacactcaccggaaactccaaagaagaacctcgcgatgtgctccatttcgatacgtttatctctcctccttgtggctagaatagatcgcttctagctctcccgagagtactgcgctgaatggatggctggctttgctagcttctcagcggtggactactgctacacaacactacaacacggagctacttctaccaatgcggtgcctctgtgtgtgtgcttatataagggagtggagatatacagagcaacactggtgtgtagagaaatatgccaagctttttttttttaacgaaaaacagcactagagtgacttttcattgaacagggcaggagaaaatacaaacccctaggggtaaaaggaaaacggagaaccactatagctgtacactatacatagtgcgggattaactcacgcaaccgcttagctcctgctaaagccaaaaggcttgcctaatctttgattttcgttagtaggaagttcgttgccaagcttaaacagatgttgtttgaaatacgtacgacgataaattttgctcctaatctatgtgaagacagatatcagtaaatttgtcggtacttttatttcattgtgtttttagtagttctgtaggagcataaatatagagtagatgtaggaagccacaactattttgtgaaaactatcagtacactagtacaactttagctatgcaatttcatagaaactgcatcgatgataacatgatttaaacagaaagatgcaactttatatgtccaatatatttgagcccacacgccatacacatatgcaatactcgtgttgttgcatgtcgggtttattatgtcatacacacgtagaggatggagttacgattttcaaataaattattgtcattttccgtaatagctcgacaaagttgtaacaaattgttactttttagcctgtgttcagctgggctaggctgtggtagcagccagtttgaactaccgcagccgcagcggctacaacagtaagtgcctctgaataaagccttaatcatgagtaaattgcgttgatgacatacaaacttgttagataactatgatttagtacacatactagaaaaaccgtgtggcttcgccacgcatggtaaagtgaacctagctcattcgactttagtggagtaactaattagggcccctttacttgaaagaaaaatataggaacttttattctgtatagaaacgataaactttgctataggaattttttctatatgattctttgaaccaaaggattattgaaaactattgagtcttatcaaatttctaaggaatgcccaaattcatacaagttttggagtatttttaacatgaggttcaatatcatgcgaagtctcttatgagtttatctctctcatctaattcttgcatttttcatacggtccaatcaaacgattatttcatatatttttatgtgttttataattctttgttttgcgcttgattttttgtcagaattttatgttttccctattcatccctcaatcttcgtttcaaagtagccctcacaagacatatataggttgcattggaccgagggagaacagagaaagggacaattttgtttgtacaattgtacccctactttgatgtcaataccgattttaccctacattttagggttgttgttttttgccctatttttttcaataaatgaggcgtttacccctgtttttgatggaagtgagtgggattggacttagtgcggtaaagaattagagaaagaaagagataacgattttttaaattattgattgacccttttacccctagaaaatatccatgtaccgcttggtgtccctccaggcttgggcacttggcatcaactcttcccttcctgaacccgaatccccgttgtgaaacagtggcggcagtgtccgtgggccggccaggcaacggggacgacccgagcaagtgcaggccacctaacccagttgcagcgtgtaggaggaggctaggcattgtacaagaggccatggtagagaggaggacaatggcggctgctgtagctcagcgtagggaggaggtgcggctgctcgacgtgtcgaggaggcgacggggaggaggacaacaggtcaacgacggtggtggtggcttgatgataagatgaggcaacagcggcggcttagcgcgaggaggtgatggtggcggctcgacgtggggaggacgtggtggcggctcggtgggaagaggaggcaacaacggtggcggcggtttatgagaggaggcgacgacgacagcttggcacaggtaggcaatagatttgcttgacttgtttgtttttctcaagatgtcaaactttgaagcaaatttttgttgatatttatgttaaaattatcatattggtaaaagtttatcgaatttgcaatgttcatgtgctaaatgtgggcaaattctcaatcatgaacaaaaacaggggaagtttgcaacatgagtaagggtattgaatgccttctcgctaaagatttaacatcgttaatctgtccatcaaaagtagggactaaatttatctttatttcaaaaaaccatgggcaaaaacaaaaccctaaaatactgggcaacatcaatattaaacatcaaagtaggggtaagaatgaaattgccccaaagagaaaaggttatatgatttctatagaggaaaacacaggaaagaaataatataaatcacatgaatacggatacaaaataaggaaacacaataactgtaaaagaatggatgtttgcaacgtaggaattatagtgggtgatttgattacatcctgttaatcctcttttagtctctaaccaaagtatgtatcattacttctttaatcctcaatatccggtggtaggaggaagcaatagctgcctgagctttgccagccgtacggcggcaacgcgagaaatcacatagcctgcacgcgcgcaattagcaggatcgagccgtcccgcgaaaccggcgttgccacgtggcacaattcttctttcaattgtttgcatggaattcgtattataagatttgtaaaatgctcattatgatacacatatttgtctagtgcataagaactagtacaaaacgatatattgtgactaatcatattgaattagtaaaatgtctgcacgcacacatgaggacgtgagatatgtcgcatgtgtaaataattaacctttatacataatatttattttattattttattatattttttttaatatgtataattaacatggcttattatatgtttgattggacatatgtatattatatgtcttgacatacaagtctacataacatcccaagcaacatccaacttattaaaattagttacgacacgttggttagctttagtttgtacacactagataacttcgtgaccgaagtgagcgatttacaggttcatatattaaatcggacctaccttggaagttcatatatcagtagtgtaatttactctttaatcgtataattgttctttttgtagaaagatactcataaatatttcatttatagaagtgatggttggcgatatacgttattgacagtgtccatgtctagagacggtgagaactaatcgcaaaaggcaaaataaattaaaaagtaaaaagaaaatgaagggaatggctattggatgaatgttcatctgaccaacctgtaaacaatatgttgtctttcttatctacacgtttatttataaaagcttctggcagctgtaacttatctaataattataagttttcccccaaacaattcagatcatcgcctatgttctaatagtccggttgtataatctagaaaataaactaaaagctgagtttagcagcttctccagattttcagaaactgaataccaagatgatctactcaagtaaaacctcagctctcctactttcctccgcaatcaccatccacctccaactcaatgccacctccaccagtactactgtactagtgcacaccccttctccggctgcagtcggtccgcactgtccgcggcttgagaattcagacaacagagaaaagctacgtagtagcacacatacgtaccagccaaatccttcggcggtggaaccagcgaaatttgcgtggacgagcgtgtcgttttggggacattaatattgttgtcgtgcgcgcggccccgcactgccccggcatggcgaaactgcaggtctctgctcctcgactcctctgcaccagaagttccgtgctatttcacgagaccaacatgtacatagccagtttactcggctagtccactagaatcagcggcagagctggagtaaaccacagccacaagtgactgtacccctcccctactgatgggcacgttcagagagtgaacaaccgcacggagtttataaagtccaattttttctttcaagttcccctcttctcgttcattgatctggctagaataatgggcatatttttcttggctgtaacaaatgttggatgataattacagccacatcaaagatctgtagctcgtaatcatgatgtgaatatgcgttccaaatgctatagatttatttttaacaatttctgaaaaaactgaatcactgaatctagacgcaacgcttctcctaaacataagaacaaacagttgttatgtgaatgatcggtaagctttctcgatgacatgcaatctacttggctgcgtttgagagaagctcaaagagaagaaaaaaaatcatttcttttgcgcacacacttcctgaaccactaaacaatatctttaaaaaccatattaatccatattttaagtttcaaataattaatacttacttaattaggcatcaatagattatctcgttttatgtatattctctatttgtgtcttcttaaacacagacgtagtgaaagttttctaaatagaaagccttgttataggttttttcaccgggcctaaaatcttatatggcgtagcagctatttcctcaatttcaaaatataaggatttttaacatttaaatattgttgatgtttagtgcatcatttgttctatcaatcacctttcatttgtttttcccccattttacctccacgtactctctcatctccactcatcctttattttttacactaaaatccactttttaatcttaatttttgctaaacaatatataaatgcttatattttatagcagttcataaggttgaatcctccatttgacagctactaataatgatactccgttcgtattttgactttttgtttatactatttgaccattcgtcttatttaaaaaatcatgatactccgttcgtattatttgaccgttcgtataatgatactccgttcgtattatttttttacttactttattatttaaagtactttaagcacaattttttaaataagacaagtagtcgaacagtgtaaacaaaatgttaaaatctcttatattatggaacagatggagttggactctaaacttgaaattttaatcggattaacacggtcaatgccatgcatgtacacatgtgaccgagaggccaggacccaggagccagagacccagagtatttgacaacaggtctgggtagaacagaggccacgctggaattgtgtggactcttgaaatccgcaataattctgcatgcaccagctattgcattcttctgcctgataatgataattttctgcagttctctgctctgctgccatccgcggcaaaagttggagcacatcgcaatgcgtatgtgctcccctacacggaatttatccggtgcgtgcccttttgtcctacggtagtacggtgtgagccatgcccttgatgctctctgcctgctcgaacatcgatatttcccccacaaaaatggagaatgtttagcccacctaatcaaagccggtctgtttcctcgacaggtccacgtcctttttttcaaagatggttcaaattcggtcgcgtgttaaagaatgaaagcacacaggatatatcaacagatttgggtgtcaatgtatcatcgcccatcaaggcctaatttagttcctattttttttttctaaaaacatcatatcgaatctttggacacatgcataaagcattaaatataaattaaaaaaactaattatataattagggaggaaatcgtgagacgaatcttttgagcctaatcagtccatgattagccatatgtgctacaattaggctcaaaagattcgtctcacggtttccagtcaagttataaaattaattttgtcattcgtgtccgaaaaatccttccaatatccgatcaaacatccgatatgacacctaaattttttttcactaactaaacaggccctaagttcctttccttttctgctgaatgtagcgtccaaaccagaaactgtatattagctccaattcatacatatctctagatcgatgtgtttgctagctcaatcagtgtatgactaggggagacctgcaagtcacaaatcacgccgtgatcctgattatgatgtatcacgtatgagatgatgatccgtcggtccagtttgtcgtccttaatctggcagataagatatggcagcaatttgaacccatctactgtatgtgaccagagtcttgcactgacggcaaactgaccaagaaaaattttgtcattgactacgcggttcaccatcatttaaaatgctgacgtacaaaaggtagtactatgatatatgtacactgtactggattatatatatcctttggtttatttgaaacacaaattgtgcaatgcaaagtatgatgaattaatcatgcaacaaacgcgaatcttaaaaaggggagaaaaataaagaaaacagcgataagtaccttgcattacgtgtggacctcgccaaggtgtccatctgatggcgctctgtgttggctacatgcagctaaaccagggacgctgcatagtgcacggccagctgatccgaaccgatataccggtgacaaaattcgcagcccaatgattcgacgtccgtcttatccttcacatgcgatgcatatatactagccgagctgcttttgcagggtccagaaaatgaggtaaactttttggtttggctttgtacgttgcacatattctctggaaattaaaggccttgtcgttgagcatatcttacaaaaactttatgctcatgatgtggggagaacgtactgaaaatgaaatgccgggtagatatttcttctggcagatgctgttgtggtcgtactacatcatattcgtgattgattcgatcatatcagtgacagagttaagaatttaatcccgtggattaattactactagtttgtatttaaatgaaattatttatttattatataaaaatcaaattctatagaagtgttttttaaaaagctatagggtaagccaaccctatagtttatgcataaattcatccctagtcgaataccattacttcataatttagtggggtcaattttataaattctaatgaatttacaagtaaatagacttttaatagaactttagtaagattagggatgtctcgctggtttcagcttctaaaattatagttaaatactctcaaatcatcattaaatttagggaaaactaaatagctcattagttaagctctatgttaaccttactttttaataatttctatatccgtcactgcgtatacgtatatgtgtacgtccttatccaagcgacgacgtataggaagaagcctcgggataccggtcaaagtcggcatcaactccatacggctgcgtcaacaacaagacgacccggtcccactgtggagtttacgtcgaactgtgaacgacgctgttgcccaccagtagtagaactagaagcgtggctgatccggtcacggacagtgtcgccacgcaacagagaagtagtagtagccgtactattcgtagactctctgtttatgggtgtaaatgcgttcgtattttgcgtcctatatgtgagggcagcagtattatcccaggcggatcctagagtaaaaataacagtgaagaccgaacaaactgacaaagcttttaccattctttctcatgaatacttcctccgttccaaaaaaaaaaaatctacgactagagatttatagtcttagaatatgtcacatccaatactatattggttttttatgaaacggaggaagtatatagaaaaaaatgatagtggggttcgagcctcctccgctcctacggtagatctgtcatttgtctctggttcagcaattaaagttaaacacgaacccggatgatattgtggagttgtgttcaaccgtactggtacatgtacgtgcccgggcaaagcgttccataccccggcaggcttacctgtactcggtaaactgatatactccataatcgatataccagagcttctcatgatctgattagtcatggacgatgcgtgtaatgcatgtgggtcggcattgtccctgcctgaccgacccagatgcgtctcactcgatgccatccttcaatcacctaattaggtgctttcttcgtaaaaaaaaaaccaaccgaattaaagatgaccattttctaatgcaataaatctgtacatatataatttagtcgaggatggaacgttttctatgacaataaatctgtacatcattgtcctataaaatgttctacttcctccgttttacaatgtaagtcattctagcattttctacattcatattgatgttaatgaatctaaatagatatatatgtctagattcattagcaacaatatgaatgtggaaaatgttagaataacttgcattgtgaaacggagggagtatcttaattaggttggttttcttttttttacgaatagagtatgtacaatccaatcattgtcccgagagaagatcagatcgacctttcggcgtgtccgtcgtgtatgccatatatccagtttctcgagttcttgtcacggacttcaaccaattcttcgtatgctcttgagtagagtacaccatacggacagtagtagcgtggttactttcagcaaattcagcttgtgttttgttaggaatggacgacaatggatcgagatactgactcaccagatacagcatacgtacgtttgttgttgttgcatatgcatgcgacgacgatgcgcgcgtccggcaaacggaatcctaaatcacacctactaactttggactgcccacggacaccactcgtatatgaccatatgtgcaaagttgcaaatgcaagcaaacaaagcgaacgatccttgaacggcactgtcccactggctaataaacctacaccttgccacatgctactgaatttctagacttgtagcgactcgaaaaagttggcacaagaagctgcaagaaagcgatcggaattcggaatacagcgtcatctgttcgtctctacctgcctgcctgcattttgctgccatatcattgttgatcacaggagatgataatacaaatgggcaagccctgtttaagttcgattaagggtgtgtttagttgaggaaatgaaaatttttggatgtcacatcggacgtttgaccggatgtcggaaggggttttcggacacgaatgaaaaaactaatttcataactcgcttggaaaccgcgagacgaatcttttgagcctaattaacccggcattagcacatgtgggttactgtagcacttatagctaatcatggactaattagactcaaaagattcgtttcgtgatttcctcccgtgtaattagttttttttatttatctacatctaatgcttcatgcatatgtccaaagattcgatgtgatgtttttaggaaaaaaaattttagggaactaaatggggcctaagtacgcacataaaaaaagaaaaaacacccatcggtttataattaattaagtttcgatctttttaaaaataatttatctaatattttaaaataacatttatataaaaagattttaatatgaaatgtgttgttagtagtttgaagaacgtgtaacaaaattcgagtatgggagagttaagagcaagtttaatagtatagccaactacttactctaattcatctatatccaatttaatagctcatttatacaatagttacatactacaatattaatacatggtcccacttatcatacacacactgtgttttagagtccgtgctacagctggctataaatctgtagcccgctcctcttctctcttctcatttatcttcttaaaatatatttgcagctggtttataacctgctattgtacctgctctaagagcaagtttaatagtatagcccactaataactctaaattatatatagccaacataatagccaattcgtaccatagttgcttactatgctattaatatctggtcccaccctgtcatactcttattacgtcttggagtccgtgatgcagctggttacatatatgtagcccactactattctctctcttttcttatcctttaaaatatatttatagctggtttatagcctgttattgtaccttctctaagtatagcagcacgacaaagagcttttggccttgtggagttgtgggggagtgagctgcgagcaaattaaaggtggaaaagtgcacgcagaaattggctggctctacgcgccaacatgattcctggcccacgggcggatacgtgacaggtgaccccgagtacccgacgcgatgggaacaaaaaaaaaaagctggtttttgggcaagagttcttggatctttcatcatttcgtgcaattcggctgattgccggggcagcgaccgtgcactagcattcccgtcatcctgttagaaaggagaagtctgtgcttttgcattttcagtttttcatggtccagactacactcaatttttctgagaaacttatgttcagactgtggtacctgatcattgatcaatcatgaaagctagtatagcttccatctcacacaacaacaagttctcaatatgttagtgcatgtatatgtctggttctttcatggagttcggcatgttgctcatgctgttcttgggtcaggttctggcactgcgtctctctctctacgctgatcaatacatgggctggtgatatggtgatttggatagcgatgtgtcaactttaattttgggtgcacggttctaattgatggccggatcgcaacaggctaggctatctcttgatgtgaccgtttcggaaaataagagaaagatcttctgttgttacgcgacttaatggtggtatggccttcagcttgaagatgactaattggtgcaggtcattgcagaaagcctatagcgttctctctgaattatgatgaatcaatggcaggaaagaagatcgcatggccttctgccgatcgatcatgcaagctgaagaaaaagcctatagcagttttgatctgcctgtgtgtgaccgtgacaaatataaacgctccctgaaacgaagggcggtgtttcgctaggatctcatttctcaaatcattgttgtgcaattgagcattgccgttcatcaatggatctcattatttccttcagtttaacatgatcagattttgaggattcacgttctctgcttgaaattcatcgcccgaacgaatttatatacaattgatgcaattgatgatgagcaattgataacaatatatggagtagattgcatcccggccgggcagtattcgaggggacacacacttctttcccagctgtatgagctggattagttactttcttgatactattattcttgtccttgattgcttcgtcataaatagtagtacaccgctatttattctgaaaaaaccattgtgcatgagtgcatctacatatgattctggttttcttgccttgtcgactcatccgcgtttcaggggcagagaatgaagggcaacatacagccaagctcaggaaaacttcaaatttgctactgatgagtgtacagagtacactatcaccgcattaaaatatactttctgccttctctagttctcttcatcgtttatttttgttttatccgtctgttttcatcatatcgtgaatctggctgtgttcatcaataattggtgctagtaggagtattatcctgtcaagaaacccggtttaacccaaaataaataggcgcatgcgattcaagactgcagtatgtcgcgcagcaaagtttgtgaaaccagaagaactggagtattctgaatcctactgctgattgcttcggtctaacttcaaacatagcatcttttgcacgttttcaggggtgctgaagatgacagtgttacaacggttcagattcttgattacctcctgaaacatccgatgctagacacatcacaaggcgactgtgacctgattcttctctttagattagcagttctagacccctactccctctggttcagcataaggtgtttcgatttcattataaatcaaacttccttttatgtttaatcaagtttatagaataatgtagtaatacttctatgccaaacaaatatattataaaatatatttaatggtgtatttaatgagattaagggcttgtttggataggtgccctaccaattttttggtagtgccaaaacataggcaagttttggcactaccaattatttggtagaataaatttgtattcatcttatttggcttgctaccaaaatctagccaaattgtgatatcatagtgaagaaagttctagattgctaccaaatttgagatgggcattactaaaatgttgacaccaatccaaacaaatggtggatactatttatgctaccaaaatattggtatggcaaattttggtagcaattcaaaactgccctaagttggtattataagtgttgctatgtctttttatatatacattctgaaacggagagaggactagcctagaatgacataacgtaatcgcgtgaatgatacagacctgacggttatctttgctctcgaagtcgaagtgtttaatttgaaggggtgacagatgaagaaagcaagcaaaattagccagggcctggctatgaaaaaaaatcatgggtcaaaccgtcaaagcccactagctttttcagagttaaccagcctggtcaagcccaatagacccactgcagcagtgggcctagttatgtctatgtgggccttttcccccctacaaaatgttctatctttcagaaggaacacactgcataatttgttcaacagaggatacaaggtgaattttaagtgttagcaccaaccataatttgttgagaatagctaacagtaattcagttactaccctaatactcttaagataactaacagtttcatcgtttggcttatgctcatacatgcttatctgtattgcttattaaaaaaataatttacagataaaactcgtatatgcatgtatttaacaattcaaaagcaaatgttatagagtaaactacaataaaaaaaactcacaaaatcaactgtaaaataaaattttaaaatttaaatttcactagcttatactccctccgttctaaaaaaaaaatacaaaccctgggtttccgtgtccaacgtttgacttcccgtcttatataattttttttataattagtatttttattgttgttagatgataaaacatgattaatattttatgcgtgacttgtctttttaatttttttccatattttttttaaataagacggatggtcaaacgttagacacgtaaattcaggatttgtctttttttttttaaagatggagggagtaagtataagcataacaaaacgacaagactgtaaataggtaatgctctctgcataagcttgagctgcaatcccacaggaaacacctcatgacggagcagtcaccagtcagctggaatactaaattaagcctccaaagccgcgtcaaacagacgaggaaacaccgtttcgtcagttaagttcaggccccaacagaaacaccgagagaaacacgcggcccaaacggccggcatccccctcaaccgctcgtccgcgcccatcaaccgccaaagacttcccgcgcgcgtctacatatttcttcctctccctccgtctcctcctactctcaaaggcctcgttcgtttaatccctctcacggagagaattgaaggggatttggaggggatttatttcacacctatcgtggtgtgaaattattcctcttcaatcccctccaatccctctgtattgggattaatcgaacaagccctaattcgtgagaagctctgatcgatggcgccgagcaagctccgggcggcgctgggcgcggtcaaggacaggacgagcgtcgggctcgcaagggtgggcggcgccgacgaggtggccgcggacctcgccgtggccatcgtcaaggcgacggcgcacggggagagcgtgcctggcgacgagcgccacgtccaggagatcctcacgctgacgtgctactcccgtgcgcgggtggccgcctgcgtgtccgccgtgtcgcggcggctcgggcggacgcgggcgtgggccgtggcggtcaaggcgctggcgctggtgcaccgcctgctcgccgacggcgacccggcgtacgagcaggaggtgttcctcgccacgcggcgcgggaggcgcatgctcgacgtgtcgcaccggttcccgcaccgatcgtcgcgctcccgcgcgacgtgggacttccacgggttcgtgcgcgcctacgccgcttacctcgacgacaggctcaagcaccggatgaagggccgcgtggccagccagggcaaatggtgctccgacggtcgccgcgacggcttccccgacatcaccgacgggagttacgaggtgggcgaagcggtagccgaggtctgggcgctggtgccgagggacacgccggcgacggggacgacgacgaccgaggagctcgtctccaaggcgcagcatctgaagcacatactccagcggttcatcgggtgccgcccgacggggaaggcgaggacgaacaaggtggtggcggcggcgctgcacaggctggtgaaggagagcgcggtgatgtaccgcgagctcaccgaggtgatggccatgctcgccgaccgcttcgccgagctggagaccccctgctgcgtgcgcgtacactccatcttcaccagcatcgccaagctgttcgacgagctcgacgagttctactcgtggtgcagatccgccacgatctgccgcccgtccgaaatccccgaggtcgagcgcgtcgcgcagaagaagctggacctcatggacgagttcatccgcgatagacaaccggcgtcgtctcggtggtggaggtgcacgccgccggcgccgtccagcccgcttgcccccattgccagcaatggcgacaatagcagcaaggcatcgccagctgagccggcgccggcaggcgcactcgtcgtggtcgacgaccacatggccgacttcctgaaccttggggaagaatcgacgccattgtcgacggaggagcaagaccgggatctgacactgtccctgttcggcgatgacccagcgacgccggcgccgaagtgggagacgtttgacgacgaccaatgcgatgactgggagacggcgcttgtgcagtcggcgagcaagttcgccgccacccagagcgcgacggtgcttgcactgccaccgccacctggggccaccggcggcgaggtcgcggacccgttcgcggcgtcgctggccgtgcctccgccgacgtacgttcagatgatggacatgcaggcgaggcagcggcttcttgcgaacgagcagatgatgtggcagcagttcgagacgcaacaaatggcggcctggagttacagttcattgttgtaagatcgtaaaaaacgaaattaatgttttagagcgatgagaaatttcaatgctaactatgatacacgctaaatgaagctgattttgcaccataattttgtgcccgagttggaaccaaatcaagtgatgcactcgtttggttgagccgaagcgtgcctaagttcaattttgtggcgaaattgactgttttatgctatagctgttgtccttatccagatttaattagtacctatgttttaaaatgttgctaattagtactccctccttatcaaaataaatcaatctcctaatacgaggtggtttatttaaagagagtgtgtaagataagatatttaacaggattatgaatctagacatgagttacgtcctatcaatttggacataagatactattagattcataattctttcccgtttagattcatacataagccaacgtctcgcttattttgcggaataaatgaaacggtatatttgcaaacgaaaaataattttcgaataaattttttatatacgtgttcttagcgatctaaaaaaactgaaaaataattcgatgaaaaagcctaaaaaattagctccaaatttaaggttgaaaattaaaattttggctaataaggataaggataagaaaaagatgaagcctatagttttataaaatatctaatcttctactggctaatattgggatggaaataaatgttcataatgtttccatcaaaattcaccccaccttttttaacaaaaaaaaaactcacctaccactgacagaggggcacagggctaatggataattacggggatgcatcccgaaatccagcgtgaaacctcccaaaaaagtagccacgaaaaatcaacccagataaaacacagcagccgcacatcaccctgacatctctcaatcggacggtggataccacctcaccgcacaggctccccgtgcgctcatccgcaccaaaaaaactttttcctcccgctccccgcaacccagccccttcgacttcccgccctcgcaccatttccgtgaaccagttccaccgaaaaccagaaccaagctcaccgtatggggcccaccggtcggtttcctcacgcgtcaaacaccggttccacgtgaggaagctgagctcgtggaccttcccgcctctcccacccaccgcgagctattaaaccccgtctcccccatcacacactctccccacgcctttgtcccccgaaaccttcacaagttcacatactcgcggcctctcctctctccgtactcgcgaagccacgctccgggccgttgtcttctgtgtcgcttcgaattcgggaagaccctagtcactgcgcggccgccgagtcgggatgccgccggcgagaggcgggaggcgtgggagggggcgaggtaggcgaggtggacgcggaggcgccgcctctagggcgcgaggcgagaacgtcgtagacgtcgagccgatcaagctcggtgatggtgagtaggctggatctgggttctggacgcgatcggttttgggggattttgttcgggctagtgatcgatctgggggttttgggggtttttgttactgtgcgtttggttggttcgagagtttgtaaaatcaaaccgttggggattcggattttattaggggatttctggtggattttttttgggttcaggattgtaaggaagtagcattgctgtttttacgtcctccgatcggttcttgatgaggctgggaacggtttcccccctccatttgtgtgctcttcgcgtatttggaggagagcgctatattctgtggcggaagtatgaaatacatttttgatcaaggcgttcgaaactccgtaacattctgatccccacatatttggcagatgatgcgaaggtagatccacagacgaagtcacctaacgaagaaataacaagcgcggaggtttgcgaggtggagacctctgaggctagcccgcttggtgccccggaggaaggtgagattgaaagttcaaacttctcggacggcacggggttggtaatttgttatacccttatcgtttcggcttaatcccggtttcgatttatgcagatgaggggaagccaggttccactaggaacctgaagcgtcttcggaagacgatcacgatcgattccgcagccgctgaggagcatggggcagagagtgacgatgaaggtgagtgacggagtttgcttagctgacaatttctcggaattacgggtgccgcttgtcctgttaatgtgtagtacggttgtttgcattgtgttcaccttggttgtgctcagttttgatttgttttggcaaaatgaacactatataaaactccagatgttggtatttgcaatattagtctagaatgttgtatagctagtcattattattgtttgttttgacctgttgatttagagtttgatgttcttgccacagcaagttgccaagagttggctccatgcagaaggtccaagcgcctaaggtgcaaaccaactaggaagaggtccaaaccaactgggaagagggatttgggtggcaaggagagtgaagatgatgtatttgcaaatagctcgagcagttcccaggatggtaacagtgttatttacaatatattctgtcttgctgatcctaataaatttgtttggttgaagatttattccagattgatattttacagacgccgggaagttagcttctagaagatcaaagcgtctcagggagaggcttacatctgattattttgatggtgatgtgggtgaagacagacaccctgggaagtagctctgatgattatggtattgttacaattctcaactattgcatgatttctgatatgctgccagtctgctactacaaatgtaaaatttgcattatgtagatgaaaattgttcggctccccgccgaggatcaaaacgccttcggaacagactgggccccagaaatatttcatatgctgatgatgatagcgacaccgatgatagtaagtgggcaccctttgttatggcttgacataattgacccttttgtttgcagatcatgtgattttgtaattaacttcaatccagtttatttgggaaattggataacttgtagtttctcttctgctagaaagtcttaattgacataattaaaaaatactttgaaatattgtttaaccaaggatgcatttaaaacaatgtgaatagagtttttttacggaatggaagaaactatctattttcctcaatgcattctttttcaatatatatcttcattgatttgtgcactatgtgaaacttgcacctttcctatttacacgagcagaaagattaggacctaacagttgaatttattcccttctgtatagctaatatacaaataacataaccttgtttaagcatgttacattaactactgaaattaccacagatcgcaagaagattgtcccatgcaggagaacgtcaaagcgcctacaggagaagcggaaagctcatgatgtttcagaggtaagttaactaacaaaagaactcgacctactgttcttcatgaagtaataaatatctcatcgaaccttttcaggagagttacactgaagcttcgtcttgcatgttgtcgacttcttcttcatcaggtaataactaatcattttatgatcgataaatgtatcacctactttataatttaatatgattttgtggtcaagagattattgcaatcttgcattgtgcacaattaattaatatcaccgtacaaatatgtaaaatacctaggaaatattttgttttttactcctacctgttatacatggaagtgcgaagcatcaatgatccagagtcacatctaaacacattcaatattgttgatcacctttattcaatgcatttgttgttgcttgcatctataatatcgcatgaattgacaaccattccttctgtgcttcttaatgatttgtgtggaacctcagaatgcttgtcgtaaagttgatattacgtcgtgcatgtttcgctaatgacttgtgtctttcagatgatgaattattgcacaattctataaaacctggcagacgtaattcgggtggacctagttgttcgatctgtaaggtttgtcagcagttctgatttattaattttctacccccccccaatctttacatgaaatcctaactgattttttttgcagattggaattgcctgctctttcctcatcaaatgcaagaattccacttgttctcgtagcttccacaccttttgtcttgatcctcctttgcaagagattataggcacctgggaatgttcttggtgcaaaagcaatgcagcaccagcagtcaaggtgacagaagtgttaacatcaaaaaaaatccaaagacttgttggccacagacgaattcttcaggaggcagatttccagtatcaattcctcgtgaaatggcaatctctttctcatcatcatgactgctgggtatgttaaccttcttgctcaatctatatttggtgtctttttgaatgacttatctttgctgtctttttttttctttttctgtaaggcaataggtgtttgacttttcctttttctgtaaggcatacttgctagggaacctccctctaccaacacctttcttgtttgtagcagtacattatattgagtttctttgaactggtaccttgcattgtatatttcatttctttcaagtcatgaaactttgtattagcccttgctgctacaactaaaaaaatgtcatgctgcagctgctacactttgatttctattttaatgcaaacatacacatatttggcgtattcacaaaaaaaaaaacggcatcttcctaatgtttgtttatgatgttagaattgtatcctgccacactttgcctaatatttattatgtaattgctatacttgatgtggaccatgcaaatattgttccctagacacttaattatctactctctgtaggttccgcttgaatggcttcatgtatctgatcctttacgagtacagagctatctaaacaagaactggtaaatcttctcagtttcatgtttttctgtctaccgcctccagtgtaaagtttcttgtgttattttcttgttacatgtatttatcttttataattttttttgtgttcgtcaatgttgctaaattttttcttggatatactagttgcacataatctcgtacctgagtaatcgttgttcatatcattagcaaattaataatatgagcccctactaattttctaccttttttttcattaatcattactgagctattctggttgaacaccatgttgatgtttgccatttttaaaacaatcttgtttgtttataatcttaccagctgtgttctctagtgcaccatagtgcttatttttgttcttgtttgtgaacattgcaacagcttgcctaaggaagtttattcagaggatcaaaggaagcttgagtggtttgaagtagatcatgccattgcatgtcggaggaagttccatcatgaaggtttatgtgatgtcttggctactttccaggataaccaagatttcgacgggtatgagttccttgtgaaatggaagggccttgattactgtgaagctacatgggagccatgttgtaccgatggtgtgcaacaggctgtttctatgcttgtcaggaggcataaaaatgcttcaaaaagagttaacatcagccaaacatgtctagatggatcaaaaatagaagaggtgcactgtggtgctctatatgactatcaacttcaaggtttacaatggttaatagataacttcaaaactaggagaagcgttattcttgctggtatgtacataaactctaaatacataatccatgatgcacttgtacagttgtaccttaccaaattataatgcaccaataatacacatgtaaagaattatgctgatcagtttttattttgttgttttgagataatctgatttatcatgatgcttgtgaactgtataattatgtagcgtctctttgatgttttctttatttgtttggcattgtcttgatggaaaaatagcttgtacaactcttatttcatgacaaaactatgataatggggtatgttctgctctattggcagatgaaatgggtcttgggaaaaccgttcaagttgtttgctttctgtaccacattattaaggaaagtttgactgcatccccagcattgatccttgctccaaagagcatcctcctgcaatgggaaaaggtttgtatatagttatgtgatattctgccatattatactgtatattatataaatgaatttaaaattttaccctgaatcctttttttgatattgcatttcagtttacatcaaatatgttgcattaatcctattttttggatgcatgttttgtgctctaggaattttgccagtgggctagtgatcttaatgttattgtttatcaaggagacagagactctcgaaagtgtatccaagtccatgaaatgtactcttctgatgggaaacctttatttgatgctctagtgacgagttatgagtttgtccaaattgacaaggcagttctacagaaattcaagtggtctacaattgtcagtaagttttttcttagatgaagtcccccattatttggtgttcacttgccggcattagtgtattgtctctgttcttttcttgtaacacttgagcatttccccactttcacttcagttgacgaggctcacagaatgaagaagcttgactgcaaccttgcagcttgcctaaaacgatactgctctgaatttcggttgctccttacggtatgtactgcctacttgacctgtaatttcttgtccttaattatttcttggaattttagaattggtttgttccttgtcactagtttgattattagtagtcatctgggcatgaggttttgaaagtgagatgcctggtatagccagcattcaaccatagtgagtgcccataatactttaaaaggggtgtgcattactgtagctgaggcatggctcgctcctactgctccatgcatcgtatgatttggggactaggattttaaatccattatctgaaaatggttcgcttctgtggtctttctgaagcaacttaatcctgtgctagagcctaatcaagtgctatatagccgctagagcctatataacatagagagatctggttagccctttttacagatatcatatatagccgattctttctccttggctgtcagcgtagtaattcttacgaagtgctttacaattgccctttctttaaaagaactatgttctgatcctggttcctcttcctttcactgtacagggaacaccgttacaaaataacatcatggaactgttttctttgcttcattatattgatccggatgagttctctgatccaaaggctgatggattgttctcaccaattgaatctggaagggatttgacaatggatgaaaaagttgctaggattcacaatattttaaagcccaggtgaatactctgaaataagtactatatatgtttaatatcttggacacggatatttttttgccgggttggccggaaggtttggtcgaccaatttcattattaaagaagggtattaaaaacaattgaacacggatcttaagtttcttgtttttgctaggatgttgcggagaatgaaatctgatgttctaacagattctatgccagtaaagaagtgggttgaagttccatgtgcacttgcagattcccagagagaactttacattaatattttagagaggaattactcaaagcttaacagtgccattcggaatggtgagttaagcgttctgctcttttttcatgctctggtaaaattttaagtcagattcactttgtaaaagcatatttgtccctatgaattacgtatgggaatatgaggtttttcaaatccctttaattacgtatggaaataacactgttagtcttgtttgtacttttgcaggcagaaaactttctctgaacaacatacttatggaactcagaaaatgctgcaatcatccagtaggttttactttctgttttgttgatcagatgcagaacttggtctcttttctcttagatgtaggaattgggtgtttttgcttttccgagtctctcattttgacagtgatttgtgtgcagtggttacagaaaatttgtagcaaacgagaagcttaaaattggctttaatgtatcagtttgttaaactccattcttacaatcctgccttctatacaaggaccactagaccaggccttgctccctccgatcacccacaagctcacaacaaagagccctttttaagtagatgtgctgtttgttgtgcatgttaaatttttctgctgtcctaagatgctaagattttgcctttcagtatctatttccaggacttgaagttggacagcaagcaactgaagatgtgtttttatcacttattgcttcatcaggcaaacttcaacttcttcataaggttctttcgagacttcatattggaccttatattgctatcatatcttagcactgcacctgaagtttaaactgctagaaataacactgctcaattgctaaattgcagttgctcccaagattgaaagaaaggggaaatcgtgtactgattttctcgcagatgaccaggatgcttgacattcttgaggattttctttgttccctgggatacaaatatgcacggtatgcttcattcgtctaccttctatcaattctctaaattatatgcttcagactttcgctgctcttttccttgtatatctagtaattgaatgacacttcttttggccatttcatggctgtgttaacacttggcagcatcgatgggcagacatcactctctgctaggcaggagagcatagaagagtacaaaaacattgatagtgaaacatttattttcttgatgtcaactcgtgctggtggcatgggagttgacctggtaatgtattatcatatcaacttagttctttcagttgaaactgttagcctgtagggcaagctcttaaccagcaactgcaatagtatgattatgcctctggactgacaaacatcattataatttgcagcctggtgcagatagggtaattatatacggtaagtggttttaaatgttttcattcactgctaattatataatttgcaagtggatacttgcactgatttggccttcctatttccagatcctgacttcaatccatttatggacttgcaagcacaatctcgggctcatcggatcgggcagacaagaccagtggttgtttaccaactcattacaaagtgttctgtcgaggaaaagatactgcagaagtcaaagcagaagttggccatcgaaaatatgttgatgaactcttccaagaagccaagtgctgatgagttgcagtctatattactccatggagcaaagacaattgtggacaggaagatcagtgcaacatccatccattatgacaatgaagccattgagaatctcctcaagttagacccttccactggtgagaaatgctcgtcggatgataacggttatcttggcagcattgtgagctttgctcatggcgtcgaggatgaagcaccttcttccccaaaggttgaggatctgaaagttctcaagcctgctactcccaaggttgatctcggccgtgggaagaggcaaaggaaagtcgtgaactacgctgacgaggttgagaatgaagacagtgatgatatgtatgccccggaaggttcgtcgacttccgaattcagcagttcgtcctccgatgatgaaactgacagcgctctgcagctgcaaatagttacagtaccggacattgatgcagattaggtgtacaactctgtttcttactttctgtttgcgtctttgccttttgggacccttgcctttttagtgaagggatggaaatagaaggaagcttttggataggagcagtatatatttaaaggttgaagttacaagtgaggaggtcgatgtagctattttgggtgttgaactgtaccaccttatgcagaaacctgatgatgcttgatggaaatccattagacagcgtccttgctgcactggtcttggaatggctagcgtataatctgtcttggaatcactttgctgcttgtgatttgtgggattagtatctctgtcggtgtcatatcgtccatttgcaacagagtaatattgtttcctacgaaaccgtaagtttcactgccagaatagcagaaatatttttgtttgacaccccgacgttatataagcccgcgagccgccgccgccgccgccgctgctagggcggacgagcgctcgccatggcggctagccgagcgaggcaactccacgctctctacctgacgagaggatgccgtgacccagacatgtgggccaacctcgccaaggtctacgcctccaactccttcctccgggaggccgctatcatctactcgaaactactgccccatcgtactcaccacctgccccttgtcatcgtcctcctcaaggcaaccgcctcccgcgcggatcccgtcctcggcagggccctccacgcggaggccgtgaaatccgccaacgcccacgaccgcctcgtggggacgacgctggtgtccgtgtactgcaagtgcggcctcctggccgacgcgcgcagggtgttcgacggaatgctggaccggaacgccgtgacgtgcaacgccatgctcgccgggtacgcggcggcgggagacatggtgagcgcggaggcgctgttcgccggcatgggctcacggactcccgtcacgtgggcaacgctgatccgggggttcgcggggaagggcgacatggcggaaacgcggcggtggtttgaggccatgccgctgggcatgcagaacgtcgtcacgtggaccgtggccgtgcaggcctacgttgccgcgggggacatggagaccgcgagggagctgttcaacaagatgcctgcgcggaacgcgtttgtgtggtcgtcgatggtcaccgggaacttcaaggctggcaatgccgacgaagcgcaagcggtgttcgacaaaatccccgtgcgcaacttggtgaactggaacgcactaatagcagggtatgccaaaatgggatgctgcgagaaggcactggaagcatttcactccatgctaaaggacaagatcaagccggacgagttcaccatggcaggtgttctctctgcctgcgcacagctcggttcgctagagcaagcgagaaaggttcacaatttcatcatccagcaccgtatccggaagaaccagttcgttatgaatggcctggttgacatgttcgccaagtgcggtgacctcgctttcgcacgaaatatcttcgacaacatgcaatggaggaacaccgaatgctggaactcgatgatctctgcactttccagccatggacagagcattgaggctattcggttgttctccaagatggagtgttcggagcagaagcctaatgagatcacacttcttgccgtactcggagcttgcacacacggaggatttgtagatgaaggactaagaatcttcagcaaattcgatatttacggggttgctgctgcagtagagcattacggctgcctggttgatctcttgggccgttctggaagattgagggaagcttatgagattgtcaagaacatgcttgttgaacccaatgaggtgatctggggctccctgctcggagcttgcagggtgcatggcgatgcagagatgtctgaactcgtatcaagtgagatccaccaattgcactcccgtcgtgtgtcaaccaacgatgcagagtacatcttgctgtcaaatatcatggcctcgtcggagaggtgggagcaggctgaacgcatgaggagaaagatggcgctccatggagttgggaagaccccagggtgcagttcagtggagctcgagattactgaacaccaagtatgtgcaggcagtggtacgttatcccagctacactgactgcattttttgcatgtcccaaatgttcttccgaaagtgttttcacaagttgcccagaaaagaaaagcccctcatgtgctggatattctattaactgtacttcttatacatagatgattagacaaggacattagattattagacaagggaattatctgttctgttgcatccctttatcaactggtgctggcatagaaataactacacacttcgtgtcaattttatatgctaatatcagtcaacaggcacaattgaattatgtatttgaacatcaatttttgtggttgaaatgttaaaagaaaaatcttcactaacgatatcagaaaatacatttctgccaaatttccaagatcaaaggcaccaaaacgacttcagggtgcagttcggttgagcttgacatttctgaacaccaagtacacgcaggcagtggtacgttatcccaactacattaactgcaattttgcttgtctcaaatgttctggcgaagcggtttcacaattggcttgaaaagaaaagggattttctatcaactagtatgcttcttgtacatagatgactgtacaagggaaatttataatctgctgcatccgtttatcaactggacacgatgctggcaactgtgcaattccctcaataaaaaaacggtcatgtcaattttatatgcgaataatgtcagtgtgcaggcacaactgaaatgtgaaatgtgaaattctgtatttcaacattaatatttgagggttcaaatcatcaaatgtgaaaagaaaccaaactatcttcactaatgataccagaaaatacatcaacgccaaatttccaagatcaaagcaccattaactattaccaatttactgcattgcaaagagaacacaagaacagagatgataacgaaatggcatgatcatctaggactgggaattcagaattcaaccaagacaagttaaactagacaatcacttccctatcatagatccagctgaacttgaccttcctctgctcatccttcttagccctgtcctcagcccgctccgcggcccgccgcatcctcttcgcgagcccgcacacgaagtcccgggccctccggccctcgccggagagcccagtctccagggtctccagcttccaccgcttgacgaggaactcgacgatgtcggcgtagtcgcgcgcggtgtagacgttgaggcgctgcgccacggcggcgaagtggtcgaacaggttcatgtcgcggccgtcgtgcatgaggtgcgcgggcatggtgatccgcttgtgcatcatgtcggcgatggcgagcatggcgccgtccgggtcgagccgcagcagctgctccacgatgcgcccgtacgccgtctcgtgccgcttctcgtcggcggcgatggtgccgcaggtgcgcgccaggacgtcgtccccgtgcgccctggcgaggcgcgccgtgttcccgtgcgacacggccgtcgcgcgctcctggaagctggtgtacacgaaccccaggtacgggttgttctccgtccccggatcctgccatggattcagcaacaatgctaagcaaaaaaaagattgaaaccaagcagagaaatggcatcaacatttcgagagattcgtaccatgccggagccgatgaggtactggacggtcttctcgaccatgcgcatgtcgacgcggccggagaggtacatgtacttgccgaggatgtcgccgtggcggttctcctcggcggtccaggtgcgcgtccagacggcccaggggcaggcgctggcgccggtctcgtcgcggacgccgtcgagcgtgttgatcatggtctggtacgtcggcagcgcctcctcggtaatcatgtccccgaccagcacgacgaagtactcgtcggggagccccgcggcgcgcgcgcggagctcgtggacctggtgctcgaacatctccgacgacgagtccggcaggaagtccgtcggctgccagcactcctccacgggcttgagcagcggcagcagcgacgacctcgcccacccttccagcgaccggaacacctccgccttctccggcggcatcgagtgcgtcacgcggcgccgcgtcgccgtcgccgtctccgcggccgtcagcaccgccgcggacacgcggcactgccggcgcgagggcgccaccaccgcgccgcagccactgacacgcacggttcccacgacctgcatgactgccactatcactgtcagtcaactacagtagctagttggtggttggtttcttgatttcttctgcctttctgggatcgccgagctgccgcggcgtggtatatgaagggaggggattcgcctccaatggtgggcgaaaccgaaaccggtgggtggtgcagtggttttgtgcgaacgagccgatggtgtgggagagcgaatcctgtgggtgctcgcggccgttttagccacgctcacagctgggtgcacggctagcctccacggtgtctgaggctcatggcttgtctccatttttggccagtgtatcgggtccacagatcgtagtgaacacgtccgttgctttccagtttccaattttccataccggagatctggctgtccctctcgatacgatgtcgccatcacaaaagggaccggggtcaaacggtactttgtccagctgcatgggacaagtaatctggccggcagtgacgtggccatgttgggaaaaacgagctacggcgagaatttttactgtcaactgtggagaacaaggtgaccaactttgttgaaatgggtggttcgtttttgttctgttgtgtgagataagcaggctggttatggtaaacaccgtggtccgcccctggatttcactaccaagcggaacggcacgtgcggcttgtgcatgtgcagcgctggtccatatacaagtggcatgcatttcgcggacgcgctggctgcagagggattccccgagcccaccaggcgccgccaccgcgcgctgctcgcgaggaaacaatcgagaccaggctggcctgcccctggccgtctggcgccgcgacctgcgacagattcaaaccaaaaccgtatgtaaacccactcgctcaccaagcggtttcgtatggccaagcatttaaccggagatccgcctccacgtcccgtgcaagttagcgtccgtgctcagcacgaactcgccattccttggaattaaatttaaaaatatactattgattcgtttttttttcataaatactcgggatgtaaatttgttagcagaaatatactgtcgatctcgcgcaaccgtttcgcataagtgacgtggacgtgacgacgcaaatagcatctataacaggtgtcggccccgtacaatgaaaccgtgacaccaaacgacgaaatcgaggacgtgcgtgcagacggcgtcagaccacacggtctcgcgcggccaaaccgcgagaccgagcagtctctctcaatcagtgagcgattacgacggttgaaaattgttaattagtgattgattaattgttaattaatcactaattaggataattaatcactagttattattcgataattaggataattgatcactaattaagtagaaccgctggacaagacgttcggtctcgcgatactgcgcggtgtgcgtcgtcacgcttctttgcacaacggttgtgcgagattgatggtatatttctgctaaaaattttatgccacgaatatttctaaattttacgccacgaatatttctaaggaaaaacaaatcaacagtatatttttaaatttaattccattctttgtcattgggttgacgagacgttctggaagccgttcttcttcgttatcacgccgactcggtgactccctggttcgcttcaccgaagcgacgaagatactatgttcggaacgagggttgggaaccgtcactccctagcacgtaaaataaaacgtatgattaattaagtattagctaaaataaatataaatatattaatatgatttttttaaaaaataacttttatataaaaaatttttcataaaaaatacaccgtttagcagtatgaaaaacgtacgcgtggaaaacgaaagaggtgagttgggtaagtagagataagaaaggagtgatcgcatcacaactcacaagcacatcaccggaagttttgcacttccaccatgttgtaaggaaaaagtttatattgcctttcctcaactatagtttaagtccgattcattttctcaccgtaacattaagactccttgaactagggttggacgtttggtcaaaccaaaaaatccggtctcgatctttgatcttctacaagtttcggttatctaaaaatagaaaccaattaatttaggaaaataatgaagatcaagaaaatcagtctcgatctcgatcatgactgaaatatcaaaagttctaaaataatcagggcaagtctaagttccagattaaaaaaaccatacacataaacacacacccacaaaacacaaattgactctcttcgctatcacgggccatatatcgaagcatgctagaggccaaaattcgatttaattgggttgctggaccttaatagtcttattgagccaaaatttgatttgtgcagtttatttagttaatcgaaggtactaactgaattgaccgaatgaaattcggtcctttaacacctgatactgatcaaatttctcagctttttcagtcctagttccggtctttttggttcggtttttttctgtctaccctggcttaacaaataaaatgaggagtgaactcctttgatggtttgctcagcggtttcaaccgacgtggcgtattcacctggtccacacgtgatgagtcagtatacacataagcgtcgatattgacgtagttaataataataataataataataataataataataataataataataataataataataataataataataataataataataataataataataataaagcaattagtccatatgtcatcctctctctcctccccactccccactcccctatcttctcacacatcggccatccttcatcttcgtcaagtgcactgatagcctaatccctccttttgccattgagtgtgtcagcggttggatccgctggggcacatgcaattcaaggttgtcagtaccccaaactgtataatattttacgatactaggatagtatgctacgaattcaaaacgatatcgatctcatctaatatcgtaattttcatagttactcgatcttactatttatttccacacgatcctacgaaatcttggatagtatcccgatattacgatctctacgatcctaccaaatattatttaataaggtggattgaaaataatgtgaataaatatgctcaagtttacataaaaaccaattaaatttatcaaaatcaatattatatattttaatttatacaacatattatatatcttatataaaattatgtaatttctaaaatctgatagtcttacgatcctacggtagtatctagatacttattaccttggatcatggttgcaccgatccaacgacgaggccaccacctccaagcactagtgccggagtgctccttcaatcctctcaccaccaccaccatcgttgatactctctgccactactgttgatgatagcacgttattatacgccttgcctctagctggtctctcctcatgcttcaaatccgcaccagtggcggggtggacaagctcgggctcctacttctcaatcgaatgggccacctacacgtgggtcctgatttttttttcttcgttaattgtaatttataaggtgagggtggaaaaattacacgtgatttctacagtatttttttaaaaaaattcatgtaggtgtcatattggtaaaatgaattgatagttgagataggcttaatgtttggtttaacgattgagatagagaaatcagactatgaggtagaatagacctttttcccggtgcgaacagagttggaaaaagtacaccgaaggtccctcaacttgtcatcgagttataaaatcatcccccaaccgcaaaaccagatatccaacgtcccttaactaaccaaaaccagtcacaaatggttctctggtggttttgaccccggttttgtcctacgtagcggctgagtgggccccatatgtcagactgccacatcagcctcctctctctcttttccttcccctcttctctcccttccttatctctctctctctcccttctctgacccccatggctgccaccgccgcctcctcaagctctttgcccgtctcgctgtccttagctcccccactaagcgctgcaccgccgccgctgacttccgtctcctcccacgccgaagcccaataaggtggtggttgtctcgccgccacttccactctcactcggcgccgacatcgtctcggccgtcatcgtcatcgtgggcgccgcgtccatcccggacacgcctaacagcttcacgctgcgtgggaggctcaacgaggcccgcgacttgctgtggcgcatccgcagggccggggcggccaccgccgacgtcgacgccgagctcaaggatatcggcgcgttgccgaggaggaccggaggtacgagtcgggcgcgttgtggcggcttcttcgttgcaagtaccggccacacctggtgatggccgtgctaatcatggtgttcaacgttgatgtggcagcctgatatatggagtccacatgggtcccacgctgactcagccgccacataggacaaaaccggggtgaaaaccacggaaggaccatttgtgaccggttttggttagttaagggacgttggatatctggttttgcggttaggggacgattttgtaactcgttgacaagttgagggaccttcggtgtactttttccaacatagtttcctacaggaataagttcacttcatgacccttaaagagtgatcgaaatctaatccgtaaccctaaaccacaaaaccggatatctcgaccccccaaactcttaaaaccggtgcaatttgactcccttggtggttttggagagcggttttgctgacgtggcgccacgtggcacctacgtggcaatattgaccaagcctttgatccacgtggcgtttgacgtggcacttacgtggcattaaagttaaaaaatttacgtgggacccgtttgtcattcacacacagaaaaaatgtggggcccactaactgtgggacccacatgtcagtcctccttcctcctccctctctcccttctctctctttttctctccccttcttccccttcggccggcggcagggcatgggctgcggtgtggcgccacccggcgggagctgaagcggtccccgcagtggaggagtcgacgatggcgaggccagctctcggcgagatggggtcgtcgtctgttctccgcactagccggcgacaagggtgctgatcggtgccagcgtcaccgtggccttcttgctcctgctcgccttcttcttcatcatcttgccgcgcggcggcacaccgccggaggtggtatcgtcgtccaaggagggcgggatccgggggcgtcgcgatggcggcggcgtattccaggttgagagctatggggagaggtgcgagcacgtcgccgaggaggatggccatgatcgccggcgattcccgcgtggctacgtcgactacctgtacctgttcgactgcgtgttcggtgtggagcggcgggttcttggctacggcgtgatggcggcttggctcgccgtgctgttctacctgctcggtgacacggcggcggtgtacttctgctccagcctcaagggcctctcgtggctgctccgcctctcccgacgatcgccggcgtgacgctcctgtcgctcgggaacggcgcgctggatgcgctctccaccatcgcgtcgtcgcctacggcgggggagagggggagaccaccaccgtcgtcaggaaacttgcaattcgctcacaactcacacgctcaacctcactgaatctctgaaactctgaagattgtaagactgtgaacagtaaactgaaaaaccgaagaacagagttctgaacagagtggtttttgtgctgcttaagtctcaccagtcaccgcagcttctctgttttcttctctatttattcatctccatcagcagttcgttacatgcataactggaaagaacaagccagacttcagccccagccactatatgcatgcaaaacagaaattaaaaagctcaagattgcacatcagcgcacacggcatcatcgccgacgaaccaccaagatcccgacgcgagccagcttcctcttctctcgtcgccatcgtcccgctcccgttcccactccctccccgccgccgactgcctccagtcgggactatccaagaagagccgcggctgagcggggacgaggagcctcgccctcctcatcggtgctgaacgggcgcgagtggacggagcggcagccggacatgtcccccgacgccgatgcagttgatggagatgtggtccagcgactcgcgagccgtcggagaccgcgccggtaaccgcaagggcgaggatgacgagcagcatattgggccgccgccgccgccgttcccctcgtcctcccactatcgcgagcctccgcggccgagccgccgccgtcctagccgccgactgcgctgcgccccgatgccgccagccgccgccgctcaccccgtcctcccgccgctgctggcaatgaagaaagagagaacgtaggagaggactcactgacaggtgggccccactttatttttttaatttatttgatgactagaatgccacgtaggcaccacgtcagcgaaaccgtcctccaaaaccaccgaattgcacttgttttaagagttgaggggtcgaggtatccggttttgtggtttagggttacggattagatttcgatcacttttgagggtcacaaagtaaacttattcctttcctacgtgcaacagatgtgcccaggccggactttgagaacgtgcggtccgtagctgttgggtcggaaacggcctaacgggatccccacggacgtgtgggctgttgtagttgggcctataaaggattgcccgaaggtttcggcctcttagatcaggccatggaacactaacgcgccgcacatgaaagctggcctagatccggcgttgtgttcgtttagaaggcctcccaatccatcagcccatctccggttctcctcacatttaactctgagctgagaatggcagaaaagttgcagacctcccctaaccttcgtgatgtggacagatcatgggcgagtacggtcgtaccgatgaacacttgaccctccgtatggccgttgatgttaccggtagggtgatactccctcggtcccacgatataacaaattttaaattttttcttagaccactcgtttcacctcacctcaccaccgcgcacgaccagagaaccaccaccctcctctcgacaccgccaaagtcaaaaagcaaagcgtcacgtcacgtagcgcagagcggctgcaactcaatgccaggtgggccaggtcatatactggccccacaggtcagtgagcctagaaacctccttcctcctggtatctggaagctctggtatttaaatcgcacgcgttcctcagccaccgccctcctcctctgcgcggagccgtcgtcttcctcctctactcctcggacttggccctcctcctcctcctcgcgccgcgccagcgctgacgtagccgtaggtcgccgggcgacgcgcccactaagatatcgagcagttccggagcctgctcagggggctgggtgcggccgctccggcgatcgccggagaagaagggtggttggaatctggtgagtagccggccctgatcccggtcgtcgtggaaatccttccttcctcttccgtggtgggcagcaagagattttggtgctccgtgatctggagagctgtgcgcgggactggggttaggtggcccccccaaggttcgatccggcccgatttggcggagggattcgaacgcggcgtattgggataggaagccgcgccggtggatttgttcgagcagatttggctgctgggggtttgtgtgatgggagatcaggcggcggcggatgcggcggcgagatggtgaccgggagctttagcaggagcacgtcggcgcggctcacagcgaggggcggcgtcgggagcccgcgggtgtcggcggcggcggccgcgcaccgcaagtggtggtggtgggcgccctcggggccgtcgttcgagtgcgctgccttggccttcttcctttcctccgtcgcgctcgtgctcgcctgcgcgctgtatctgtatctcttccggtaccagggccgcggccatgcggtcgccgagttcgccggcgacaacctagagtcctgcgacgtgttcgacggaagctgggtgccggacaggaggtaccctttgtacaatagctccgattgcccgtttgtggagaggggattcaattgcctggcaaatgggaggaaggacaccggctacctgaaatggcggtggaagccaaggggatgcgacttgccgcggttcagtgccagggatgtgttggaacggctgagggggaagagggttgtgtttgtgggggactccatgagccggacacagtgggaatctttcatctgcatgctcatggcaggggtggagaatcccaagactgtttatgaggttaatggcaatcagatctcaaagactatccggtttttaggagtgagatttgcgtcattcaacctgaatgtagagttcttccggtcggtgtttcttgtacaacagagccctgcacctcgcagtagcccaaaaagggtccgagcaattctcaagcttgataagatggataatatcagccggaaatgggagaatgctgatgtgcttattttcaactcagggcattggtggactcccagcaaattatttgatatgtgagttttcttattgtacttgtacttagcaacaccaatttgttcttagaattgttgtcatatctactgcagttaacttaaaaatcatgaacctaatatatgtttgctccaatacatttgtttttgcgaaaaatccttggatagatgttctgtgcatgccaatggtttggcatataggtagcacagtgtcgctttgaaagatatctgttatttagtatgtgacttctaagcaacccctagatcaaaggggtgctagacagtattttttttaagagctcaacacaatttatcctgttcaggaatcatgaagtggactgatcaaaagtattgatagtaacaaattgacaaaaacaagtgatgggttgccttgcaatcttagtgaagttacttgaggtcaaagcaacacaagtaccagtgtttttgtttctcctgtcaaaattgcctgatggctgatgttggtgcattccgtccttcaccagaatagtcgtagttaggaaatatacactgtcgataattgcattgtgtttcaattatgctattaagttatgtttgtgcatattcctcagaagtgtttctactaatgtggattcctattattgcaaattgttacaatttacgaacaatctactaaattgtcatttccctgtttcactaatgggtaattattgttttgtgtttttaacaggggctgctattttgaggctggaggtttgcttaaactaggtacatccattaattctgctttcaaaatggcacttgaaacatgggcttcatgggtgaaggaaaaggtggatttaaaacgaacacatgtctttttccgcacgtatgagccatctcattggaggtgtgttttctcacatacatcggatcttttccagtgtattgttcttcttgtattgtgttataaaggcacctaatgaaaacaagactgctactgttgtggtttgaagaaagtgtaaatgatttgcgaaagacatacactcatttgtatttttttccctttttgcatacttacagtggttcaaatcaaaaggtatgtgaagtaacagaatttcctacagctgaggccaaaggagatgacagaagtgaatttggagatatactcgctggggttgtggtgaacatgagcgttcctgcaactatcttgaatgtgactttgatgggggccttcagaagtgatgctcatatcggtatatggagtcatccttcaaccatacttgattgcagtcattggtgccttcctggagtcccagatgcttggaatgaactagtaatttcccaccttttgacaaatggtgagatcctttacattatcattcttttaacatattatttagagtaaagtgtactgatggcccttaaacttataggggtgtgtcatctaggtctctaaactctcaaaatgcatattcaagtcctagaacttgtcatagtgtgtcatctaggtcccaaatcgccataaccccttcagcatcctacgtggcgttgatgtggcatgccacatggacatgatgtggcatcattttgactgacaaatggaacccatttaatttttttccttttccttttttcttctctttttttcccgtttcgtctcctttctatgtgacccgagcagaaaaaaaaaagaagaatgagaagaaaatgaaaaagaaaaataaaagaagaaaaaaagaaaatgacacgtcacgtctatgtggcatgccacatcagcgccacgtaggatcctagaggggatgtgtcgatttgggacttaaatgatacactttgacaagttctaggacctggatatgcgttttgatagtttacggacctatatgacacaaccctacaagtttaaggatcgccaatgcactttactctattatttataacactattcctgtaaagtattgtgtagtaataatcccacaaaaattttcttctcttaagttattttttgttgcaagctaacctggaaccctccagtttttttatatatagtgcaaaatatgccatgtattacttggtacctattgtccccccttgttattttttctttgacatcaaaacctggtaagattgttcggttcataattaaaaaactgaactttgtactagctttgtgtaaaaccaaggactaaacatgatgattgctcaatgttgaaattgggtgggagagaacttacctgaacacaggaatacttccaacttacctatactccacttgtcaaataatttatggtaatcttatcccgaatatactttgaatgtgatagaaaaaatagtatctatactcctttaaaagacctcaatggtggtggtggtgaatctgccaccatacctatgcacttatgtgggttcatgctgtcagtgtaaccacggttgtgcttgaaattcaaatcagtgaatccatcatctaccactctacatcaaaaggtgagccatatgaaccagcataatccattcacatcgaatttcaaagaaaatatgatttttttttcaattaacattgggaaaagtaatgacataatttatttttaatttcgttgcaacgcatgggcatttagctagtatatgcagaattcaatctgttgacgatgatttccactgcatgcgctgctgtctttgaattgatggagataaatggtgatatattgatctgatctttcctcacgtgcaattttgcaggttggcgaaatttggctggctgactgactgctgacattatactttgtttttctttttctttttcttttttgtttttctgctgcttctgcttcgtctgctatcaagtagcggaccatgatttttttttcttagacagcactacagcagcatgtcttcatcttggtttttccttttcctcaagtgctccttatacacgcctccggggttacagattttgtatcattgtctattttgcgttttagacagaacatcacaatcggcaacctgtatgtaaacaccaattcatttgcaagttttggaaagtcatttctcatgcatgaaatctgtttggtctatttttttcttttgtgctagtcgtacatagaatgcaatcaacagttttccataagataatctgtttgctctatttatttttgtgctgcagtggtattgaattcatgctaaatctattgtgaaggatatcgcagcatttccggatttgcatctatgcggctgtgcctaactggcgagtactgtacactctacagtctaagtggacactgatccgccagatgccgacctgtcacctgtgtgcactgtgattcccgtgatcatgtccagggaaccagtaggctacgtggaagaggatgtgaaaaaaccacccatctctattcgacggccgcgacatcatcctgtggggagcgagctgtggtgacaaaatcacagaacgacaatgtcacatggctacattgtgaatatgtgacaaactgacaacaggttgtttagttttccatgattaacgtatgctgatgtacaaaaactgtgcatgtttgcccggcatcgtgatggactgatggcttcgtgttcgctgggaccggcagatggcatggctaaacgaactctttagattcacccggacggggatgcaacccaagagggaagtgtctgccgtgcacggttgggcaatttcaagtatccttagcgtagcttcaaaagatgtctatcatgtcggcttcacgaggcaaaccagggcagagcatgtagaggtgaggaatgctatcaaactccaaatcgtgcgatgatcatgacagtgtttcgtggggaagggaatgcagtggaatgaaattatctgcattatattactttctgccagtaaaaacgaagactgtggtttgcggagagacattgtatcaccggtcttgcactagcggaacttccgcaggtgagatctgattccgttccatcttgggggtgcaatgcttagaaatggaacacacaatccaacaacataaatggttagcaaaaccaacagcagaatttcaactgttaccagcaaatttacacacatcaatgccttatctgcaatggggagtactttccattactgctgcacccatcaaaatccatcctcttcatttctttcctcccttgcccatttgcccaaccaagcctcagctgcccccgcctaataccgtcgccgatataaccaaccagtctaaccaccactacacactccactccatttcccactcgactccatccagacattgtctccaatgtcgccgccgccgcttcgcctcctcctcttcctcctcctgctccacctcccctcctccctctcctcgcgccaccaccaccacgccccgtcgccgtccaagccggcgccggcctcctacgcggcgccgctcgccgtcctcctcgcttgcaacgccacgcggttccagcccgcctgcgtctccacgctctccaacgcctccgccgacgcgtccactccggacctcctcgccgccacgctctccgcgctcagggcccgcatcccgccggccgtctccacggcgcggtccgtcctcgccgcctcctccaacgtcaacctcaccaacgccgccaccaactgcctcacgttcctctccttctccacccaccgcctctcgccgccgccctcgacgtcgtcgccgtcgctcctctccgcctccaccgcgctcctccacctctacgactgctggtccgcctacaagtacgtcaacttctcccgcaccatctccgacgccatggcctacctcgacgacaccatcgccgtcaacagcaactacatctccatgctcgccgcgctgcagcgctacggcgacgacaccttccggtgggccccgccgcagaccgagcgcgacggctactggccgcccgcggcggcggggtccgccgccgacgaggacgcgctcggcgtgcccaaggggctcccccccaacgtgacggtgtgcggcgcggggtgccactacaagacggtgggggaggcggtggcggcggcgccggactacggcgacgagatgttcgtggtgcacgtgaaggagggggtgtacaaggagacggtgaacgtgccgttggagaagacgaacgtggtggtcgtcggggacggcatggggaagacggtcatcaccggcgacctcaacgccgacacgccgggcgtctccacgttcaacacggccaccgtaggtgcgtatacccgtaattttttccccttctttcaacgctatcttgtctttgtacgtatacggtagctggcacagcgtacgttttttctctacggtggtacacgtggtacgtgcatgaatcaatgcggtgtcattagctgctgctcgtgaccagccaatttagcactttgtctgcacctaaaatgcctttctgtgaatttgtgacgtcggccattaattgttggcttttgtgaacattgcgttcggcatgcgtgaggatcctctgacatactaccattacagttattgagagcatccacgatgtgagacactcctagatgtgagacactcatagagtatcttcactaactaaagacactcataaggaaacttagcttgtgagacactcatagagtatcttcactaactaaaaacactcataaggaaacttagcttgcaatagaggacacccctggatgtgctcctcaaaatctgaagaaacttaatagagacactccaacccacaatgggtatcccagcccacaaagtcccatgtttatttttactaccctacccctaatctctctcccgccccctctttttttcgccgccctctctctctcgccagtgtcgccaccgccccctcctcttttttcgccgccgccgccgctcccctctcccttcgctggcggccacgaggacgatgaggagggccgcctctcctgtcgccggcatccaccgccgcccctctctctccctctctcccgtcgccgctcgtcgttgtcttccccggcatcctccgcctcgcgccgtcgccggttgggggcgccagatccggcgccgtagtgggcggatctgggccccccgcggccagatttgggaggcgccggcggtggcaggcacggcgccggtggtggcgagtggcgcgtggatccctcgtcgccgccggaggtcgcgtgctgcgccgtcggatccatttctctctctctctctctctctctctctctcgcgcgtcacggggtcggccggaggccgtgtgccgcgccgccaccccttttcctccgcccgtcgccttcgcggggtcgtcgccggtcgtcacctactcccaacgacgagggcgaggggtggaacggtaaaatgtggggtggtagcggtgtccatgggacactcacctagccacgccctctgcaatgcgtctcccggctcggtgtctcagctaaaagttgctaaggaatgcgacccctagcgaggagccgcgcgcctggcagtggagaaggtccgactgaaaagctaacggagggcagacggccgttcctagggagacgacccagggacacccattgtggatggcctgatatatggatctcacccttctatcgttctacgtgtcaatgtctgtaacaagaatgtcattataatagatgatgtgaaccctacttgactacgtctatattaggaagttatttaaccatgagaatgtgaaaattgtacccccaatatctcttttccactgtccatgataattagtcagacactaccctaccctagtcttacatggagatcaacgcaatccctgatgcattttttatcgctatttatctaactatgtatatttgtaaaaaaaataccatatattaaaatataagtttcttgcagtgtttttcatgaaaatctatcaatatggttttgtgtgaaatctaaatattttttaattaattaagcatgtaaggtttcaaggtttgacttcacgcttttaggacatctgtttagtaggggaacgccatttgtgtgatggtgagtcgtgtatatatgactctacctacgttagttcaaattttgatgtacaaatatatttgtgtgcatgtctggttatgttcagggtttacattaccgtcggtaaccacgcggttaccgcagggtacggtaatagaaaaaccgcggtaacctccttaaattcaaataaatttaaaaaataatttaaatttttgataaattttgcatggtttcgtacgggttttttcacggttactgcgtggtaaccgtgcttaccgccgaggcgcggtagtcccggccccaacggtttggaaaccctggttatgctgtgtttagttggtgttgatattttttttataaaaaaaaaaacttgtggtagtaccgcatgcagttaatggctgctaattgccattgaagtgctagagtaattcattggacaattggacagatatgaaatttctatacactacaaagatgattccaaatctttaggtacatggcccaccaatttcctggtagccctaaattttaggtaagttttggccctaccaatattttgatagagaattctattgatgtagcaagtattacatttaaccccaaacaccacacaggtagtactatttagactacaaaatttagaagggcaagatttggcactgaactaaaacaatctttttcttcagaattaggctctgtctccagacctttggaggagaaagagagtacaaaccatctgggatagtgggatgtgataaatacttgttgtgttttcccccttgcaaatgattaatcaatcggcttatcgcgcaatgaaacattcgttcttttttattcgttcttaggccatccaattagtgtggccggaagcgacaatgcgtcccagcatcacgagcctctctactcataggcaaagtaaaagattgtaccttttcgtgcctttcccttttgttggtccctgccaaacagatagccaaactaggcgtggactgccgactagacctggcatggttcgttcggctagtcacaactctcagttttaactttaccctgagatgtactatctgtcacgagacgtgatcgtactcgtgctcacagtaatcctaatccggctgtaatgtgtttggtgatcttaatctcttatctgtttccaggcgtgctcgcggacggcttcatggcgcgcgacctgacgatctccaacacggccgggcccgacgcgcaccaggcggtggcgttccggtcgacgggcgaccgcacggtgctggacacggtggagctcctgggccaccaggacacgctgtacgcgcacgccatgcggcagttctacacccggtgccgcgtctctggcaccgtcgacttcgtcttcggcaactcggccaccgtcctccgcgacaccgccctcatcgtcctcccgaggcagctccgcccggagaagggcgagaacgacgccgtcaccgcgcaggggcgcaccgacccggcgcagcccacggggatcgtgctccgcggctgcgtcgtcaacggcagcgacgactacatggcgctgtacagggagaagcccgacgtgcaccacgtctacctgggccggccctggaaggagtactcgcgcacggtgtacgtcggctgcacgctctccgagatcgtgcagccgcgcgggtggatggcgtggaacggcgacttcgcgctcaagacgctctactacggcgagtacgagagcgccggccccggcggcgacggcgccagcgggagcaggatcgggtggagcagccaggtgcccagggaccacgtcgacgtgtacagcgtcgccagcttcatacagggtgacaagtggatacccaaaatacattagttagagcagcataaaaagaagtaaatggtggtccattgtgtgatcccctcgaatgagatggtgccaaactgccaacggcgtatagccatttaactgtgcaaacgcattgtgccgtgcataatgtttaatgaaagggtggccaaagccttttccttgatcaatgaggatgtatgatctagtgctagccgaccgtgaacgtgaaggctaaatctatgaaaagaaacagctgaaatttccaattttgagtcggccgagtgcggatgcagacaagcagataggttcggcgtgccgcgtgcgctatccgcaattagcatgactgaggcgtcgccagaacattatcatctcgcctcactcgtagtggtggtccatcaggccatcactcgcagcaaccttttttccgccgtagcgtccaccgaccaccgccctcttcaccgccccatatgcagatgtgcgcaaccggccctacgacccaacgagcagaagtactgaaccaagaccaaccaacttcggagttgtgctctgcgcctccgcctacccacttcggaagtgcactggacaacgaatgcgccgtgacgcaccagtcaatgtcaagtaaacagaagcgccaagatgtttgtggatcgtcgatgctaatccacttcgaacctggcaaacgaccatctattcgactgtaggattgtagtaaggaacatggacaaagggtgttgactgccttttgaatgagattatcaaatgcgacacagaatttacgggcccagcccaacttgttcagagaggccttctttggacccttgagttcgaccttcaagcccaacttaaccaacttatcattttagatagaagcagattagaattttgaaaaggtccccaatataggtccgatcttatttagcaaccactaaacccgtgcaaaaaaactccttgacaatgttgatggtcgtttttactaatgtgacattcatgtgatagcccaatcatcaaagaaatttaaaacatatatatatatatatatatatatatatatatatatatatatatatatatatatatatatatatcccacatgtaaatgattaaaaaataataagtcaatcaactcgtagggagctgctggaaccaccaccgccttccacgcccttcctgcttctgacgaccatggcaccccaatcctaggagagaggacgaaaggaagaggggaatagtcaccggtgccctcctggctccggttcatcgccacctccacccctctcgggctctctgtctctactgtttgttggaagtgtgatgggaggaagagtgaagagaaggaagaggaaagagagagagggagacgtgatgaagaatatgagacatggacttacatgtgggtccactatttaaaaaaaactagtatggtggcctgcgcagcttgcgcggctagtatcattatattttctctcatataataataatatatatgttttctcaatatattattcaaatatattaaaatgatataattttaaattttgcaataactttacgaaactactaatgggtaatattcatattgtattttatatacgtgttagttattaattatttttaatatcaaattttaattatttgtaaattatatatatatatatattcgtatatgggctctagactcgtcttttaatatttatttttttaattccgaattttctgtaaattgtatttctatatagactctatgctcttattataatattatttttttatttctgcatttttattatttttaattgtatttctatgtgtactctaaactcatctttcagtattctttaatttttaatttcgaatttcagttacttctaaattgcattcctatattgactttaaactcttcttcccatatttttcttaatctcaaattttagttatttgtaaattgtatttttatacggactctaaacactacttttaattttattatgtttgttctgaattttagttagttttaaattcactctatactcttcttctaatattccttattattttaattccgaatttctatttttttcttaattgtatttctatatagactctgtactctacttctaatattccttattttttaattccgaatttctatttttttcttaaattgtatttctatatagactctatactctacttctaatatttcttatttttaatttcgaatttctattattttctaattgtatttctatatggactttatactttacttctaatattccttatttttaatttcgaatttcagttattttctaattgtatttctatatggactctagtctcctattctaatattccttttttttaattccgaatttcagctatttctaaattgtatttctatatgaactctgttttttctttttctccgattaatgtgaaaatttctagaccatgagagcaaacgtaaagactcatttttctattcctttaataatatatataatagatagatgtgccacgtaggataaagactaggttagtgtgccggcacataagacaaaaaccattgtccaaatcacatgtggaggtaaatttgaacctgtattaatagtagagggagtcgttcttaactggttttatggttgtacgaataatatccgatctatattttttaggaactctgattgaactttttcctttgagttcggttcatcctttgtacacgttctccttgtgggcttctttccttctgtaccggatgaccacatgcccactactgagccctcacgaggcccaccatatccactactcgaacacgaacacgagaacctttacgagggccaccatatccactacgcaaaacacgagcaagaaaccaaccgaatagtccaatacgtccggcccgtggcatccgtgccaacccatcgaccatccggctaccgagcagcacgccaaccccaccgggtgcaccggccgggagctgccccgatccgctatttctgagcgaaaacttctccgattcgaagcccccgcagccgaactcggcgaagtccccatgccaatctgactagccgcccccgatccgctgccgctgccaccggcatggcagatggcatccccgcacacgccgtcacgtacgcggtacgtcccagcgtgaggaccggccggccctcctccgcgtcgacggcgacggcttgcacaagactgtagtagggtaatcccttcgccctcccgttttctttagccggtcaaagcacgaaagctggcgtctggcctggcaccaggtacgacgagaggacgcgtgtcgcgggaagggtccctccctgcctagggcagtgggcactggagtggagtcggtccatgccctaccatgcgcgacgaccgctcgctttgcctgacaacgctggtgggtgctgcctgtggcgcagggccgcggaagatgacatactacactcggtggccgcgccacactctcgtgctcgcccggacaagggacacccggactccaacaccaccacgtgtgtactcctaccccgtacgcctctctctctctctctctctctctctctctctctctctggacggctgggttggtaggatttccacgatattcgcgtgaaatgtctcgcagcccactgggaatttgtttatgttcgtgctaagtcgtaacaagtccagcaacctcataaacaacagcttgatgaaaccttagtagctgacccgtttcgtttactacgactcctgtagatttagctagggatgctcacgcaattcacattttcctcatgtttcagcttctggctcactgcatttgcaagttacttctctcacaaaatttgctcatgtactccgttagctgtgtactgcccccaatgccaagctcgtggatgaacagtaccagtatgtagtaaagtaccagtagatgcataaatgcattataccactactagttcttgagaagtaaactagtcaatcacttgtgatgcaatcctccaactactcccatcttgaaggacaagggaagtactactagaaagagagattaggagtatctttggcgaacgacgctgctagaaattgtacagcctaacacttctgctttagtcggtgcgttgccgttggaaaagggcagcagcatgagctacccccgaaaggctgcatctcgaaggaacggaagcatggctaaataattgatactgggaaattatgatgttgttcttctttggcagcatggcattgccaccagatctcttcagaaatctggttgtgcccatgttccacacctgcagtgagcagcagtgcgtttcaatgctgcattgttaggttggcactgcctctctgcctgtgcagctgtgcatcagtgccccacgaatggggctcatcacttgagttttgaatgcatgtttgattgcaagtcccgcaattaattgctatgagaaaaacaaagattcccatctcttaagccttaactaagtatgccaaatataagcaaagcatacatacaacctcgtgtgcttcagggacttccagtgcaaaatggccccagctgctccaacgtccaaccatctgtggatgtcagccgtgaccgtattaatccaactcaattttaaaacaatactgtatttcatgtcaaaatgaggcagtgtttgctggtcagcaatctcatgttgcgtcactccagattttatcaccgaaacagttcaaccaccatacatcgaactaggctattgcagccgagcaacaaccaaccccagactgaccaaacaattcatgaacagaaaatttacctatactgatgaattattggccaaaaaaccaaaaaaattgtgagctatcaaagcagccagagtggagccgaagccatgatagcaaacacaaggtatagttttgtcgagaaacctaagcatagctacctttacaagctgttgctatgtatgtatggagcttagaagtttgtatctggtatagggctatctacacatctcatgaacttgtgaggctcgcggtaggtgtggccggcacagggttttccttcgttgagttcttggattcaccccagtgccataacatgctctcccagaagcagaacttctcaaagcaagttttcagcctaggatcagttatgttcctccgccaatgtccatcggtgaagtttgctttctcagcctgcctccgatcccactccaacccagccttttgccttgatctcaaaagacaatagtgctgaagtttctttggcatcttgtcatgtaccttccaccaacgggcatgtgcaacatcactggcaaactcccgcagtatcgggttattccagttacagtcgtaatcccggaagcacagccatggtttgagacccaaatagtgaaggacatagaggattggtgggtcagcaccaaacaaccgagtcttcttcactttcacttcctcttcatccccctcccagaaatgttttaagaagttcatgtgcttcggaattcgatgccaccatgtgaatatctcattcaggtatccttggtcaccaccattgtaggatgttatctcattgatgtggtccatcaacaactggaatgtgcagtttgaaggctcaataaccattactccagagttgaacagtgtcgcattgttgccggttgcagtgatttctggcattgcgaacagaaaatcgacatttctcagaatgaggagatcagcatcaataaatataatcttgtcgtaatctgtgagctgccatagacggaatttgctgtagttccactcattatatgcatcacgctcagctttcggattccggatcctttggattattctaaccttccacccagcagcttccaagcccttccggtggtggttacttatggtctcgtcaacaagaataacaaaatccctagttgatccggcttggcgaatgctttgggcagctgtgattgcaccacagacatattcacttgctgaatgcagaatagtagcatatgcttccctccgtctgtctaccgagtaaagtcgtgctgtaaaggagatgaaagatgttatctagtggaaatttcaatgccacgcaggaaaataaaactagaaggtgcaaaagtatgttctaacatttccggacaaaatcaccaaaacattactgatacatctgcgataaagcaaccactcttgctcattcccgaaaaagaaatgcaatggtagattctaaaagcttacttacagcaacatcgatattttaactacttcatatttggctctcttgttatatatcatagggattaagtggcatgaaatgggaagccatttaaaaatgaaggcagtaagacataccttttgctttgagtggaacagcaagttcacaggatccaactggaagtctgagcttctcccttagtgccttcaagtcaggcttgtacatccaagcattgccttcatgtttcacaaggttcttgcaagagaagagatttggaatagggaagcaatccgtcacaaacagcacatggataccacgattgcctcttgaagcagtcactgccacttttgcagcagatagttgcaaatgcagacgtgcaacgtctcttgaccatccaccagctcgggtacagggaagtttcacagcaacaacatcaaagtgtgtccctcttggaaaaataggatctggaagcgatggacacgatggtatctctgtttcttcctcctcatcaatccattcagggtaaagagtctgccaggtgatgctttccttggcatgctctagcctaatgatcgaaaaatcactatccgggagcaattgtgtccatgagccaatttcagtgctgttaaaatttaatagtccaactttgagcttccgttcaccatcattcagattttcgacggttttatatacatcctcccactgaacaccaagcgaagatacatatcgtggatcaggaatggtcttgtcccatatccacccactgacaaacctgtaaagcatatgaaaggtatggtcaaaaagggtaatgcgcaatttcttattatatataactccaacataaccactgtgatgcgagcaggaattggtgttctagtttccactggatattctactgctgacagaatattgtaataagtttccttttgataggtctactcaccgagaactagactgcatttgatggtcgtacacagatggagtgtacaatagtgtcagaaatgcagcagacatgatcgcgaagagcagaagttgtaaggaccggaacttgcaaccagagcttttctctaggacaaagacatcaaatttttcgacctctttgaaacttttgcttttctgggtccttctcttagctgtgtcatccctgaaagaaggtatagaagaaacagtcagacagcgacttcttacagtaattatttgggcatcaaataataattggtaaagaacaattcagaaagcaacccctgaatgtaggatagtcagcaagatgaaacaaaactttggaatttgcaccaggtatgaagacacaagggggaattctgtctgaagaagaaattgtatatgaaagaactactgaataaataagtatgatatattttccccaaaaaacagcttacattgttgtactgttttatcgaaagcacatggaagtaataaaaattgctagccaaggtccatatcaattgtaaggccccattgttcccattagttaatcccaaaaagatagcttagaaaacatttttcttggtgatcatgttttgttttcctagaagtttgcactagtcttgtgtgtatttgatctggctggcctatatggacaaacagccctagtaacactaaatctataaaaaaaatatagcacatcttttcaaaggagtacttaatctctcatacggtagtatggaaaagcgatcatagtaaagttgattagctatcaaagaaaaaaggctaaagagaacaaaatagcaaggttctccgcactgagaattaaagaaaaagattagcaaaaagaagtggtgccaattcattttcctccattcttcctttattagtcacaccacatcttttaggaaagaaaagcatcactaatcacaaagatactccagtacctaaccccatgttattggtctcaaatttaaaagtgcgcttagcgatttaaataacgttaaacatgaaacgaaaagctgcactcatgggtaatcccagctgtgaacaccaaagctttgtcaagaagtttgattcaaaacaacggagccggcccctgactactgaacccactagactagcgtgcatcgaagcatccaactagccaaaacccagcattctatacacacgctaagctcgcccatttggcgctgatgggccacacaggcacaaaacaactgtagcttacgcttcaacgtgcctaaagactggtgaccactgaggactgcacatggaactaatgtgtgtagcaattttaatggcaccggcgatgcaaggtgcagtcattggggtcaaattggcagtgaaaacacatgaccaccgacgcctggctccacatcacagcacatccaatttaaccaaattgcagccgctaaaaaggggatcagatggccacaaaagtaaaaccaactttccgtctggagataaaggaaaatccgcaaaaacagacatccattttctccacacatcagcatcaaaccaactcgcatcaggagcagcagcacactagaaaagagagagtaaaacatgcagagatagcacgtttctgctgttctctgattctctcttagctgtaatcagcagcagcatcaacaagggggaggatggaaaaaaatggaaggatggatgccataaaagctgcacaactaccacccaccacaccacctacaatatgagggaagttaaggaggagagcatgatgaacggagaccaaaaggagaacaacggcatcttgtacagcgtactaaaaaccagtacaccatcaccactaccacctcctgcaagaataccacgacgatatggccggcgccgggcgccacgcatcgaccaagaagtagaagtaattagtttttgagtcaatcgaactcgacatgcaacacatgatagcacatggcaaagcaacgcaccacagtagccgggttagcaagcgagcacatacatcaaagcatgtaaaccagctaaagagagagagagagagagagagagagagagagagagagagagagaagaacagtggaagagaggcacgcaaaggtggagcctttcttcagatcgggacagcgtggtggtagggagatcttacgctgctccggccggccggtaccgcgtgttcgtcgtctccaaagaacccatggggactctctttcgttctctgcgagcccacctgaatcttcccccgagccgtcagctatggctctccggtctcaggcggtggccgaccacactgtcgccgccgcggtggagcagcttctcatctgaaatcggagcaagaaacaagggaggattcgtgtgagcatggagttcaccgaggcaaaagaaaacaatccaatgcggccacagaggacgaaggaagagagagagagagtagcaggcaaagaactgaaattttcccgagaagaacagcatcatagtgagagcaaagcccaggagaacaactacacacacacaccaaaaaaaagagtaaataattgataaaaatgcgaagtagaagggagctgcaaaatccaacatcgccactggctaggagcaaggcaacagaaaaataaatctgctagctgctgccgcgcaaaaaaagagagaacccggacaccgaatcgagcaaatggtggcgccacatcgccatcggaaaaaaaaaacccagaagcaccaagcccggatcgagcaactcccaccggcaacgcatcaaacgcaaaccagatcaagaagagcccaggagcaacacaagaacaggaggcacgcagatgccacacggtgaggaagaaggggaggaggatgctggatgcagcagcacacgcacccgcagagaaggcggacttgggagcaccgacgggcgcgccccggcgtcggcgtcgtcggaaatggccgcagttggtggcggccgagtgggttagctgggtgccaccggctctctcactcctctctctctactctctctctctctctctcgctgtgcagagctcgcggccaagggggtgtgaggcagcaggagcgcgttatatacaggaaacaaacggggagagacgggggagaccggagtggaagcgaagttcttcaccgatttttgcccatttttgccgccccgcggggccaatctcgtgtacgtcaagggcccagatttggggatgggctcacggtgattagcgtagtcggtgagaattgttaggcatatatcaatggtggcaaagaagataatggactggaatagaagaagttaatggagaattatgcatgccaaaattggcgtatattcgtcctagtttgtaaccaaatcaaactgggctttattaaaataaagggacaattgtttttttaccctaattttaagactaactctgttttttcgactttactcatttaaccttcttttttttaaacgaagatgaggtttggccctattccgtgaaggcaacgtgacggtgttaactcaagacaaaaattccaattatacccttgtcaatttaacccagtttctcgtgcaaatttgtgtccaccgaaaaagaaaaacatgtcacatggtgcgctgccaccgtcggtgctccctcctctccgcaccaccaccgccggcggtcccttcccctgtgcactaccgctaatcgcccgtcgccgccgtcctccctgttctagtcaaggaggagcagcgccaccgctcgtcctgttcagatcgaggaggagcaacgccacagtcgtcgtcctctaggcccttgtccgacgccgctcttcgtcgcaccgccgcggccctccacccgcaaccgccaccacggcaaatcccttcacgcctcgacgcagccgtcctccctccctcccttcgtggcccgccgccgccgcccctcgtcgagccacggcagcggcccctcctcgacgcgccgctgcggcccacccaccgccgctacctccacccgcagctggtgtcgccatcctccctccgcgagctggcgccagcgcggattccctccctcggaggcccgccgccgccctccatgagccgccgctcctcgtcgagccgtcgcagcggcccctcctcctcaacgcatcgccgcggcccacccacagacgctacctccacccgcagccggcgtcgccgtcctccctccgcgagccggcgccggcgcggattccctccctcagaggcccgccgccgctacccctccgtgcgtcgctgcccaagcacacaggatagggttagatgtgcataggcttggagggcattttggtcattatggaaaataaatttatttcttttatttttttaaatgaaatcttaacggtgctaaagaaacagggtcaaacggagtattcgtttttaaaaagtaggatcaaataagcaaactaaaaaaaagtagggtcatattgataattaggcttcgaaagagggtcaaataagcaactttccctaaaataaaccggtgcaaatttaatggcttccaatatgatagtataacagactatacagtagaataaatctcctacttttgccagagtgtttgtagcacttcgaagtacgaactgagcttagctcggctagttatgtccgtggtagtaaaacatggccacactcgagtttaaattataaacttaacatgggacttgtatttacattaattatttttcactattagcaatatacccgtcaatagtgaaatggttctgatatgcttaatcaaccttcaaatactcgtagaggtaagatgtacttcctccgtcccaaaatataacaactttagccatcaggatttattctaaatataataatttctccaccaacattctcttcctcaccaatcataaccctccatcattcactttttccacctacctctccactaatcatccaatcacaaccctccaccattcacttctagtaacgtgtttaactctaaaattttttatattttgagacggaggaattgcattgcaaaaaacattcgtagcacaaaaatcgttgataaatcttaaaaaaaatcattggctcacaatctaaggtgtgcttggaaattcccgttagagtactttctttacagtttatttcactaaaatattcgtagattatttgttatacgcttctaaaaatgtgtttcctagaaccttaattttgataacttattctaagttatttctgaaagtttattttagaaattatgtagataattcattacattaattcaacgaataatcttcaaaagttgcatgcaagttttcaatgagttgaaaagaaaagcgaaccatgtctctatcaatatcaaactgcatgtgtaccttaggccttgtttgtgattgtgaaacttctaactgttgtattatctttcaaaatctattgcttccaaacaatttcctcgggcaaattcttagaactcatagtggattttttttatttttaaaaagttttattaatttccaaaaaatatttggcgtggcagcgttgttttgccacgcctgccacggtggtgtggcaagacaacactgccacgccagctacgcgtggcgtgacaaagtgatttggccacgccatgacaaaaggttcagatttagaaataattttcagaaatgtctattaataaaattttaaaaaaataaaattctaaaaaataattaaaaaaatcctcatattgatagaattaaaataaataaattagaaactggaaattgggttcttaataacttttcttaaacactcacggcagggtttacgattccgacatgcacttccattttgggcactggcggaattcagaatttcgtgaaatccggtggaaaaccggtaaattccgaataaatttcacaaaccaaaatttgaatacaaattctctgagtttgccgataaattcttgaaaaccggtcggtttaggcgaaattccgatcgaaatcatcgaaatttcgatcggtaatccggcccatgtaagtgttttcctttttttatttttttattcttttcttctctgatgtaagtttaaatacacataatatatcatttttttcgaaaatttatatcccaataggttctatgaatatcatagtatttataagattttatttgattttttcttttttttatcaattcaaatttaaatttggatgaaacttctcgaaatcttagatgatttctactttcgagactcgtcgaaacgtcgaaattttgcgaaatccgaccggatttcgtcggaatggtaaaccctgctcaccggctagcttggcattagctgccttctcaaatactagtgcctaaagtccacagagagcttcctgtacgagtttccatgagtttataacaaggttatgttctaaaacgagtaaaaaaaccctgcagttacggatctgtcctcaagtcttttggtatttggtttcctagccaaggccatcatgctaatcagcttatatgtagtcaagtttacatgaagcatgccagcatggtgctactgctacggagtagaatctgggcgttcacataaccttgtgtaaaatggcatccaagtcgtctggtttgacccacgttgacgggtagatgagatcagcttgacgcgcttaggcattagattggggcaaagcgtctctctgcgtgaatccacgcctaaagacagagctaaacaacactctactctctctaggttggaaaagcttaacccagtggtcattaggaaacttccccgccatagagttctcatcctacccaagattactttacataagcttttgtcactattaacttctaatcagttcagccgtctttgatcgctatgtagttgaaccatcctctctttttgtcctttgctactctacctatatatgcaaagttgtgaccaatgcgtgttctctcaaacctaattcaacgccatgcgtgcatgaacccattcagagatcaaacaatctgcagaaaattccatggtaaacggttaaaaagaaatttccatgtcacaggtatagggtcaaattaaacatttgaaaaaccaaaatttccatgttgaaattaatggatcgatgttacggtaggattaggaaactgcattattcctgaacttttacgtccgtttttttcttcccttctcgtcagacaaacgctagtgatgctgttccaggccgaatccatgacaccatcaaaggaaacggctgtcaagcctggattgacgggggccaacgggcgctttcacatgtcggagacgcaaaaaagccactttgccggccggcgccaacacattgattggctgcttgagacctgttcacaagctagctcatctcgtctcatgagtcatggaggccattacaggttttcctctccaagacgatgctgctaagcgtcgccatgacaccatggaaaggaagaaaaggaggggaataaaaacggaaggtagctagcttgtgccgctcaggccatgaatgcattacacctcgaaactaactaaattctatcacatcgtcttaactcgattgtgggcttaattaggaaactgtcctcttctggcgtcctcccattcataggcgataggtcgttaatcacctgtttcatgtaaacactattgggtattatcactagggatggcaatttcccccgcggggccgggtcctctgcggggacccgcccctacggaggcaggggcgggtgggatttttcacccgcgggtgcgctggggtcggggccccgcatttggccggggaggggacggggggaacatttcactcgccggccacatctcggcgtcgccactcgccagccaccatctcccctcccctcctctccaatctcccctccggcgtccggcctcacgtctcccatcccctccacggctccagctcagggcggcggcgacacacagggcgcggcggcagcgcatagggcggcagggcgcagtggggaggcgagacaggcaagggcacgcggcgaggttgcggcggccggcgagacatgcaagggcgtggcgaggcgacgggcgcagccggcgaggttgcagcgcacaggcgtggcggcggccggcgattcacgtctccaatactcccaaatactctaggcgattcacatgcgaggtattgctccatctccaatactccaagtctccaactgtgccttgtgaatgaaagtgtgcccaaatgcatgggttggtgagttggtctcttaggagataatccatgtgatgcactgagttgataattgtcttgaattttctatgttgattggatgaagatgctacttgctgcgggtccccggtcgggttgcggggccccgcaggggtcggaggcgggtgggatttttcacccgcatccatggtcggggccggggccgggtggtgaagtcggggggtcgggggcggggccgttccagcccaacccggccccgcaacgcttaccatccttaattatcactcaaaaaagagggcgttggtttaagtagggatgggcagaaaaagaccgaaccgacaagaccgagaccgagaccgagaaaactggtcatcaatttggtcctgggcagtgaaagaccaaattttgttcagtcaattctgttagtctcctcggttaaacgaataaaccgaaaagaccaaattaaaaaaaaaaggtctaaatgcaacctacaacccactaagttcaataggattaaactctaattttcacatccctactcttataggcatgcaacctaataagagtctttattcatacttgcttatgaattttttttgtgatttttgtgttgaaaatttctattatttctttacatatatgaaaatgttgctgaatttcggtcaggactgagaccgagactgaatttatcggtcctgatatttttgtgttggaattcggtcttcactcttcaaatactgaaatgaccgaaagaccgaaggccaagacagaaatttttggtcagaccgaatgtccacctttaaggtttgagagactcttttggcatcacacgcttcgttacgaaaccgttgttttctgtcaaaatttgcaatgctacctaccgactattttgatctcaccttttatgttctccccttttcttaccatggacacctgtgatctccaaaacgggtggaaaggagatcgtggaagaaataacattagattactcatgttagtagcaccgttgctctctttgccctccaatttccagaagtgaaaaaccaggcgagtgtaatgattggttatgtgggcaccacaagtagcctacaacatcattacacgaaaatacacgaagcctgttgcttgtgattaactcgcaaatatacttgtggtgctgagcaaataaagggtggtataattgtcctccattgtgggcagtggttggcagagaaggctggcttttgttaaactatcgcacaagaccagtggatgtgagctttagataaggcaaaaaaaaaaggcatcgtggattgctaggctcctcttataccatcacaatttaataacatagcctgataagctcatgtggaattaacaaacacagttgcaaagctactgtaaaaaaagtcccggtgttagtaccaactacatgctttcggttaagaccagtagtcatcagtcatcactgggcgctagaaaaacaattcagttgctcgcagagcccacggattaaactagtgacaccccccatatgatctctagctcaaatccatcatgccaccatatgcgtgatgcatctcaagatacccttgcctcagcagccgtggctggacgatgccttgagatcatttagtttaaagtctccggcaacagtaatcacattcagatggtaacactccccattggcccattgaattcttctagattcgtgccccgtgcccactaaccgtacgtcctttatacactgcgagatgtacaaagcgtactactcctactgtagtaccatgctctgttttcccctgccccacgtggagtgaagaagctgggccagtgcgtgtagcagcagtagcagtagtttagtttaactgccatctcaatatctcatctcatctggtatttattcgtggcgtgtatcgcgtccatcacgagctgcctggtcagtttggcactttgaatggaggcatgtgtgcgtctgaccccgaacgggatatggctgtgtggcctcaccatccatccatccatccatctgtgcaaaagtgcgatgggctgggctcatgcactgcactgggtgggacgtggcggtggtggtcacaggaacgcagctctgactatcgcgattcgaccacatttacaccgggcgctgggtggggtggttggctgcctccgccaccgcgcgcgccggctcgcgtctcacgctcgccttcaatgcgtccgcaccggcgcgcggagaaaccactcatcatcatcatcaacccaaccccgtccacgcccacccgttgcggagaaaaagccgcccgtgccgcacgtcgcagcggccgcggcccctctccacacgagagacgcaccggcgcgcaggcgcgcgcagcaacggccggctattacgaggaggaggacgacgtggtgggacgcctttttggcaggtggtgcgcggcgtgacggtgacggggcgcgcgcgcgctaggaggcaagcaaccaagcaacggagaaccgtagccaggtcgtgtgcgaagggacgccgaacgatcggacgcggtcggggttgggggaccatgcgtccatgcggtgcgtgtccatgtggcctcatgggacaaaactcgcagggataagtactggaaggaagggaaaaaacgggactgggtgtctgggtgggaaagaaaaagggaaaccggagagagccagtcacagctcacggttctgagacacatggaagcgtgtagcctaccaaaagggccaaagaaaaaaaaaagaacttaacgcagggatcccctgaaagcgaagtggtcggggtgctgtccttgtccagcctattggttcgaaccagatctcattaattggtgtgtaccgtgattgaaagggccgtaacaaaattcttcccgtgatgttgatgcggcaatgccctttcctctacgtatttcgttttgtattctgcatttctgcgtgggcgtcgctttacagactagccctctcctcccactgtactgtactgttattgtacaggtatatgcaaatcatgcaccaccaacagtatccttgtatatatcatgaaccttatctcgtttcttccttttcttctgctttttggatggaccagtattttctcctagttgtttacaagcaacggagtgcactgatacgtacactcttggcaacacgccattttgacaaacgaagtccacatgtgacgagcatggacgtgcctatctctgtgttggcatttgtcgagctgaaatggattgctcgctgcatgaattaattgttggccaaatgccaaaacattggagcagagagctccgctcactgattggattgtacaccaaacttaattagattctcgccagtaaccgccaactaatcagtggagctgaaagttggcaggatgctgcgatgtccccagaacgttaattttaacatccatttactatattctactgttgaatctggtcatgaaacaaccattagcgattaatgttagcccaccatctctgtaacagttactcctcagcaaattataggcagatggatgccctcctttagtaagagagagatgatgttctgttacagcttctttgtgtcggcagaaatcgcatggctaaaatggaacggcagaatatcaagcactattctctagtccttgcgaaagcatcaccacactgatggaatatcgcaccaactgcttcaacacattgattcttttttaaaaaaaacacatgttttgtgcgctcgtctatgaaatatgaattaaatgcttagcaaagctacatttctgatttgctttgcaacgttaccacgccttcttttttttttgtaagaatctaatccctggcaaagatgtggaaattatggagtagaatcaagttcgagatgacttctctatgaagtttggctaacaccatttgaaaatacacatatccacagaattcaaattctctaaacagaaaaaaagaacccgagaaaattcattgcatgccctgaattttacctcaatcctttccaggccctgaattttacctcacccctacatgccctgaggttttgttttggtcttatctatatgcttatatccatcttgtatacatatttcgtcagttaactggcaatatttattctaaaatgaccgtattatctatttctcatactaatgatccaacgtaaatcttagtgtgagaaaaatataataaaatcaaatgtgatagaattatttaataccaaatttcttgcgattaaacacaagacaaaattaggctggaaactcatctcccgcgcaagtaaaacagagcgacacattttcttatgattaatatgattttttaaagcaattttcgtatataaatcttttgaaaagtttaatagtttgaaaaacgcgtgtgccgaatacgagggatgtgacttgaaaaaggtgtgggaagaacacagccttagcatacccatgagtacccaaatggtgctgctacattgttttttctcatgacaacgcctctctcaaaagatatgtcattttcagattataagttgttttatccttttcttttaaatttttttaagttcgaccaagtttacataaaaaaattaacaacatctaaaataccaaatttattttattaaatcaaacatttaatatatattttgataatatatttgttttgtgttaaaaaatattattatgtttttctattaacttgatcaaacttttaaaaagtaactagagaaaaattaaaatgacttataatataaaacggagagaatatatcccttattattttggactatttattacaaatacggggcaatatttcggggccatcccttcttcagataaacgtacacgttgagtcaaactgatgtgcagaactgcagatgatgttaataccgatagctttcatgcctcgaaattgaggggaagaaaaacaatactcaagcttgcatgcctcaattggtctttatgatgatcccctaacagccaccaaactgaattgaaaccatgtaagtcattctatcattttctatatttatattgatgttaatgaatttagatagatatatatatatctagattcatatgaatctagatagatatatcaatatgaatatgggaaatgttgcattgtctcgtgtattctacttcattcgtttcacaatgtaagtcattctagcattttctacatttatattgatgttaatgaatctagatagatattcattagagattcattaacatcaatataaatatggaaaatgttagaatgatttacatcgtgaaacggagggagtattatatacgcgccttacatcttttctccgtttcagtcatttgcgtgcatagctgtgtaggtgtgtagaagatatgtttgcatcttcgaaagcagaaaatggcgtgggcacgatgtgataaggcataactagcttcatcttcgtaggtagaatctagctatatatgtaccaactcataataatgtactctaattttgtagaaggaaacaatcatttttaataagaaaataaagtgtgtctagtagtatcctaaaaagtgaaaagggcggccctagaaaaacatattatctgcgatctgaaatactaccaactaacaataatacaatgttgttaaattattcatgcactgattatttcgtgtgtaagcatgaaatctgaacaattcaaaactacaaccttctttagaactaagcgattctatataatctctacaaaggagtggctaaggataactggtgatgacacgctaaaatacgtccactatgctctcagctacgctccacaaataattggagtagaaatctttctccaaacagaagcgcacgacacggcgaattttatccccttttattttttttaaataatttattttaaaaataaacaccagtaaaacttattttcacaattcaaagttccaaaatttctggtcacacgagccccacctaatatggtaaaataacattgttaccccacccacagcggacgtgataattttgttatgctacagtggcatgacagtactacgctgttacaacgttgttacagtcagatcgatgtgatcaaataatgttatcacgttatttagacgggcgtgaccttgttattttactacgacggtctatttagactagccaaaagtttcatatcttaaaaattaaatagtcgaaatgtttatttttaaaattaaaaaggtaaaaagagaaagagaaacgtctctatcttgcattgcatgcccctagtggccttcgctccaaccatccgccgcgagccgagccaacaagccgcccgctcgcgcaaggttacctttcgcgagcttggacactgtgctatacgtaattgaaatgaaatgaaacgcttgccgctgatacgtttttagggcctgtttggttgatgccctcactaacatgcctgaaaaatttaggtgcctgagagctatctgataggatgataaattttacctgctcaggcagcctgaacacttgtctgtttggttgttcttccgcgcctgtgaaaactaaacgtgattaagcttttaattattacggttgttataaagtgttagcaaaaaaaataaaatatttggataggctatatccctccttgaaagtacaaataaaatatatttatatggtcggctgcttttacaatctacagtacctatactacattattataagcggtaattaggattaatgagcgtagctgcgccgtcctggagaaaacggtcgcctgacttaggctaatgaggctccaaaagagctcagggcagggaaggagaaactaaggtcagggcaccaaccaaacaaggtcccggctaatctcaggcttacatctggtcaggcaaatatccttgagagcaccaaccaaacagtcccttacttcacaggagttagcgagtagctgcaacgtgcgcgcagattaatgaatgcaatgcgagacagacaaggatgcgaatcggaacggaaagcaatggcggagcgactctccggccgtgtgatgctattttttaatccattctatagcatgcaaaatgattcttcctagcaggctagcaaaccggattgctgcgagttgtcatcagatcatcgagcactggctgaagtttccatcacattccacgagttggaatcggtcactgtgacagttcttcagatctgtcgtctcgctttgttgctgctctcgtagttttgcagtgctcatgctgagcagtagatcagcaggggttggtgcatcttgtttgcatatgtagctgctcgtagccacgtacaacgagccgaaccacccgcccatctatcgatcgacggcgatggcgaccgcgagacggaggaagagaattccaactgatcaaccgaccttaattacttagctatagcctatagggcggcattgcggcaactttgtcgagtcgcatcgctcaccgaccgtaccacgtacgtccgtaacatgacgacgattcactaggaaacaacaaaaagacagtaaatgttcatatcacacaattggcacgttggcatttaattacccaggaaccaggacgcaagcacgcctaaagtttggcgccctacaagaaaggacacccaatctgacgaactctgtggacttttgttttggagcaagcgatcaagctgtgtttaggctcggtaagatcaatgccaatgcttagctaccttgtcaatgatccaaccatatgctgacgaaaccgttgaggtcagcctgatcaagacgagcgtttggcggccacttggattaaggaatgagtttagttcagtttaggtaagatatgtactcagaggattacataattttacttaacaactaagcgtaagactcttctcaagataactgaaaaatcttgaatatgtatatcctagttgatcgtactaaagtttcctcggaaagaaaagtgtcaactactggtcaaactaataatatgtttttttgagaaatacagtacaaacgcttaaataagctaacatggacatgttatcatcggtttattcgtgccacatttttaaaaatacgatttgtcggggaaaaaaggcatagatagatagctttttttaaaaaaaactttttgttaatttcataataattaatatttaattcatatccatgaatggttgcatcatcttcgattctacaaagagctgcccttcactaccattaaagagcttatgctattgcaagagggaagtagatgaaccggtcaacctatcttctgattactggagaaaattaggggggaacattatcgtaagagatggtttggcttgcataaacgtagcacatgtctttgaagcaaatggattttctctctttttttcagcacggataaaaagcattttctatacggattttcagtcaacctgttaggctgtcacgacgcagggtagcagagacaacagcgtgtgtgtgttgctggacgggcaggcagtcccagcaggtaggagtgtacgcatgttcacaaatcaaacacggggcagcaggttggaactatcgtaattaggcgcgttgttgaagtttgaacttctaagttctggttcaagtcgcttacagttaggttgatctgagctatccgcgcagaaaaataaatatggcctctggctgagaaccatatgcgacaggcatatcacatttgttacacacacgtaaccaaaaacgtacggcaagctcaaaagaaaatccggagtcgtagttccttcggttcacccaacaaattaggttgaaagaccgaattcaaaattctggtaaaataaaaaaaaataggacttgtttactttgctaccattttcaaaaatactttttttttcaaagttttaaaaaagtggctatatggtttgttgctaaattttagtaagcacatataaaatctccaaaatttaataaccttactaaaattttaacaaccttatcaaaatttgacaatgtcaaaacttattaagattgaaaatagtagcaaaatgaacaagtccttcagtgactaacggctaacgcagcacaatcaccgtcgttgttcgtcattttcggcaagcaggagcgcacggcagcgccacctggcaatgcacgagcccgacggctgaccaacacggcggcaacttgccgcactcttccgagctcgatctgatccgttggctcgcttttcggcgtaatgtgcaaccccgttccattcggacaagacgtggcattctcaatttctccaaacacgacaccgcctccgctgtgccaccgtacggcagtaacatctaccgccgccacacgacgaaagcctgacatcgatcgatttcaccggactcacataggatcggccgtactgtaccccatcggccgtcggaggcaaccggaaaccggtcgaccacacgattcaccgacggacgggccagcggcacagcgccgacggcaacgccgcaccaaacgcgcgcgaggagcgagagaccattccgtcctcatcatgccgcgtgccgtcggtgtgagatggcgatctgatcgcgtcctgccggctgccgcccatcgtcgcgcgggggcggggggggggcacacgaagacgggcacacgcggggcggtgcatccgtacgtgcgtggcgcgcggcggcatgggaatcggggataaaaaaatgaccctccaaaacgcgctcggctcccggacttccggctccgcagcgccgcgtgcgttgcctttcgcggaagggtgatcgtgaaccgcgcggcctgaatcggaacgcgatcccagattgacccagcaccaacagtccgggtgcatgcgtgtactcttagcacgcaagtaaccagaggctgatcaacgtagtcacgttcgttcagacaataaaattatcggaacgaatcgagcaggtgaaaattaatccgcgtcgtcaggagtccgggcccgtcaagaccttgcgtggcacagcaagtctagtctagaattcggcacggaacaaggaaattaggaaagcgatagggtctccactgtctctgtcctaagttgacacgggatttatttttgttcgttttgtgattgtaaggcaaacacaatcgtatgaagcacctctgctgccacacagaagtgctcctccaagaatacaagttcatacttgaacccggactcctagtgtaagttaagatctagccagctgccagttcttttctctataccttttgagcatgttctgttcgccccgaatacccatgtttctctacggaacttttgccaaaccatgtacttgctgctcctgcgatcacgtgttgagtcagccaaaaaaaaaaacgcagctgaataaatacgataaggatgtattaaacttggtccctatgacttgcgacaagtactttaaaaccgtattgttaattttgatactgcagatcgcagtgagttttaaatgaagaaaaccagggtggtgccaaatcactttcccaggtacgaatcaggctccatgtgtttccgataagagcgatttgagcgcttggctcgtccctcccccttcaattcgttgtcacattgcacgcaacttgccaggaatctgatccggtttaaacttctctcataggcctagattctagccatgtatgtgtttgctgtccaggcataattgcctgtgagggctccccacgtatcagatattcagatctgcctgtctcgttatctgacaagattaatcattttgcacaaaaatgtacaggttcgtatatagtgctaagctatgattggttttgttctgtttagcctaatagtatcatttgctcgcaccggtcaggaccatgcatccatcttattccatctgcacagaacatgctggggcagatgctgtttgatcgaacggtttcagtacaaaaaccctattctctttaatagaagttaatgatcaatccatcatccggattactaacagatatttgaccgagaatcaaaagattgacggctcggatggcgatgccatgtgataactgacaatactttactcctactactggagtatcagtctctcctgtgttcaggtcacaatatttcgaggtacgagattgatgctgaacaaaaaccatttgggggagtttgtgtacggtggcatcagtatcgtgtcgaccgagaggccatatggttgatcacgagaggtgatagtacactgtgccgatcgatcgtaatattcgtatctctgctccccccgatcaatgaataagcagaccggagcgtcgttttgcggtttgattaaactagtgtggctgtggtggggggcatgaagagcagcatcccgatctgatttactcccatccatgggcttcccatcccgtagattccatctgtgacgcacagacaaacaatgctaggtcaccaccgcgaccgccagcctgtgtgattttgctcatcagtacgatcgacatgtactactgatactacaactagtattaccctctggatacacttggatgctctcccgggcagctggccgtatgccccgtatcgctctctgcgtttcacgcgtccagccagcccgccagctaagccggctgcccatttggcccgtagtgtgcaggccgagatttgttgggaaaacacttagtgcaaatcacattttagataataaaaatatattacatcttcaacttctatcatagacacactgtcataagtttaataaaaaaaagtaaagataaaattaaattaaaatgaagaataaagtgatggaacaaatccacaactcccctttattattgactagcgttaaaccatatagatttttagctaacagtagaggaacaagagacccttggcttccgattctggtagtgtagcactattgcacatagtatcttgctcctcctgtggtaatatcgtaaactaaaattgaagccaataagagacataaaaataacttacatatggttagataattgtttaccattaaaaactttaacattataacaacgccaaattgaccaatatacaacactagctgcaattagagtcatctttttaatggatctagtagagttaaaataaacgtatgagagttgatcatgttacaaaaaatatattactcttggatttaaccacaaataaaaattttacttgctgacatggttaaatatcatgcgtttatggttagacctaacaataattttaatgttttactacatgtatagtttgcaatatatgttgatttattgatttgtttagcctggccgtttgcacgcgaacatgtgcacgcaagacggtggccacgccgccgccgccgagcggtgcgcggtggcgccgattagctggctaaagcccccgagacaaacgcgtcgccgtcgtctcgttgggccggggaagacgtctcgggcctttcaatcaccggtacttggaagagtgtggtctcttcccgcaaagtgatagtcactagccaccgatcatgtggaccgcgccggccacctggctagtagcaaatttggaatgttctgtcctgcgaacgtttacgctgctaatggtggacgtttgtgagttggagaacgccccagtactcctaatacgtggaaaatttgcatgtacaaagatctaaaatcgtgcgcattgtttataagccatcccgttctttgtttatagcggcagagctcacacgaggtgtggggctgtgggctaaaagtcttataggagtatattactacttgaaaattgaggtttaaactgaacacatcaattcgagattcggtacgtgtaaacctaaagttagttgaatgccagtactcttgtcaaacaagtgaaagcccgagatttgcggaatgtgaaacaagaccgttaaatttagctttccttttgaacttttgatttagtcgtgcaggctgtattatgcatagcattctccgcacggcaggggaccgaacttttgaaccctgccatacgttatggaaggtatacaatcataccactagtcaatggcaaattgatgccgagctatatgaagtacgaatattacgcaacgtacactcgtgcgtgcttatggtcaggccagcctaacattgcaaaccaaaaataaggaccgaaactttaattagagctgggcatcgtgacaaaaattagttagtttaggtactagtgacatctgagagacctaacggaatagaatacaatagccgtgaccgtttcaaacttcaaaccctcgtggattgggttctggagtcgggacgcatgcagattcgtataggtcaaaagtttgtcatcgtacagtagtataactcaactaggaacatgaagacatgagcttaatactaattaagtacgagtagctataaccctccatctggtcttcaactaaaagttctgggcaacttgaaggccttggagtatgagacttggcgagtttatcctatccgctactaggggctactagtactctgtctgactcggcttacgtagtaatttcgatcatcaccatgctaggtgcactttattctagctgaacatgcgtgtatacggcatagtactgtggtaggtttctatcggtgatcagccaatctgctgttgacctagcaaaggtcaagttaatatactccgtacagaagattagtacattgtgcaatggaacatggaggttttacacttttactccgtgaaacagaagtacagaagaggcgtcctgtagccgtttacactttaataaagcctattggtattgctgctcttccctgcatgcaggggcgatggaccaaaacgttgtccaagtgtaacagtacatgcttggttatatcgagaagttgtacgcagcaatacgtttcgacggtcgaataaattcccacataatgtttggagtaccacgtttggcagaatagggttattcactgttgaacataaagtgctgtacacttcattacttttacagtgtgtgtggctcttcacgtctcatcaccacgtcggtgctatgtacagtgcctctcccgttcctagccagcttttggttgggactctggtgtacggatacacaattgacaggccattccaggtaggtcgcttttcgttcttttttctttttcgctccgccgagggggcctcgctgccgcgaaagcgacggacatcgcggcgaattaacaagtccccgagagccggaaaaggattgttcttcgaggccgccacatgcgagcagccgatggttccttctcgtagaccaactccaactcaccgccggcgtctcgcgttggtttacaaccaatgagatactactagtaaaatcgcagaatccccactttcgtgcgaaaggcagaggcgagcgcggacttttgtgggggcgaagaacgagaaggctgcgacgcgagggtggggggaaatggtttgaagctttggacttgtcaccccggcgcgcgtgctgcatgcggccgctcgactagagagtagagaacatatgaacgctttgtgtttgtggcctggctcgcttgttgttacgtggaacgcgacagcggttgtagtgatttggacctggggacatacgactagcttgggccggtaagacgacttttaacttgggccgatgtactgtacaagttttctgaaatctgatgtgcgggattatacggtgtacgtctacgtgggaagcagtataagttttctcaatcactcgtagtacgcgtgaaacgtagtgtaacctcagacaacctggtgactctgtgccgcagcccgcaggcctgcatggtgaagagattccggtgatgaactgatgatgcaatgctctggaggcaagtacttctcgggggcctaccacgcaagagactgttactgacatcaacagggaggtgacgcacaggtgcaacacactggtggtcgtcgtcggtggagctcatttaaagttaggggctgtgctgacacgttgcgctggttggcacgcaggcaggcctcccacacggaacacgcgccagccgcctgccgaccgcgagtccgcgacgcacgacggcgtttgacgccatatcctactccgatcctctccgcaccgcgcgggccagcgcaggtaatcactccggggccatcctacgatggcacgaagctctccggattggcgatagcccacgcattagcaggccgcacggcctgcacgtaatccgcgcccaatctactcgctccacggcccacacagatgggccgcaccgcacgttactcgcgataacgttccaactggatttggatggtcgcgtgggcttgagccaaacgggaaaaagttcatcatttgtccctcaaactagtagtaacttttaggaataagttccccttgtgatcctcaaaagtgattgactccctcagtggttttggagggcgttttcactgacgtgcctacgtggcgatattaatgggtctttgttccacgtggcgttgacgtggcacttacatagcattagaattaaaaaatatatgtgggactcgtttgtcattcacacacataaaaatttgtggggcccactgactcctccctctttcttcttccccctcttccacgcggcgagggctggagcggcgggactcagattctgtgacattgccatggtatggcacggtgtgacattagagcaatctggggcgttgaaaataaatccaagggtcctctgcgccggcccacctgcaggcctcagtttttcaccccgcattgctccgtttcctgcccgagcgtgctgctcgcgaatcccccagaaccaccaccgccgccgcttggaagggggccggtgccgccgctcggaagggggctgtcgtcgcgggactccagtggggccgccgccgtgggccgccgcgcgcgcgtgtcgagatggccgcagtggccctgccggcacgagtagaggcgagcagcggccggccaccaggcctaccctcgtgcggtggcggctgcggatggaggctgccgagccagtccaggcagtcgtggtgatctgcagccgtggcggaccggcctcatttttcttctgtgatctgcagctcagcgcgtggaggaggggacgtcctggaggccgcactgcccttgccggccgcactgcccctgcacaagcatcagcctatggacatcaaacagcttctgtttgttgcatcctgactggagtttgcttttgatttgttcttcagaacaactcgctggctcgcggcgacggccggacccgggcgaggcgaaacgggatgggttggatcggcgggcgccgactcccgcgggacggatggatcggcggctaaatttccgacctgcagacgggcccaaccaaacgagctgttggatgtgtttttgatggcagagatcctcacaatgtcacgttgtgacatgccaacacaaagtcacccaagctgaatccggagcggcggcggcggcggcgaacaaggtcagcattggcgcctctgtgtcggccgacgagcgaggccagtgtgtgggccgccgccttcgacctcagcctccatcgtcggccgtcgatgacgctaaggacaacccccgccggtcgacttcctccacgatgccgaccccatcttgccaagcgctggcctcgccatcgtcgactcctcactccggggaccgtctggccccatccctgcacaagatgctcctcatgtggaacgcggcgaggcccgtgtccacgcctttcttgagtagcatggtggtgacgcacaggatgcgctcacacttgcctgacatgtcccagccatggaacctcagaatggcgatgtcctcctcggcgtccagtgaccttatgtactccaccatctcctcgctgaatggctgcctacactgcggccagcagagccactcgaatgtgcaatcctcaaactgcacatgcgtgatcgatgcatgatcaccaacgaacaaaatggaaatcaattagctagaagaaaatctatcagcgtcagtgcttacactctcaggaagacagtatccattgtcgattgtaaccagggagaggccatggccttgttcgtctctgcaggtgaggatgttgccagcgtgcatgtcggcgttggccagcctgatgtccagcacgcaggtcccatctcgccgagcgctggcctcactatcgtcgactcctccactccggggactgccgccaccgccggaggaggggtggcgaccacctcttcatcacgccgaggtccacggccatcgcctcgaaggacgagctccccccgcagcctcagcctcagccccgtcgcagcaccgactgcccagcctcatccgctcccttgtctccatcatcaccgtcgccatcgaccgggtggacgagctccctgcaccaactccgtccaccacaccggcggtgctgccgctccagaacccatatcacctccagcccaccgccgccgccgccgctccagctagcttgttagcaataatcttgtctttagagtgtatgcatttggtttgtataggttttgcacaaggtagtagtgtgtggcagcaaaggatccgagccagtacgtgtgaaacgtgcttgctgtgagctgtgcgatgcggccggacgaacgtgccgatatctacgatgtgtaaaggctgttgcattagcatgtagaactagtgattagcggctgcatgcaagcatttagttggatgtgttaagatgcatgcagagctgcagctcaagctggaaggccacgaagtgattttgtggcggaagaataggtctagctagttaccttgttgcatggcatctgcatgttggagtaaggcgtgagtcaaggccaaattagttggctgatccttatcttttgcatgtacttaagtctatgtaatgaagaaaatggtgtgagttgtgattagccacatcaaccaaaagcctgtgtgttttgttcagttcttgtgtgtttgtgtccaccgagtaaatacaagtgtttatgttagtgctagtgattagtacttaaacattcagagaggagagattctaacaattggtatcagagccaatttatgcccaagatcctgcgcttcaacaagatggccatcgtcgagcactccgcatcgcgatcgatgagggagggcatcgtgtcgctcccatatccagtgctcacctccaccaactactccacctgggcgatcaagatggaggctaacatggaggcgcaaggcatctgggatgccatcgagcccgcggccgatgaggccgtggacattaagaaggacaagcaggcacgtgcgtgtctcttcggggccgtccccgaagacgtgttgcagcagatcgcgaagaagaagactgccaaggaggtctgggaaagcctcaagacgaggttccttggcgttgagcgtgtgaagaaggcgcgagtgcaaaccttgaagagcgatttcaaggcattgcacatgaaggacaccgagtcaatcgacgagtttgccggcaaaatcagtggcctggcaaacaagttgagcgatcttggtgtaaccatggacgatgatgagcaagtcaagaaactactcgattctgtgccagataagtttctgcatgtcatcgctgcaattgagcagttctctgacttggacagcatgccatttgatgaggcaattggtcgcctcaaggcatacgaggaaaggatacgcaagcgtgatgacaagaatggcgagcatctacttttcacgtccggcgacacaagcggtggccgcagccgcgtcaagaagccggacaggtccaagacaatgtgctactactgtcaagaacttggacactttgcgtatgagtgccctgagaaaaagaagaagaaggagatagcgctccttgccgcagcgtcaagtgatgaggagccaactcttctctgaatgaagcatgccaagattaggggggtaaatgttagcaataatcttgtctttagagtgtatgcatttggtttgtataggttttgcacaaggtagtagtgtgtggcagcaaaggatccgagccagtacgtgtgaaacgtgcttgctgtgagctgtgcgatgcggccggacgaacgtgccgatatctacgatgtgtaaaggctgttgcattagcatgtagaactagtgattagcggctgcatgcaagcatttagttggatgtgttaagatgcatgcagagctgcagctcaagctggaaggccacgaagtgattttgtggcggaagaataggtctagctagttaccttgttgcatggcatctgcatgttggagtaaggcgtgagtcaaggccaaattagttggctgatccttatcttttgcatgtacttaagtctatgtaatgaagaaaatggtgtgagttgtgattagccacatcaaccaaaagcctgtgtgttttgttcagttcttgtgtgtttgtgtccaccgagtaaatacaagtgtttatgttagtgctagtgattagtacttaaacattcagagaggagagattctaacatagctcccgcgtcagctcccgctgccgccgccggttcagctcccgccagccgccaccacaccgcggcccatgccccgccgccggccgaaggggaagaaggggagagaacgaaagagaagggagagacggaggaggaagaaggaaggaaaaagtccactttgactcccttaattatcgacagaatctaattcgtgatcctcaaatcgcgaaaccggataagacgactccccgaactattgaaaccggtgcaatttgactcactcagtggttttggagggcggttttgctgacgtgtcgatgttgacctagtcttcatctcacgtggcgcttacgtggcattcgaattaaaaaaatatatgtgggacccactgacatttggggcccacgtgtcatcctctcttatctaccttcttcaacctccccctctctttctctctctttctgttcgcgagcgtaggatgggggctagcggcggcgggagggcgggcgggcgaaggccagagcaagggccagatcgtcatcgtcggcggcggcggacgggggctagatcgtcggcgacggcggcggacgggggccggagtggcggtggctggcgcctcctccaaccccatcccggccagagttcacccaacctggagcggagtccccctcgccgcctctctttctctccccccgcgagtcgtcgacgtcctcgcccatccctccccacggcgtcgttgacgccctgcctcgtcgctccagatgcatggagctcgccgcgctctgcaccgaccccgtcgtgctctccgccgccttcctttgcctcctcctcaacctctccctctgctcctaccgcccgccctcccctggcggcggccgccgcctccccttgggacccccgggcgtccccgtcctcggcgcgctcccgctcgtcggcccagccccgcacgccgacctggcgtcgctagcgcgcaagtacgggcccatcatgtacctcaagatgggcacctgcggcgtcgtcgatgtgcgtggcgagggctttctttccggtgcgccgcgacgaggctggtcggctgctgtgcggcagggtggaggcgtcagcctgtagcatccgtatttatgtgcttttatttaaaaagtttgtcatttaaaaattggag

SEQ ID NO: 10389 - DNA, 99043 bp, Oryza sativa
aacgtgaactaacggctgtatataaggagatgtacatatgtttgttgcacaatatgcatggccagaccggctagaagacacttattagacgctcataacccttggattccctttcatccctagaaaagaaaatccgtgttcccttctgttgctttttaagttgcttctgcttcatctatatatgtccaggatcccttcttgtctgtatatccaattttaagcatggttggcgctgccgtgccacctacataacgtgagttgaattgatctttctttctagaggtgaatttgctctgaaattttggtttgctcttcaatcatcatagtggccaataaatccaagttgctattatcccccccccccccaccaaaaataataatccaagttgctaattggaagcccacgtcaacatttaggctgagttcgttttcttcctttcacagcccacatgacccccggtgacctgtctaaaaaaaataaaaataaaaataaaaataataaaaaaacccacataaccacatccctcatttttcgcgcgtacgtttttaaaattgttaaacgacatgtttcttgtaaaaaatttctatacaagttgctttagaaaatcatattaatctattttaaaaaataaattagctaatacttaattaattatatgctaataagtcgttccgttttacgtgtttgatgtattagctcccaacaacagagaacgttgcttcttagcacacggaaaatggaacggctcattagcgcattattaattaagcattagctattttttaaaaaaagaatcaatatgatttttaaagcaactttcatatgaaaactttttgcaaaaaaatataacgtttagcagtttaaaaaacgtacgctaaacatgagggatgtgaattggaaaagttggagaaagaactaagccaagaatcacctcgagtgattgtacttgttgacggcgatatcccgtagtgccttggccaactaaccaccacaaccactaccactcgcggccggtcacgcacacaccacctcaatcaaatttggaattaagatattaaaatatgttactttaaacagaaaattaagtcatgaggcaatatgcacaaagtatagaatcgctaattcttacacagtttttttacaagggaacggtgctgtgagcaagtgagcaacatgccgacgtatataccgcaaaaatcactgttcatttcaacggaaaattgcagtaacagcaatgggtcgagtatgaagaaatcaaactatcaaagagcctctatataccattaataaaaagcctcatgacaccaacaaaatgacagtcgtcagccacatttctttctggggatttcacacctgcacttttgaagtagtacttgcgaatccacgtccttacgggccttatagtaccacgtcttctgaacagaatatgaacaaactgacgaatctgaagtccctgaacccgatcgagctgacgaaaacactaatcctgtttgtggatattcacattacaatatcggtgctactagctctaccatatggcttcctgtaccctgtacgtacctcttatgtgttatttacgatgttcgtatttttgtacattttcgtgtgtataatcgtatatagtatacatgcgaaagcaataaaccatccaggtggtgcaaaagactggccgcgcactgccttaatttagctaggatcggaggaggaggcgttcggcgggggtgagcgagtggcggaagtggcaacggtggccgtaggggcagacgtcgccggcgagcaccatgcggcacaccgcggtcttgtagcgagggtggcggatgacggggcggagctcggtgacgccgtgcgcgaactggcactggtcgccgtaggggcagtctcccgtctcctcccacttgttgcacagctccgtcttgaacatgccctggttgtacacctccagctccgcgccgctgtccgcgggttgcgccttctgctcgtcgcctttcttgccgccgtcgtacgcgcgctgctgcatgatttgatagtggtgcgcaacaatgtcaaatgccgatcaaacgggctgagccgtggtgttcgcgaggcgagagcgggggactcaccgagttcggggggttggttgggttcgacgacgtgcggggcttgcggttgggggccgccgaagtggcggtggcggcctgggattgctggttcagcttgaggtagcttgtggaccgcacggagatgctcttcggcagcacggcgagcttctcgggcgtgcgctccttggtggcggccgcgaccttctgctcgccgaggcggagccgacggatctcgtcggcgacggcgacggcggcggtatgcttcccgctgagcagcgcgagacggagggcgaggtcgctgttggtgacgcggagctcggcgttctcaagacggagcgccgccgcctcttcggcggcctcggcgaggtgggagaggcaaagctcgtagcggtcggccacctcctggtactgcagcgcgaggcgcgcgagctggagccgctgccccgtggcgtcggcggccgctcctccgtcgtcgccgtcatcgacgagggaggcggaggaggacggcgagagcgagacggaggtggctagcggcgacggcgaggagaacccgaagctggggctgaagggggaggagcagcggtacagggcgtcgtcgccgctggggaggtagcgcggcgaggacgcgagccgctggtctccgaagttgaacggcttgagctccaatgccgagcgcaccggggagacaagcgcttcctgcattgccgacggacaccaattgacttccgccgcgaacaaacggacggaaaatgtcacaaacgtgaaaaattttcacacaacttggtacgaacaagtgcacacgtgaaattcctagctgttgtatcgatcgagcttgtaatgttggacctgatcaagtggaggagtaattcgatgcaattacctctcggggcagtgccgatcgaagctagagaccagctgattcgggggagaggacgacggaggaggttggtgcggggatcgcgcgggctgagttatatagcgggggagcgtaaactgtagaaggggagaccgtggggcccgcgcgtctgcgagagcggggcggcaggtgtaacagggaattagccgcgcccgtacccgaagtccccaacacggccgggttcgttagcgctgctgcagcgtatagtagggaattccgtgagaccgtggctacctcaactgcccatcaaatctaacattgtaaacatttttgtctagggtttagactgttaaaatatttttttcaaaaaaggatatgcaaatatgaaatgtatagatgattgtgtcatgtattcatacatattctcctatcaagagaataaaaaaaatcaatcatggggatgtatctagacaatgtgcatgttcaaatacatcctaggattaaactttttttttggatggagggagtaaatttatagtaatgtcaaattcgatatgcacaaagaaacaaaaacatttatcactaaatttattgttttttccttcttttcaaatttttttcatgtgtgaattaagcttaatttttcatgttgatagagggatatacaacaagcgatttgtgcttttatattttttgaatttttataactatgtaaactgtatgttcaacctcaacctcaagctttgcttatctggcatggcggagagccgtttggtttttgctaaagcacatgcaatgcatgcttaatttgcagaaactacagtttagatttcagaaagatgtccggtgtatgtgtagaaaggcagagtagtgtgtctgtgtgtatgcggcgctcgtctagtattgtcctgttgtggaattcgacgcgcggaacattttcagatcaggatatttggtaccaattcccatctgattctggaaacgttaatcctgccaagatcacgtacgggaagtacgctctaacattaattccttcaactatacttcatcgattcccttgatgcggaccaacatgcctacctggctactattttcgtctcaaaataattgtatttccatgatttaaactttgtcccaaaataattgtaattttagagtactaattgccccatcaatcatctctcattcaaatttctctctattataccctcaaccatctttccactctcacataaacatcttttaatgaggagcaccatagtcttttttctcaaaccttaatatatgctaaacaatatagaattgtaattattttagggcggaggtagtacttttgtgtctcgtgtcgtcacgtcgacaaagatgacaagtccacacctcagttgactcaggaacgctctatcgtggcaactaatcgtactcctacaagcgaagtactcggtacaacggtacaaaaggccctcttccttgtacagttatatggagtaattagcggttacactgagctggtagatatgcgcccatattctttgcttacaaaaagccattattcagaaagccgttcacaaaagaaaaaaaaacagaaagccattaaacacgttcatatatatgattatatccacgcagggaaggtccatggaccaattgcagctacgtcggtggtcactagtggcacaagacagacagataagtgactatcagattagttattactacttgcttaacaactaatgaaccatggtgggaccaccctacacgaggagcccctgcaccggactgaggtgaggtgcgcctggcctctgtcactgacctggaagggctagtcaccagactcgatcaccacagcgcaaagaggatcgatccgagctagcgaaacttagcttgctttgcttttacgggtcagtccctgtccgcgagctcaggttgctcagctaacaaaccccgcgtcgatcggatcgatcgatcgatctgtatcccagcggcgtcttttccttaggaaaaccacaccacacctcaccagtcacaccacacacacagcaacacctgatagatgcaatcatgtgttgcttcctgcatacagctttaactaactcgaccgggaattcggaatatcgcctcgcctaccgcaggcaggagcgtcgtattgtgcggcacgtcggaatcattcctggagattggagaccggcaggcgtggccgggggagagagttagctagaggagaggaaacgagaaaaacgggaccatctatacatttgtcgacaaattttctactaaaaaatttgacagatgtaattatagtacaatcgtagtgtaattacactgtaacttgcatgtaactatagtataacttgtacgtaagtttcacataattttgaatcgttagatctattacaagatttgttctggtaaggaagaaaaaaatcacagcacacacatgtgaaaggatttgttcccacgacctctattttactgaaataacatgttaccgagagattcttgaaagttacatacaagttacattatagttacagtgtaattatatacaagttacagtgtaattacactacgattgtactgtaattacatctgacaaatttttggaggaaaatttgtcgactatagtaaattcgagaaaaacacttaagtatgtgggtgcgtgcgcgagatgcgtttcttttcttcccgctgccgcgacggccaaacgaaccgggtggacttttaggtgggtgcttttcccgtttggcgatgccggtaggatggatttgtgctcgccggttgccatcagggtttgttatgcactgtgcggtagatggcgacggttcgtgcgaatgaaggcatgcaccacgacgcgacggggctgatgtgccgcttggaccagaaatggatgctgatatgcgatctctggattctgttccattcgtcgtggatcccccaatccagttcgcccctccacccacccaagatatagattttacattgatttctattaacacatttctcaatctagtaaatgatgtattacatgtgaaaagatgcttttaaatataagataaatctatttttaagtttaaaataattaaaacttaattaattatgtgctcatgacattcttgttttacgtgtatctacttaatcttcaccattcgcaggttggaacggttgcatgtacttaagattaacaaggacaattcgcatggaaggatatagcgtaaattatggcatggcaaaccataaatatagatacaaaatcatattaattatgatgagtataatataaaattagcagggtaacccgcacaattatgtggctagcacagcaacgaatttatattattttttttaaaaaaactatcttttataggattccttattcttatcttgatcttcgtcaaatttggtgagcccctatgacacttgctattcgttaaccctaccatgttatccaccagtccacccctttccgctcgtctgcgcgtcattacaatcatcctcttcatcgtcatcacgactatgaaaatggggttccttttgatagattttagaagtctcaccaattgcctccccttcacttatttggttatgatcccttctctttattgtggtagataccttcaaaattcaaaccttatcattgttaggttcaaatatttatagttcttatgtctcgctagtcaccgccttcctactctttttgatgctgctcctgccacccagcttcgttcatgccatcatcttctagaaaaaattgaaccacaaccattaggagctctatatgtgttgcaaaagaatttttatattaaaatatttacaaaatgtttttttttcaaactttaacaaatctataccacccctcatgttctctgcgaggactttttcaaaaaccccatagggttttattttgaaaaaaaaagcttttttttacgatgtggtagacgatcgttggtgtgtgctattagacgatcatcgggggctaagcactttgtaggcaaacccgcctgcaaaatggcaccccatcttggcaatcgacagttttccaaggtgccccctttaagcgctctaggaggcctgcaaaatggacagttttccattgtattcctttagaaaggctgcaacttgcaagggagcagcttgtaaaatggccatgccaacctctagatggcagcacttaggccctgtttctttcagcctgggattattataatctagattattaagattaagctgaaagaaacatacaacttattaaaatagcttattataatctggagcccagcttattataatatggtaagctcatttatgtgagctttttctagattattgggtgaaaaattacccaccatgctaccccactccctctttagacttgcaaacccaataatctaggctctaaaaatctaggaaagaaacaactaaccgtatattatactacagattataacaatctagcttatagtaatctgactcaataatttagattataataattctaaactgaaagaaatagagccttagctcatgttagcggatgcttgccacgttataaaaaaacacccttctagagaatatttttctttcgtaaagaatggactcgtagaggacgggagaggtataaagttgtgaatgtttgaaaaaaatatttttaataaaagaatggttctgttgcgaagggagaactaccctgcatctcacgggcgagtgttagggtagcaaatgggaagaaaagaaaaatcacacatgtgctctagccaaaacaaaattggtgattaaaaaggaaacgaatacttggtcaaaccttaactgacagagaaatgttgttgcattcacatgggatgtaatgcacgcatatgtaatgcacgatcccaaagtgtgtagatcctgaaggggttcacaagattctcccacgatcggcacttctcccacattgcctaagatggaaagatgcacttgccattgtaatgagtagtcgaacagaggttgataggtgataggcagttgtaagctgaggggatcacatgtgtaaatggataatacgtatattagcgaaggacagctatcacggactatacgatagccgtagttcgccaatggaacacttgtccgagaactaacaaaagacataggcaccccaaactatcttagaaatcaggtcgtgtgaggccggtgcgtgttgacggtcgttatcgatcagtttcgaccgtcaatattaccaaaatagaggagaactagtgatgcttgcaatgcataaatatgttagaacaataatattccactagaattaggtttactaaccttttgcagagaatgacaataaagtgaaggagaatcgacatcaactcagacgataaattaatcggacgatgtcgagaaccagacttgtgtatgaatgggccaagaactcagaattgacacgatgaatcaggccaaaattcacaagtctacgaagtgaagcagcagaggaggccgccagccgaaattgggctggattgggccagccccaggttcggccaaacctgatggttcggccgaaccaccctcgccttcgttggatctaggttttggctggacggtcgagatgaagccccaatgacggtcgagatgaagccccaatgacggttggatctaggttttggctggacggtcgagatgaagccccaatgacggttgaagctataaaaggacttcaccttctcacttcactcacacacctcaagcaagagctctatcattcctctcaagtttagtttagtagtatctagctggtggaatagaattagaataggaatcaggagtccggaagtcttcggaagagttcgggtatggctctagtagctttcctttcctcttttgtaagctttgtacttttattagaatactattctacatacatttatggtattggaatactttctgagtatatgagtacctactttacattatattcatgttatactgactatactgctaacttatctaggagatgctttggtgcgggtatagtgtttgcatatgcaattactctatgtcatgacgatgatattagagtagtatctagtagtttaaacgtggtgtctagattacaggatatcattatttggggttatatattgtggatgagaggtgggccgctgatggtgacagctcaataggggtattcctccgcgcctatatatactcctaagttaatttcttggggagggtactcctccgtatttagccccggttggatggtcatgacgggctatcgtaaggaactcggcagtcaggggtggcttttcgaagtaccaggagggcatcggatagagggtattagctagtatatcagttaactagaatgtatgtataatttgtatattagaagtataggaatagatttcctttctcttttctttccacccagcttagattatttattatgaggatgagtagaaatgcttaagtgtcactctacccttggattatcttaacccctgcttagaatatgattatcacaagtaatatataaattattagttgagttctctctacgtgatcttcccacgggataaaataaatacgatacccttggaatactctcaggtgaaatgctacaatggtatatccgtgcgcttgcggatgaactctgtaaccataatataccagaagtatttctgcgccattgctgagaattatgtttctagtaatatcgttaagaaataccaacagtgcgcaatgagcagacaacaattcaattaccacaaatactgtatttacatatccacgtatctttttttttccaggccagggcttcgcaaattaattaatggtgacatccttaaaataaaggaagaaccataagcatacccggggaaacaaaataccgaagtctgctacggatcagatctaatcacagtatacaaagtgtgagatgaatcgccagcacataataatttaatttattctataaataaatcatgacattgcagatgtaaactaccatgaacgcatcattagatctacacatgtaaactaagcagtaaaatataaacagatcaaatatgcgcaacatgtcgaacacgtaccgaggtggcggaaagaccagtttctcggcaggaactactcgtggttgcgggcgtcgacgaaggcgcacggcacgcgagcggagaggaaggcgagccgtcgtggacgaacagggagcagtcacgcgaagcgcttccgaaaaatattattgccgccttctcccggtgcaggacgtcgaaggcagaggttccggagacctgctctcccgattgccggttcacgccggcgagcgggatggagtagtctacgagcgacggcgcagtacagagtaggaggcaaactctagattgatttcgtgtctgttgcgtgaaggtggcgactcggtttatatagagataggtcgcttgatcagggcgcccgcatgatctccactccgcgtaaccgaaccggataagtcgcgcgtaacttattcggactccacaccgaaccggataagtcgcgcgtaacttattcggactccacgccgttttcacgcaccggatttttcgaaatgtttccaaaacaaaacaaatccgaatttcctacagcaaaacaaaactgcaaaagaaggctgcatctgcgcaagggtgaggagccaattttgcggaccattcgacgtgtacgtcgtgcacacacggccaagccaagcaagcgagcgagcgtgtgttccccctcttctctccaccacacatgcttcaagtggctaggaggcattcctcccttttaaggaggtccccctctcctagaataagcaaggtggtactaaactccacatgtatgccatctcatgaggtgggcttttgtgatttttcaaaaattaatctttgagtgggctttagcccatccattaattccaacaagttaattgttacactgatcggcatgcagacaaccactttgaatagagctcaatatccgcaggagaaacatacgcatcttcctcacctacagcttccaaaaagtcgcatatagcaacctgaaacttccagttctctccacttttgagcaaagctctgttttcaagcattgttcatagctttgtcgcaaaccttgctatgtgtttttttacaaaaattttctataggaaagttgctttaaaaatcatattaatctatttttgaaatttataatagttaatactcaattaattatacgctaatggctcaccttgttttacgtatcttcccaatccccttctctccaaactcagtcgggcacctctactacaaccgtatgttttttaagcaatttcatccaggttaacattggttggtacctttgaagaagacaaccaaaatatacgatgtgaattaaaataatgagtcaattatatattatagcactagaacatgattactcaagacacataccacaaatcttctaactttatcctcaatcaatgctctccgacatgaaaaatcaggaagctgcacatatctctcaaacctttgcctaaacaaaacaatagagttaatattaagaagtgcaatgcatacattgataaagaaacatttactattcgtacttacgagttgtaacattattaagtaaacatagtattgacttctgagaatgtttgaaagctactatcactgaatatgcgcagtactttcgtgcttatcccgaaaattgagcaacctatggaacttcgggattttcgtcccattagtctttgtaacgtcatttacaaagttgtatcgaaatgtctcgtcaatagactgagacctatcctggatgagttagtttcgccttgccaaagtgcgtttgttccgggtcggatgatcacagataatgcgattttggcttttgaatgttttcactccatacaaaagaatagaaagcctgagaacgctgcttgtgcttataagcttgatatttcaaaggcttatgatcgggtggactggggttttttggaggtataagctgggtttcgctcatcgctgggttagatggataatagtttgtataaccacggtgagatactctgttaaattcaatggaactctgctctctacttttgctccatcacgcggtctttgtcagggagtcccgttatccccctttctgtttctgttcatagccgatggactaccattgctgttggaagacaaagtggctcagggagctctctcgccagtgaagatttgtaggcaggccccggggatttcacacctgctttttgctgatgacacgcttttgtttttcaaagctgataacgttcaagcccaggctgtcaaagaggtcattactgattatgctttggcaacaggccaactcataaacccggcaaagtgctcaatcatgtttggggaatcctctccgccgcagactcgggatgttattagagtgaccttgcaaatagctaactctggttttgaggacagatacttgggcttcccaacccctgaaggaagaatgtgcaaagggaaattccaaagtttacaggaaagaatctggaaaaggcttattatctggggcgaaaacctgctgtcgagtggcgggaaggaggtgcttataaaatccgttatccagactattccggtatatgtgatgggcatctttaacctaccggagtcagtatgtgaggagttaaccaagttaacacggaatttttggtggggtgtagaaaaggggaaaaggaaaacacattggaaatcctgggagtgtttaactcgtccgaagagcaatgggggcctaggttttagagattttcgtctcttcaaccaagcacttctagcacggcaggcctggcggctcattgttaatcctgacagtctatgtgcaagggtactcaaggcaaaatattttccaaatggttcccttgtggatacaagttttggaggaaatgcttccccggtgtggaaagcaattgagtatgggctgtcacttcttaaggaaggaattatatggagaatcgggaatgggaagtcagtgcgcatttggagagacccctggttgccaagggatttttccagacggccaatcacgcgtaaaggtaactgcagactaaaatgggtctcggaactgctgtcagaaaatggtgcctgggatgaaaccagagtaaaccaggtgttcttacctgttgatgctgaagcaatatgcagtatccgggtctcctcacggcaagaagatgactttgtagcatggcacccggataaacatggcaaattttcagtgagaagcgcatatgggctcgcatgtaaccttgttaatatggagaccagttctagttcttcttccgcaagatgcaaaagaatgtggaatcttatatggcagaccaatgccccccaaaaggtcagaatttttgcatggagagcagccaccaattgtctagccacaatggagaataaagcaaagcggaagctggagcaatctgatatatgtttagtgtgtggtttagaaaaggaagacaccaagcatgtgttgtgcagatgtcctgacgccaggaacctatggggggccatgtgtgaggcgggtaatatatctctaaatgggggtaatctgtgcaatgacccgggttggatttttgatcaactggaaatcctgttggattatgagcgaactgtgttcctgctgattctttggaggatttggtttgtccggaatgagatcgtccatgggaagcaaccaccccctatagaagcttccaagcgtttcctggagagctatgtaaagtcactgttggagatccggcaacatcctcaagcgaatgtagagaaggggaagcatgttatttcctttgttaatgggaaaaccaatccagccaggcgacctcctgaggataaaaatcaaaaatggaggaaaccgtgtgaggggtggatgaaagttaatgttgatggctcctttgatgcgcagactgggagtggaggcattggcgtggttatgcgggactggagcgggaaggtaattttcgcctgctgcaaacacctgcctcgatgtggtagtgctctggaatcagagattttagcttgcaaggagggcattctcgtgggactccaatggtcgcttagacagtttgtagtggagacggactgcttgatggtggtgcagatgctcgaatcaaaggagagggaaatgtctgaggtagcttttttggtgaaagaagctacagaactgttatccggtgatagggagattcagctccggaaaattcatcgcagccaaaattcagtcagtcatttattagcaaataaaggccgttgtgagggcctgtctgtcttttggttagatcatgaatgctcttgtatttctcgtcttgttttggacgatttaagtcctgagtaatatatccctttccccacaaaaaagtttgtaacttgtttagtccgataatataggagtaaaaaaaacaatacaggattagtcaacaaaaccaatccataaaacataggattactcgattgcatttttggatgtttcgtatgaaaattgcacatttacttgaagagtgaacggctaaaagaaattccaagaaattgaggctcacgctagattttttttttcaaatgcttatggattggcctactccatatacaggagttccaagatattttttcctttttgtttgtttacaagagggtagagataaaaacgatacgaaatatttccagtttctcaagatatgccaagccaaccagtcgatgtgctcatagggtaaaaacagtaaaaaaaataatcttattagtgctcaacctgtgtgttttaaaaaaaagagtgaaaagtataaacacgactacaagcagctttctatattaattaatgtcactaaaaactatcctcctacaatattagagacaataaaatttctaaaccattaatgcataaatattttttttattatacttctttctttttctacaccctcatgcaacaaactttctattaataaatgtcaagagtcaactctgagctgttgtcatgcgtagcaatgtgtttctccatactttcctttttttttccacgtcatcaaatttacttgcatgacaacgaagagaacccgttattagacactgttgtaaaccggcattgccttgatgatccttttatgcacttcctgtcacggtccggcccatcctagctgccggcctgcccccgcaggaccgggaactttgggaatttcctttggatccagcattccagtgattccgtcggaactgagaccgagacgacgcccgcactcctcctgcgggccaggggtgtcagcagcacggcggcggaggagcggagcaaggagggagggagccacctgatccacaggagcgccgcggccaagccgcccccgatgtgtggctctcccggcgcaccccgatttcctcgcccccacctcggtcctcgacgcgacaacgaccagtagcaccgccgcttctccgccgctcgctccgactccgagccttaaacccttctgccccccacttccgcgacctccggaactccaccagcagcagtcacgcacgtctctctctctcgccccgcgtcctccacatggcggcgtccaccacctgccctgctcgctccatggcgtccgtctcccgagccctccgcccgcggccgcacgccgctatcgcctccgccgccgtccgcacggctgctcgtctcggtacggcgctcgttggagcctgtttggaggagacttttgcttcttttttttttcccattccatccctctgagctggatgttggcttgtacgcagggggcggattggggatcgtttgttcgatgccaagctatggtaggaaggagaaggaagaatggggattgaccattgcgtccgcaccggcgaccactgctgctccggctctgaggtacgtgccgtatgagcacctcgtcgatgtttattgggtccggggaattgctttccttaggtcgtggattacccaattacagaagagatcagggtttgacttggtcaacacaaactgcgtttgttgagtgttcactagtcacgttgtgctaattggaagtaggtgctgcaacctttctctgctactttaaccaaaagtcccatctgaagctgcaaaggctgctgattgggggttcaacaactgcagcttattgtaaaaggagaatcctgaatatccttctggtgatgtgctccaaccaaggtcccatgtggtcacagaacttaaagtttttttttcattatgaacacttccctttggaagtataggtatcttaatgttatcatgaaaacacagtaacaactctaaaatactggctttagtcatttagtatgagtaatgcttttgaaggaagtaaaatgtaaactagaagggatgaaattgatgaactattcaataaccatatagaatgggtatgctgcatgtggtgaatttgaagtacatggtatacgctagcaactgatcaattctcaaatttcctctaaacattgctatagatgcaaaaaaaaaaaacttttaaaagagtgactttgtaagtaatcacggtggccaaaagttcttgctctaccattttcagctgtcccaactagattaactcagtggattagttgtgtgagttgtgtttactttagtcatgcaatctgttgaacttcattgtatgcttttaagcaaggtggcatgtgtgcctatccttctaagctttgcatttcgatgtttaagggaaaattcatcattaccttctatattttgagtatcttctggactatatttgcatgcctcagaacaagatagaaagtgaattgattggaacttctcatagtattatgttctgtctctgtagtcagtcgaagtatttgctgttctgtttagtgcaatcatgacccattcttcaatcccctaatctgattgttttcaccatttttctgttgcaccttatgttttagtgttatggcatttctaatctgtagttcagtagtttatatttgagaaaaaaagcccagtaccttttgcaattaaattttctactaattagaccaaaaatttcaaggcgtgatagctagcatacttgctttccttacaggccacatagttatatttttaaatagtgcaatttcatccacatgattaatgatcctacagatcagcaaaactatattgctggcctttcttgaataatctcattattaaacacttgttgctctgattttaattacttatggtaatgatgaaatgatctgttgtttcctcagaagctgtcaactattgtgcaaggctgaagctaacatatccagtaatctgccagagagcattcctagtgaagcaaaccagtacgagaaaatagttgagctgcttaccactcttttccctgtctgggtaagttgatttgggagcatttgaggattttatctgcccttttttagcttctagttctgttacatttggtggtttgtaaagcaaatattaaaaaatgtactaaggcagagctcaccttttgcaggtcatattaggtaccattattggcatctacaagccatcgatggtaaaatttctaacttgacaatacccattactgtctgtactcaacagcaaatgccacagaaactgactttatagttttcttggaaaactttcaggttacctggttggagactgatcttttcactgtgggcctaggattcctaatgctatcaatgggactaacattgaccttcgaagatttcaggagatgcatgaggaatccatggactgtatgtttctgctcctgaacgtcttctcttaaagaaatagtgattatttttctgtacttgaggcctccaacttgatataggtttactaatgcaattgcctgttgcaggtgggtgtgggatttcttgcgcagtatttgatcaaacctatgctgggatttgctattgccatggtaatgctaggccatgccttcctattatttctaatgaaagaacaaaaaaatgaaataaacacaatctgttattcctttgtttggatatgctgctatggcagctatgctaggctttcctttcatgcgaaacaggcttgttaaagattctcatgtaaactctgggaaatattaaattgaaaggttggtgccttgctcaaagaaataattgatttgacaagcccttccctgaaaagatgcacatgccattatgctacggtttcttttcatgagatttttcatgcaaatgttaattgtaattaaattaaaaaggttgatgtcttgattaaatcaataatcaataaactgatctgacaaagcaaccttaaagatttgaaggttcaagatcaacatcaaagatttttttaaaggttcaagattgttctctggtttcatttttaggaccttttcctttcatttcctgtgtcttggatactttgagcatgtcacgtatctcaagtttcttttgtttttccatttaattttacctttttcccttgtaaggtgatatctcatctcattgcaatttttatgtgaagaaagttaatctatgtagggtagccgatacaattttatcatatcaaatgtaaactctacccgttatctgcattctttgttttccattgctgtctatttgaatccatagaatacaatttcagtggtatagtgtttctctttggttattgcaaaaaaagtttgaacctaaaattccttctagtgcattttttttcactaagatatctgcacaaatttgacgtctatatttaggtgcaacctaatatggatgtttattttacagaccttgaagttatctgctcctcttgcaactggtcttattttagtgtcatgttgccctggtggacaagcatcaaatgttgctacttatatatccaaaggaaatgtcgcactttcagttcttatgacaacgtaagcttcagatttgcttgagaagaaatttctttggtgcttgttctgatctacttgttatacatgtaccttcatctttcttgaggttctttatccctaattagagtgacagcctttataattgatttctgttgtgctcttatcattctgttatcatggtaaattacccgtttttttcttggaagacacattttcatgctagccagtctcaaaaatattgaatacattggtttagattgtttgtatgtgttaccagtttcgcaagttttaaccggcatatttatttgatgccaacacttttgtattgtctgtactcgcatgcgtagaaaatatctgcatatcatggttacacactcaacaagctttctattgagacatcaaatttggacacactatttacgattccaaagatttagttcacagattgcttttagcatgccaattcaatttgacatgcttccagccatgaagcgtttaaagaatgttactaccttgtaccttttctagtaggttttcatggcaggcttcatacataaactctttttttggatgataggaccatgttccaaaactattatagtttgatgtaattattatctgaatgaatgttgacacaattttgtttagtcgtgtaagcaaaacaacctaatatgcatggcttgattggacaaagtatagtttaagggctggaattgagggcatacggtgctattttgcctatgtgctattattctgctattttgttgtgccatttgattttaatacagaaaccacttaggatgtgttcaattgtgctggttcgtaactcattctccccgcacggaaaatgaggtagctcatgattaaggctgcgttcgacaccgatggttcagaacctctctccggcatgaaaaaagggatgactcattagcacataattaattaagtattagctaaaaaaactttaaatttgattaatatgatttttgaaaactattttcctaaagaatttttttctgaaaaacacatcgtttagcaggttaggaagcatgcgcacggagaacgagagagtagaagttgggaaaggtgagtatagaacacaccctaattaagtattagcttaaaaaaaacttgaaaaatggattaatatgattttttaaagcaacttttctatagaatttttttgcgaaatacgcaccgtttagcaattcaggaagcgtgagcgcggaaaaagagggagtagaagttgggaaagtgcagtatagaacacaccctagatactctgttttcttcctgagtgtcatgctcccaattctactctgactaattgtgattatctttacatttcagttgttcgactattggtgctatagtgatgacaccactccttactaaactcctagctggtcaactggttcctgtcgatgctgcagtaagggcaccatgattcatatttaaaaccaactaataatccatttttatttatcaagtgtccatcagtataagaaaattacatctgtccagggattggccatcagtacttttcaggttgttttactgccaactattgtcggaggtactaaagaagcccaatggatacctgttgtgctgtactttgggatcttatctttgacagatttactgactttatttccattattttgcagtcttggcgcatgagtattttcctaagtttactgagcgcattatatccataacaccattgattggggttctcctcaccactttgctttgtgctagtcctgtaagtctgaaaacaactccgtgttctgtttcacttccatacattgctgattgtttaggctctccacaaattttgcaaatttatctgattatgatgtattatcgtctgttctttattttgagtaaattgctgctctcttcattttcattttgaatattgtaaatggctagatgaggctagatgaaacataacttagttacaatgtttacttgaatttactgtttctttccagatcggacaagtctcagaggtgttgaaagctcaaggtggtcaacttataattcccgttgctctgctgcatgttgctgcctttgcacttgggtattggttatcaaaagtttcctcttttggggaatcaacttctaggactatctctattgaatgcgggatgcaggtaaataaatgctgaaatgtcttagatataatctgttattgtccagaacctgcggtttgtacagtctttggttatttaatggttcttatcgttgctatggatgcctcatgccagaaaggcataatcaagtcaacatgcctgtttcatgcagtctattgtgctggtgttgtttagatgtagtttctcatttacttatgcagtaatttcagcactctgcagcattctgttgccacctaattaggctaacatgtttcctctgtttaattatggtgaatattagaaggccccaagataacaggatgaatatgtctagttttacactattgagcttcgagcaatgaaacgaggctgttgacaagcttgaatcttgatgatgttataagtactagtagtttagtagtatgcaaagtaatttttaatagagcgctgtaatttttaatgacatttgtgcttaacaatgtctcttcctgtttccagagttctgcacttggatttttacttgcccaaaagcacttcacgaatccactcgtagctgttccatctgctgtcagtgttgtatgcatggcggtacgtttcatttctattttctcctaatgctacaagcatgcacatcaatagcaaataccatctcatatttatataatgagtgctggagttcgtgaatgtctaatttaaggcgttctattgtaacagcttggagggagtgctcttgcagttttttggaggaacagagggcttccagcaaatgacaaagacgatttcaaggaatgaaacaccaacaccctccagtttctagtcattacctagtgttgttttttagttcagtggagttatcacagcatttttcttgttacccatattttagcaagttgattatcagtaggacttgcctacttggtaggtctgttgtattgcactcttatcttccaaataagctgcaggtgcttctctgcaaagcactcaatttatagtccgttgccaagtgaatgcattgtaatattatgcgcggtgagtaaatagatttccaagaattgctattccaatctattgaaaggtcaataagctttgtatgtattcttgctgaatgcagtttttcctttaagaaaatgggaaaagagtgaagttcaccatcagtccttaaacttgtcatgatgtgtcatctagttcttttaactttgaaaatatatagatctaagttcttattttaaatgtgtcatcccgatccaaagttgccatgtcctctttgttatcttacgtggagccaatgtggctgccacctcccctcctctctcttctttcccactctcccataagtggcccacattttttttcctttttctctttttatcagagtatgcagattagatcagatcagcaagtttagagatctaaaacagcattttcagagtatagggatctggataacagtttagagaactttactatttattatgtgcgtccactaagatttagtaatgcttggccttgttttcggttaataagaagattgaaggaggccttgttcggttaatcaaagaagattgaaggagatttaacaggagtaattccatacttatttaggttgaagttaatccctctcaatcttctctaattgcttcctcctaatgattaaccgaagtcctagaagtatctctatggtagttgcatgtttactttgctcaagatctgataggtcattaggttatcggatcaaatcctagtcgttctttttctttccttcttttattaattatttcctcttttgtacgtcgttttcgaatatatatacgactaaacttagaaatgtttggacactacatattcacaaatactccataaaattattgctatgtgaaagtaacaatatgatagattcatatgaaaaataaggaagattaaaaacattatgattcggtagctttttgcggatttattatgttgggagtgtctaagatttcaggtgcctgaaatttttaataatttcaataacttttctcatcccttgatgacaatctagtggttctcaccattcccttattacttatacttatcagtccctaatggttgaataataaattatagcaaatagaaaagtacaaaattatatgaattaagcctatagctcataaagatatactacaaaattacatgaaaaaaaagctcaaacttagatataaataaagtaaaaccatatactacctccatcccaaaatgtttgacgccgttgactttttaaaaatatttgaccgttcgtcttattcaaaaaatttaagtaattgttaattctttttctatcatttgatttattgttaaatatatttttatgtatacatatagttttacacatatcacaaaagtttttgaataaaacgacggtcaaacatgtttaaaaaagtcaacggtgtcaaacatttagggaaggagggagtatatagtagcaaactgcagttaaagtaaacaaaaaaaaatgcaaattgtgtagcattgcaatttcaggcttcgcaatgcaagtttaggtgactgaaacgtctaaaacctaacaaatctctattatattgttagaagagttgaagatcaaaagtacagaactgagatcattcacaatgtcaaaagagactacaggagttaatatataagagagagatatgttcatttatttaattgagcgtaaaacttgtacattgcgtataaaatcacgggcttcttagaggtaaacagagagcttctctaaaagctcatccaacaatattcgttttgacatctaccttctgtccaatctaccatgcacctatacgttttaacttgtgtcataactcataacatatatatactgatgggcttttagagaggccctcaggttaccttaagaagcccataattttatacacgatcgtagttttatgataaactgtatcaatatttatacgatattatatcaatatttatggttaacgtggaagctataaaatattcaattagtataggcatgaatatttcgtatcaactttttaagaatgatagctagatttatcttcaaattagtttttgaatattataattttactatataattgatgtgtgtcatacacgtattaatgatcaaattagtatcttagttagtgactgtgtcgttataaaatgctactcctacttgcgacaggagacagtactaggagacaattaagcctacagtcacactcctccaatcggagctcgatcgggactccggaggacgcggtacatttcgatttaaaggcagggagaagtcgatgtaaaactacagcgtttatgtaccctgcagcatcggcatagctcctgtgtatcttcctgccgtcctcgtagctgcttagtactgccaaagcacgcatgaattgaatagaactgccacggcgcagcgtcgtcatgcatcttgcacatgatgtcactggcaactgtgcacgacgtacgtgaggtcactggcaactataaaaaattgagtctcgctccggtactggcacgatcgcgtacggagtacactccagtgctcctcggcataacgcgcgatgtcagtcaatgcaatgcaagcacctcatgtcgatcagctccatggccggatcggccggatctccggggatcgaagaacgtacgcccgtcgatcgcacgacggacaactcgagaagcacacgcgacgcgaccgctagcgtctagcgagtgatatttgcatgcatgcaatgcatatatgaacggcgtggcacggcatgcagctagctgtagtagcgtggatgtggcatcttttctctttttcactccggttttgacgacgggagagccacgcctatcatggtgccatcattagcccgcgtccacgcaacgtcaaatcgacacgttgctgatcttgaccctacggaggttgaagcagctagcagagtggcgatatcagattgcgacgtacccgcctctggctcatggaggcatataagagcaagcaggctataagctgtctaaacggatgagagaaaaaaggagagagaggagaagcggactgtagacttacagctggcttggacataagaacctctgtgagagagataagtgggtcctatattaattgtaaagagctaactattatatgggtaggctgagagaatgataaaaagaatcttatagccaacaggtcggctgtattattagccttactctgagcagaaagatatccggagcgtatttcccgttgatctcaacgttgggcggtggctctctatatgatgccttgatcactttgatttgtcaatgcatgtttgcaaatcgcaaccgatcgatactaatgcggctagatcggaccctacactaatcggtcctttagtggcgaacgttaacggtcccaagctccctcagacaacccaaatgtaaactgtaagtgctgtgactgtgagtaaacaaaaaaaaaaaaaggtacacaggcgccctgcaccttgctgcgcgttccatccgttttgccaggctgtgcgtacgcagagagagcgagcagaggggatactacaggtcggtagatgcatacgaatggatggctcgcctttcccgtcacgcgttcctcggcgggaaacgctcgtctcgtcacgcgagcggggagagagagaggatgcgaatgcgatggaatatcccggtaattgtgtggagccgtcgatccatccatccgttctccgttctgcgctcgctcgcgccgcggcctcggcgctcgagagagtatgctgcctgcctgcctgccaactgccgtcgtcacgcgcgtgcatgccatgccatcccgcctgcgaggctgcgaccgacgtgcagcaatgcacggtgcaaaaacgcccccgcccgcccgcctgtcacgtgacctcaccgcggcgccccacgcgacgaagcgcagaacaccggccccaccgagcgcatgcagctagtactacggctttgtgtgcctcgcaatttgcgtgctcgcatgcggccggagtagctgctagccgtatgcccgtatgtagcgtggaccatcgcgcgcgccccgccggcggagatgacctgcggctgacgccacgccttcctcgtctctgcactccacgcacctcgtctctgcgtgtacgtcgtactcctacatctgtccgccccgtcacgtcccaacgaacggtgaatgattgagacgatgatgatatctttttcttctccatttctctatactccgtggagtagctcgcaacaggggagagcagggcacggagattgcgtgcgtaacagcgtaaggaagggtcgtcgctcctttgccgttcttggcaagtactagtactacacttgagtgtggagggtctctcgactcttgagtgaccaatagccttttcaccgaacgattccgcgaatccccccggtgcacggagcctgctggatgacgttatacatacgtgtgtgtacaacacggaatcggattttaactgtggcaacaaatgcgtcgtgagcagtcttatgttgggtgaagaagaaccaaacaaaacacaaacttgcatgcccagcttagagagagtacccctacgtgccattttctcccagcgcgagaggcgcttccataactacagtgccaaagatggactcaccctggacctacgtagagtacctcctttgttgcatgcatgcatgtggtagagactggctcaccccacgattgctcgatcgcaatcactcaatctcaattgccagaagattcgggatcctgtactgtgagcatgcatgcatgatctatcgcaggagcatcaactgcattgcattgtttagtccggtctcttcttgcatcgctcgttgctcaacaaatgcttcactgtggcgcacacagtcgcacactacggtccaagctactagttcaatagctaggctgatccatcttccaactaccccatggtccaagcctaaagcctacaaacaatatactcgatatagggatcaatattaatcgagcctcaaaaaaatttcatatttagggagtgaaagaataaggcgagagagagagagagagagagagagagagagagagagagagagagctagagctagctggtatttgcatgctttgtggcgatcgagagaccattggatatatatatatatatatatataaaatgcttctgaggtggtaccgttccattggatttttcttccatttgcggtaagctggcgtaacacctcttcgatggtctggaccagagtaactactcccacaatactacaccaccctacgtgccaggccagctagcctttatctgctactacgtttttacttatcgggcactgcatcacttgcttggaattttaattgcccctacctcgaaagagaatttttaggttctaaaatgagtactatcccaatcgatgtaaaagttcacatgcacgcagttaccctctttttgacttgtctgacttatttttcacctttttttttcgatttggggtctccaattcacccacttaattttggtactctttgcagtaggattattctaccacctcctggacaattcactaattggaagtaggaatatatgcaaactgttatgtgaaatgaaggtgggacagctaaaacatataaaaacaaaatggacggattgagtttttttgaatgaaaatggagagaaacccataactgtttcgaattgaaaaaccatcactttctaggacacaattagattgaccaaactttcacggaactccaagttagccatctctcttgtggctgttccaatcgtcgcggcaatcctcatttcattttgtataacggtcaacgactcgatcctagccccacccgttagtgctcaaatcgtacaaactgccatggtattgagacataccgttcgcctctcatttggcccttaccagtcagcacccctattgtatggtggccctgtctcccattgtgccacaacccacacggccatatatataccaccgtacgttgaacacgtaccatcgatcgatcagccatttgttgcaactcttatccgacggtttggaaatagaacttggcgatcgaacaacgtaacggagcgcacgagacatataacggcgcggtgttggtggcagacgtacgccgagaagaagcgccgagccgagcgtgatcgatcgatcgatggcagtggccgtggccgggtggtccacgtacgccactccgcgcgattaggacgtacacgccgggggggcccacggcgcagtgggcagagaatcatcaatgattgagagcaaatcgagagacggggcccacgcgcgtactggtgttggtacacatgcatgctgccctagacccagggaacttgttgccaaggcacggcgcatggagctcaactagcgagcgtagcatgcgtgcgtatgtacgtacgtacgtgaccagactcaccagactgtggtggtcacgtacccatctatccatgatcgatcgatcgatcgggcaggcatgcgtgcttcgagttgggagggagtgtgcatgctcacggtcacggctttgtctcttgcgctccggccacattcctacacttgtctgcttatggaagctatggttcctacgttatgtatgcatgcatcctgtaggcatacttttggttaaagggttgggatgagtcaggttagattaaacctatttttttagtgtgcttgtttgagaataggtgagataggatggtctctgacaggaaatattctcctaaaattcgggttagtatggtcccttaaaaatgagtaaatttcataaaactatatatactttgcacgatttatcataaaactacagatttaagaacttatttcacaaaacttcagattcaatgtctttgtttatcacaaaactacatgcactttgcataatatatcataaaactactgatttaagaatttgtttcacaaaactacaaatttaatatcttcatttatcataaaactacaggtttagtgtcttcattatcacaaaactacatgttttagcattgttaaacctgtgataatggagacactaaatatgtagttttgtgataattaaattaatacattaaatgcgtagttctgtgataaacgaatacactaaatctatagtgttgtgaaacaagttcttcaatctgtagttttgtgatagattgtataaaatacatgtagttttgtgataaacagacatactaaatctgtagttttgtaaaacaaactcttaaatctgtagttttgtaacaaattgtgcaaaatacatgtagttttgtgaaatttactcaaaaattggcgaaccaatccaacccactttttttctcactgacacatgagccattacttcaaaagtgggatcatcccatcccttatgccaaactaataatagggatgagtccaatccatcccaccttatccccaaaccaaacacatgctaggagtaattgctgccgcaaataaaaacataggaaaagcaaaggaaaattcaacgaaggaggatcataaggtatatcgtataaactatacctcaataaaaagtttatcgcttttaaactgtggctgataagctagccgtgaaaaataaaatgaatgtagcaactaaaaataatttacggatgcaatttttatatgatattaaccgatgttttctgaaatatatgttagaaaataaaccatgatgaaaacggctcaaaataaactctaaacttaaggggggttttttttctgcaactggtaaatcaacaagcatagaactattagagttataacttcaattcagtaacggcaagacatacacatctatatacttgcaagtgcatcacttatattccgtgtttactgcattgggacacccgatcttccgttaggtgaagaaactattgatttagcggaaacttgacaaacataatttggcttccgatcaaaatgatctaaaccctgcaatcgcagcatcatgtctcctctagttatcaaccgtgtcgaaacctgatggatctcgccgagaaggctaattcctatgcaaatctcgaagaacacaaattagaactagaaagataacaactttattacagatgaatgattaattaagaacacaaagttggggttccacaaatcgatctagcggcgaaactgctatgacagaaataatctaaacaaaacctgaccttaactcaacgacgactattgaatatatatatataggttttagagtcgaccttggacccctgagcgcatccctattggactacaacacgatacatgactcaatgggcccaaagacgatgatgcaatacccgaatagattctggacgtcttcttgttttgtgattcccattgacttgtaaggaactttacatgagactagatccattggaaatgtgatcttgttacctttccataccgttgatgcgaaacacggcggcatgggagatctgcttaactccagtgcaggtccaaggctagccttgtgtgtgtcaagagcgtgccagctgatttgatcctgcaatcagcaagaaagataaaagcagagttagtcagctgatagcgtatcgttagtggtctaagccgatgtagttagaccaaatcgcctatggaccggatagattaaagaataaaagaccctaaacatgtctcgtctgctatagtgttgttgttaacaacggaattttgcatcagattcggagaagaaggtagaagattgaagcgaatttggtgtgaaatcgagttggatttggagtcggactacacatcggctggataccgtatcagctagaaacagagtgcgagttgataaaggttgatgaggcagatggctgatacagccgatatggtatgatttgggctcggtctgggcctagattggaataaccatatttgccaactagagatggagcttgattaaggcaattgtatctattaattggatagttgagtcaattcaactttggcgcatcgccaccctttttgtctttactttccaacgagttcgctttgcaagaggtaacacgtctcgatggcctgtgatattggggctattatgtcgttttagaaattttagtcctcgtatcatgaccattttttttgaccgggaaatagtgggggaagccccacggtacttttcattaatttaaaaggaactgtacaaagatttataaggtgtcaatccatgattgaaaggggctcgtatcatgaccattgttatcatatgtctatgttaatctagtcttagaatatcgatttagttctatcggctgcttctcgctttagattttctgctggtatcggctaaatcgacttgctagattagattaatttagacatctaccatcttgaaaatcagtcaacggcttgattgtctagatattgtgtttcttttcatacttagtgctgcatcaatgcattttcgacctagtaagtcgtgtttagaaccatgatccatagcaagcttcttgatcactaataggggtagtatcggggttttagccgatcttacctaatatacatgtttctttcaggtggcaagcaagccatccatattgtattgagcactttgtgcttgactgcttgaagaaagaactgcattacgcatctaccctatccatcctataaaataacatcctactactagatatatcacatcctagtacaatgaatctgaatatgtctttatccagattcgttctattaagatatgtcgcgtccagttctagatttgttttttttaagatggatggagtagttgttgacggctgttaagtaccaagttaacaccgtcaatacctgcataaaaccacatatataaaacatccaacatagtggtaggatttatttctaacaatttccacgagtgttggtgtatatttgtacgcaggtgacgaaccaccaaagttgagacaaaagatacaaagaggaggtggtgaattaaacttccatattcaagcctatggagttttggacccacaaacctaatgaaacacattcaaatgggccaattgcaagtacatttgggctgaggggttctccaccaaagcccacgagaaaattcggagcaaaacgggccaacaagggtttggccgaaccacttggttcggtcgaacccgtagctgcgccgttcggccccaaacttcacaggccggcaattaccgacttgctatgacggtttctaccgactttacctgaataaccgtcattagctggacacatggcactaggaggatgaagatgctcattggatgcttggaggatctccactctctcaactcacctccacactataaatacccctctcctctccctcattcacacacaccaaagcatgagctgaattacaagaggctctagtgtattttattgtatattagaacagggagagagtaaagtaatggaagtcggaggaattccggagttatcggtaaccctctcttatctcttgtactttgtttattattctgctttaatagaaatatcattctgagtaattaaggtttacttagtgagaattacttcttggttagttcctaattagcatactggatcattgttcactatagtctatttatttatagtgattgctttagtgtttgatcggcactagagtagttattaattgcgtagacgcggtgtctgggtaattaatttccagtggttgctgcgtatcccacagtacgtttgaggtgggtgtagaggtggtgacagccctcaagagtacttaagtcctcactgtccggatacgtagtagagcgacatctgggaacagcgggttggcagtgcctgaagtattgcgttaggattaaacttaagctttccctggacactgcttctcattaggaaatcctctctgccctctgcccaccttagctttgtgtccttagatgaacctgacgaggagataatcacacacgttccttggattcgatacccttggaatactccgtaggggaagtgctacatcggtatatccgtgcacttatggatcttatctgtgatcgtaagaaataccaacagtagttacacttacagtgcttgatccaacggcttgcgagctgccacacacatccatgcggccatgcgcggtaactactccctccgtttcatattataatataagtcgtttgactttttttctaataaaatttctttaagtttaaccaagtttattaaaaaaatataatagtgtttttaacagaaacaaatatatttaatgttaaatttaatgaaacaaatttaatatattttagatgttgctaatttttttttacaaacttgatcaaacttaataaagtttgactagaaaaagtcaaatgacgtactacctctgtcaaaaaaaactatagttttacaccgtttatgtctaacgtttgaccattcgttttatttgaaaattttttatggttagcatttttattgttattaggtaataaaacataaataatattttatgtgtaactatttttgtaaaaaaatatattttttaaataagatggacaatcaaatattggatatggaaacttatatcagtatttaaaatgagacgaagacactgtaatataaaatataaaacggagcgagtagctcgtacgtgcagtgcagtgaatcctcgtcctagctagccatagtaaagtacaagtacgtagcaagatggactcgctgtcacctgcacactcaccaggctgatcaccataaataatatttccagcgagaaccttgactgtggctttcaaggtgatgatcctcagacgtacagtacaggtcgatcacttggagttgagtcgtacccgtccatcgacgtcttcgcagttacaccattaattgctctgtcgcaattggacctctaatccacaccattgaagagtggatctgtgctacatcctgcgcctagagcgcgtcacggcaataaggtgcaagagtagagcaccagtgcacggctcgccgctcgccgctcgctgctgcctgtctctgtgcccatttaattcgatccccctaggctcctctaacctcttcgcgtctctgtgtacacgtcacatttcccctgctgcacagcacgactactcatcttttcaaaacagatacggtttaggaggagctgaaattgtacgatttggactactaaatataaattttggtgtgcaaaaaacaacctagtttcatatatttatatttatgtccctatataaaatcatttgccattcaaatagcaaacccgaatcccaacgaaatttgaaggaagaaggcaaaactcttgcatttttctttttttttacagtaacacaacaggggaggcctccctgttaaagagattttattaaaaaaaattaaaggtcaaaaaaagttacaacgaaagagtccaatctttagcaacatctctatttatttcatttagcctaaacaagagaagaatgaggtctcccttgaggagttgcctccacgaagataatgaaagaggtttatggaaaaaataaatcaattttttttgcttccaaatgttccatgcatctgtaagaaattgctccataaaacatcttcgattataaatggctttggcttccaatatcatgctctgaagagcaatggaggtattccatactatacccaatctgttccagcaatcaacaatcaatttttcgttttgttgcatttttcttcaaattgcaacgaaatgaacaatgaaaaaaaagaattatgtaaaaggaaatcgacacgtaagcactcaaaatttgattgtatatgtatcttccaatagagaagagaaatgtggtaatatggtatggatgcaataattattccaatacatattccacaccctagtgtgcctacacccactttgaaatttgaacttgtgctctttgggaaattataagaaacatggtatacatgtaaagaagcagatactgagtttttattaaagttaaataaaacaaagacaatttttttctagtacattttttatttttagatactttccatgtaaacattttatggcatgcattacatgtagtatatttatttagaatttttttagtgtgcattgcatgagcaaactgagaataagtatagctagctagctagaaccattgttcacaaaaccattcgtaaattaaaacgtgagttacaaatcgctcgttcaatcagtcaatttttttaaaaaaactaatactaaatttgaattttttaatatactttattttaattccagccgttctcactagttctccaatggtttcaacgaaaagaaaaaattaaagctaattaaggagatctggtaaaggcttttagaaatcagaacattggctaaaactttgctacacaatctctgtgttctaatatacaacgcattattgttttccataaagtctacatttgaaaaaatggactaacaattaaataaaaatatgtgtttagtgccatgcaagtagcatttttgtatttgtatttgaaaacattttttatgatgttgattttgtagtagatggtaatatattacgaaagagattaatgatcaaagtataatgttggaacaatatgaaaggtttaatataaaaggtttattataagcctagccacttattagcgactaaaataatttatggtaaaactattatataaatgtttttagcaactacctatgcttaaaaaataaactaaaattcaaaatttaactatgacagatgagaatacaaatcatgtgttgtttggtttgtgcaagcatatcaagggggagaaatcagttatatactacctctgtgacaggaagatcgcagttttgtttatatatatataacgtttgactgtccgttttatttgaaaattttttataattagtatttttattgttattagctaataaaacatgaacaatactttatgtgtactatttttctttatttttttataaattttttagataagatgaatagtcaaatgctaaacacgaaaacccacagctgtattttaaaatgagacggagatgtaatcgatcactcccaatccatatgtaagtgacacaggcatcccaatgcgcatactatatgtggcaaggcattcttggtgctgggctagtggccctctctggattatgttggattttcaatccgctcggcttgcgtgattaagagggcacaagtggtcttccaaatttgcatcccaaagacaaggacctagctcccacctacaaaagcgtatactagtgtggaccaaaaccccttaccacggggcacgggccctcaccaagtttcattcttcgtacgaaactactccatgaattcgcattgcagggctccaaaaaaaacaagcgaaatcctacagcagcagtattgctcgcgctgcacctctactctagtctgccaccggcgaagcgcgccgctcgagccttctctccaaaaacccctataaaaccaccgcttcgcacagtaaaacctccacctagttggcagtaaaaaaagcgccgctacctacacacacaaccgctctgcacaaggggccatggacaacaagccggcgcaagaacgccgcgagacgtgggtcccgggcgccgtcatcgtcggcgcgggcccgtcggggctcgccgcggcggcgtgcctcgcggcgcggggcgttccggcgacggtgcttgagcggtccgactcgctggcgtccacgtggcgccaccgcatgtacgaccgcctcgctctccacctgcccaagcgcttctgcgagctgccgctcctcccgttcccggaggagtacccgacgtacccgtccaaggaccagttcgtggcgtacatggaggcgtacgccgcggcggcgggcgtcgcgccgcgcttcggcgccaccgtcgaggaggccgcgttcgacgcggccgtcggcgcatggagggtgcgtctcgacggcggggaggtgctcatggcgcggtggctcgtcgtcgcgacgggggagaacgccgagccgcgggtgccggactttcccggcatgcagaagttcgccgggtgtgccatgcatacttccgagtacaagtccggcgagcagtttgccggtaagaaggtgttggtcgtgggatgcgggaattctggcatggaagtgagcttggatttgtgccggcatggcgcgaagccctccatggtggtgcgcaacacggtaagaaactagttaaactgagcttatgctttagaacctatctatcatgctctgtttttcccctgttttttttgtctgtatttgatttatctttctgtgtgtcacatcttattgtcattggacatattattgtcatcttaaatccgttttcattgtgcatggctgtattggatcatattcaggaaggagaaattagacctgttaacatcttccattccacacaactttatatgtcgggtgtcttgtcctatcaacagccgtttctttcttccattttgcctccccctgccctccgataattacgcgtgtcattttcattacattattatgatgacgggttacacaaatctaagcgccgtggtgatgtttcgtccaggtgcatgtcctaccaagggaaatgttcggtctatccacgttcggcatcgccatggcgctgctgcgatggctaccggttcagctcgtcgaccggttccttctcacggcggctcacctcatcctcggtaacacggggcagttcggcctaaggcggcccaaaacagggcccatcgagctcaagaacctcaccggcaggacacccgtactggacgttgggacgctagaccacatcaaatccggcaaaattaaggttagtgccaaccattcagctagcctagctcctttcaagaaccagtagtagaaactgagaccagtcaaactgtcgagctgtacatgtgagctgctgggcgtctacttcctaatgtggcacatcagctattcgcacatgcagcatgtacatttctcttgtggaaaatggttctcatatggagattcatttattttatccctgtgggttttctcctgtgctttgattgatgaggcgctgatgggaatcatgcatcactaggtagtgggagcagtgaaggagatgacgaggcaaggggtcaggttcacggatggcaaggaggagcaattcgacacaataatcctcgccacaggctacaggagcaacgtgccatcttggctcaaggtaaagcagagtgtgactcactcttgttcgttttatttttctttctgtccgcactgcactatactactactagtgatatatatctcgagatgatacggattatatggtcaactgtcaagcccaaggatgttaattatatgtctatatgtacgtgtgctttatgtgttgtaggatgccggtgacttgttcacgagggagggcatttccaaggtccccttccctaacagctggagagggcggaatggtctctacaccgtcggattcactcagcgggggctcctcggcacgtcatcggacgccctcaacgtcgccaaagacatacattgccaatggagagaaagggaccgatctgctattaatgtacttgaaataagcaactcttccttttgatttgactggaaatgtacagtgttttgattaggaatattgtattgtgtgcatataacaccatgttctatctcccttttcaacaaagactgataatcttgctctgccttatgtcgattacttgcctattgagcatcttttgggcaaactgttattatgacaagaatttagaatttatatcaatactcctttaaatgggcgtaatggtagccaccaacttcctattttctttgaaaagaaaaaaaaatacagtgtgaaaaaggaaaaataatgattaagtgggttactaataattttcttgaattaaaaccctgtcgcaatacacggaaagacaacatgctagttagcatactgttgttaacgccgaatatacttttgtgcatatatggtcagcgggtgaaaagcatcacatatttgtgctgatctgataaaaacccatttagacaaatatggttctgatccaacccatcttgctcaccgaggttcggcgttgggccgcaagcccacaatccaggagatctacaactttataattaatatattttttcatttcagatcgtttaataatccaaatattccttacaaaatctctaatctacgttacaaacgacttccaatatagacaaacttatacaaatgttgtagatcttgacgagatctacaactttgttgtttaccagcttttatttaggctgtgttcggaatcggacgttcccagcgtgcacagtaagtaccgaaaacttagcggtctattagcgcatgattaattaagaattagctattttgtttaaaaaatggattaatataattttttaagcaactttcgtatagaaactttttgcaaaaagtatacattttaatagtttgaaaagcgtgcgcgcggaatacgatggagaggggctgggaaccttcagttccaaacacagccttaaaattgtttagagtatcaaataagcattattagtttttttagcaattaaaaccgacaagaagatctaaatgcaaaaaaaaaaaaaacatgtagaacccttctcactaggggtggcagcagggccgggttggacagaaacgctcccccctcctcacattcctccccaccccgcattgcaaaccgggtaacccaatgcacccgagcccctgtgaggacccagcgggagagcagccctcgcatttggcgacgttgacggcttgggggctacagcgaggagtcgaacgttagaggcaccgatgacagctgagggcggcgagccgacgatgaaagctctaggaggcgatgacggatagaagcaggtgaactttagcgcgtcgccatctagttggggatgcagcaactggcgagactaaggggacaaggcaaggttggcatggatgaagacaatggagtcgggacagagtcacgagatcggagaagactgcaattcgcacggtgacacggagcagagatgtgtgacgatgtgcggcggctgtggaatagggaacaaaactcagggttttttttttccaatatatccaaactctttctctattgggcctgttgtgccaatatgttataggtgggttgtgggcttaaattctcagaattggctacttttagaagagtaattcacagccttgagccctgtcaggtcttccgttggtaacttagcatccctgcctttttcttttctccgttcttttatttttcggggccccacccccctgcccccaccccataagagtggtcccatcgcgtcctcagccctaacgagaaaattaccatccctacttctcgcactctagaagggtcaatttttttttaaaaaaacacccttccgaagggcgcaaggggaatacatatgtaaatttataaaagagaaaattatttgttaaatattttagctaaagagtaaaaagaattcttcaagctcaaccgcattaaccagccgaaagaactgaccgctgaatggcgactaacacaaatcatgagcattgtcttgatcatgcaattttgtacgcaaaatattagttagtagaaaaaacaaaaaaaagaagttgtcgtgcggtcgtggccgctcacgcactggtatgtggcaacatgtattttggtgccacaactctggaacaatacataaagaaaaaaaacctgtaccaattaatggaacattggcgatgattctaactaagaaaacgtgagggctaaccacaatcgtatttagctttattttttaaaaatatgtaagtaggatggtgcaaattaattaccttttgcattcaaacaatgcgaatttgcactaagaccttaaagtttgatggactagtatactctcgcaaggttttccccagattagcggcgaaaacggggcgagtatttcccgatcacccgctcgaccagaaaattatgggaagaatatatgggagagaaaatgggatacccgatattttcaggtttaaacctgaatccgtaaaaaatatgggttaggatacgagaaaagtttgatccgcctgtatgttctatattataaaacatatgtgaaaatctattataaattcacctataaacatgataaaagattagttaatcactatttttatgatcttacgtgtaatattatatactttgttccttgatgtatctttttttaacactttaattgcattcttatagtaaatatctattgaattagatatacaaataaatatccgttcccgaatcagatttgaagaaaaaattaatatgggatataatacaggatgagtgatatattattcaacattacctgtacccggttccgaaattaaaggaagatatgggaatgctatgatctgctcgtaccaggcccgttttcacccctaccccagatgaaatgttctacttttttaagtttttttatccgtactccataaaagacaatgcatcatttgcaatggtgactatgtagatatatagacttgataatcttaaaaaaagtaaatttcataaaaccctacctacataatggattttggcggttataagacagcgctacttcggatagataatggatatatagacttgatatctatccattatctattcaggttgcacacaatcacatatatttttgctatgtggcacataacctcagatattagggtatgtttcacaaaaccaaactattgatctttttaacttttatctaccatatttttaagttttacaatcacatcttaaaatttatgggcattgtatccatcatataaatcctacacccactttttaaaaattttgatataagagtacgtcaaaagtgttaacggtttggtttttatgaaactttagtatcataatacccaaagttacgtgacacgtgattggatcataataggtggggttttattaaatttactcaaaaaattatttgcaatggtaacaataccagtaatagaattaatctaaatcatcataaacatatattgtcaatacatttttctatagagaagtatttgaattttgacatattgtaaactatacagagaaattaggagcagatctagcatggaggcggcggggtctcgagcccctactactatcacaagtatcatgggagtttccatggatccccactaaaactttttgttatatagatggaaagggggaggtagttttatttagttttatttggtttcctacagatagcacatacggtactgcctggcagtggtaaaaaaggtccggctaatggacaaagtctcgtaactcccgcgaggaaaaaacacaaaatcgtttgcatggattgccgaacttccccgaccttgcagcacacgagtggaagcacgcccgggagacatcctccggacgtgctggcttcatctcaaccgccaactccagttccccgacgtgcatgtcgacagccatggcttcacgcagccgctgaggcagggacacgccttctcgcgacatggcgacgttcaggtcgaccgctgacaacttgtccacgcagaaggccggcacctcaccccatcggccgaccacgacgcggttgtagtacagcgctacgtcggcggcctgcagaatcgccgtacgtccttgcggttgtccacgtggacggtgagttggaggccggcgaggagatggtcgtcgggccgcgcagcgggtcgagcccctcgacgccagtgagctgaacggtgaaacggggaggaaataagttcatctgaggtccctaaacttatccacgaattcgattttcatccttcaaaaaaaaaaacagatacaacgggtccctcaactatgaaaatcgatactaagtccctcggcggtttggacggcggttttcactgacgtggtgcctacgtggctaatttgactcaatcttcatctgacgtggcatttcgatccgaaaaaatattaaaccctgtgggacctacatgttagtttcacacaattaattaaaaaatagaggccccacataggccccgcatgtcattcttacccctacctcctctttctcctccatccccatctcccctctccggccacggtcacagcggtgcaggggacaacgacctcaagaaggcagacaaggccggtcttgactcttgacgcccttcccatgtcctccgccactcacctcggcggtacgctcggccggtggagagaagaagcgcagtggaggtggcccaagcggtgagagtggagatcggagggagttgggggcgccgccggcagattgctaccgctctgccccaccggcttcgcgcgccgccaccgccccactccaccccgtcgctctgccgggctccccgacggctgcgcccgctgcgcaccagaagacgacgatgacgaggctggcgccctccgcttggctccacagccccgctggctttggacgccgcccaaaacaatggcgttaatcatgttaggattccacattcagagagtgagctggagcacaacattgatttttgtgcagagatcgatggatcgattgattctgtcgccaacgactccaccaattctgtccagggtaagagcaggtacaatagcatattattaaccagctataaatatattttaatgagatgatgagctgcagaccaatctgtttattgacaaccacaaaactaaaggagttgttttgcagataatgaacttgaaaaccatttggatcaccacccaaacaagcacaaagtgctaaagccaccgaatcaacattcaaacgaaacttgaggtgggaaaaacataccaccaacttaaaagaagacgatctagcgaaccttggaatgaaatgcacaggggaagagaatcgaggcctgatttcttttgcaaactccaaacctggagagaaatcccagccatcgacaaaagagagatccgccatgaagaatcatgcgaagctcagaatcgccctcccgatcgccagtccgaacattccggatcgcatacccgtaaattttagtttggatttcttccttatcctttccgctagttgaccgttaaattcttatgaaaaagccaattttaccatttcctataaagaaacataataaattaatggagtatattgtcggagcgtagaaatttgttagctgggctattatatttatgtgttagctatcaccgtattatttgcaataaatatgcttttagatataacataaaaattaatacttatttattaattagttattaaaggttgtttatgaagcatataaatatatttgtcttataaaaaaaatctgttgtattactatcaaaacacatggtgcataaaaaacttttattaaataataaataagtattaattttttatatcatatctaaaagtatatttgtcacaaataatatggtgcataacgaactcataaatataatagtcccacccaataaatttctacactctaacaatgtagtccattaatttattatgtttcttcatagcaaagggcaaaatagactttttcataagaatttaacggtcaactagcggaaagggtatgaaagagatccaaactaaaattcatgggtatgtgagggaatgagcaaagtttaagggtgtagacaactgttaagtaccaaattaacaccgtcaataccagcataaaaccataaaagtaaaacatccaatgtagtggtagggtttatttctaaccatttccacgagtgttggtgtatatttggatgcaggtgacgagccaccaaagttgagacaaaagatacatgatgaggtgaattaaactcccatattcaagcgtaatgaaacacattcaaatgggccaattgcaagtacatttgggctgaggggttctccaccagagcccacgagaaaattcggagcaaaataggccagcaagggtttggcgaacccgtagttgtgccattcgaccccatacttcacaggtcggcaattaccgacttgctatgacggtttctaccgactttacctgaacaaccgtcatcagctggacacatagcaagatgagagtgaagatgccatttagatgcttagcatctccacaatcccaaggcatctctccacctataaatacccatctctccctcattcacaacacacaccaagatgtagagctgaattacaagaggctctaagtatactttaggttctttatatgttctatagtatacttaaaatagggagagagtaaagtaaaagaagttggaggaatcccggagttgtcggtagtcctctcattattcttgtactttgttaattaccctggttcaaattaagatttgtttagtgagaattaattcttggttgtccacccggacgttgtcaagtcgagttgcgcattgagaatattggtgccgctcaatacttttgctaaaacctgcatatagtatgtttagaacaaaaatccactctaacccaacacctgaaacattggtatgcttcaagaccataaaatttttatgtaaaatgatactatatatgatctgatagtctccaacacaacacaccgtgtatgtatcactagttatagtgacaagtgagtaactgacaactactccatgcgattgcaagaccaaatgaggtgcaaaccgtgtatgtatctactggaaggtcagagcatctatagtagtaatacctgaggaatgttaaaggggcagattgcaatcaaccacacatagggggaggaggtgatcgatcctctttgtagctctcggggacaaagcacgacactggcataacatcgaacgggtcgcgagtgaggaggtgatcgacccaccaggactccactgtcatgagaccacgctgtggctgtcccatgggcgacctgggaggggtagtcgatatcctgctcagcacacccccctcttcgacgagaaacagagtagcgtgccgcgtcgctgccgatgatggggttgaactcggggaccaggtatctgccgccgccgggggcgatggccaagctgaggttatctgtgtgggcgatggtcatctcggggggccaggaggcggagagcgctcgcagaaatggaaaggtggagcgtgggaaccatgtgaagtagcccttaagtagggattccacagaacgagcccgcgccccaacttgtcgatgatgagcgggcctgtgtggcggtgctgcgaggtgaagaagaggagacagggggatgtcggcggcgaggacggaggggaagttgtgtattgtggtcggggttggcgcattgtggggccacgacgaagatggcgacccatggcggcgtggagggtgtgagggagagctctgcactgccgagctcggcgtcggttttgtagcggcgagcatggcccacggcgctgccggcgaggatcccattggaggcgtgtggggttttggtggaagaaagtggagaggccagggtttgatgtctgtactattttgaaatcaagatgcgcaggcgtagcggagcaggcagagttaggcaaggcccccgcaaccgcaactccgcaagcctcaattttgcccatttcggccctttgcataaatttattttatgaattattccttcgaaaaacttttcttgttcggtttagaggggactgaaaagaattggagagtattgaggggaaataattccacatctaaaataaatctccttcaatccgtccctcacagggattaatcgaacatgtaaaccctcacagggattaatcgaacacgcccttacatgggaggaaatttgtgtagaactagtgggattcattacaaatgaaaaaactcatataaaagcccgttaagtgcagaaattggtttgaaggaattttgaatgatagaaaatattccttcatatctcggaggaattctaacatgtggtctcatctcatgtttacacatatctttgagaactctaaaataatatataaatcttactccctccatttcataatataagacacaactattttttttatattccataatactccctccatccacaagaattagatatatttcacatttgagtttttccaaataagttgtttctatttatagtctttatacatccaagacttagggtgtgttcgggagtgagggttaggaacccaagttgcctagcacgcaaaacgaagcagcatttagtgcatgattgattaagtattagctaaaataaatttgaaaaatcgattgatatgattttctaaagtaactttcatatagtttttttcgaaaaaaatgtaatgtttaacagattaaaaaacgtgcgcacggaaaacgatgaaggtgagttgggaaagtagagagaagaactcagccttaaattgagaggtaaattatatgtttgattaaaacccaacaagccatgtaaatattcattggttccatgtttgtattcattctttgatctttattacatgcaagatgagttaatttctcattgatcttggtgacaaaagtaataggtgtaactttttttgaaaggaatgagtataaggcatgcatgcatgcatgcatacaattaactaagacctcttctccattaaattattactcatttttttaaaatcatctaccctcgagatctctaattctatttaatgcatgcattacatttattaggatgatccaaactatgagatgataagaattgtttcttggtctctaggttagagcaatttgaatagtatagccaactacaggctccaaatcatctatagttattttaatagccatggagtaattcatacccggtatgttgacctacaagtagtgaaactactaggtaggtccgtcggtttggcacgcaaactaagaccaaagcaatttatgtgtacttaatgcaactttgcaagcaaaacaatcaagatttaaattataagagcaatatggtcaaggcctcaagggtgacttttcttgctcaaggtgttcacgacacttctcgaaatctgcactcgaacataattccgataaagtagtgaaaatattcaaaatcatacacaaagaccaataagaagaccttatttaggactaataatagtgccaatagatagatcacgattaggggtgaaaatggtcggaaacgatcggaatcagtagcatctcttcagaaatgatgctcgatcggccggtaattgatcatatttatcatttaaactactcattatcgatattaatacgatgaaaaaagaattgtgaaaaaaaaaaatttaaaaatagccaaaaaaggttacggtcggaaacggtactcatatacggaaacggcgctcggtcgataaggaatttccgccaccattttcacccctaatcacgattttagaggattactggaagtggaatgaagtcaatcggagctacgtatatgaatttctagagattaatttattttgaggaacaacagaaatgatttttggatttggaaaataaatattccaaaggaatattcatttcgggctgacaggtgggacctgatgtgagagggattgaggcttatgcctctagggttcctgtagacttttgacttacattgaccaaaggatgtaggaatcgataccgttaacttttgacatacattaaccattcgtcttcttaaaatatagaaaacaatataaaccatgctcaaagtatctttaataataaaataaatcatacaaaaataaattataattacataaatctattatatactaaaagtcatttaagcttcctacaaatactcttaggatgcgctctaaaaaattagagaaaatccaagcaattctgagaaaaaaaaagcaaaacatcttgcctttaattttaatttaatacagtggacccattttttaaaccattggattacatctattaaaaataaaccacctaatctctcgtctgtacatacaacagaaaaaatatgtaattattcaacagagagaaaaatctcttgtgttatgtacatacgaaaaaagaatcaccgaagaaaaactacgtacgtatgattgggaaaaaaaacacgattaatccttcacccctaatcctcacattaaatatattttgattaaaaacatgtcacatagaactaaagtctatccttttttcatttcattctcatcctaatagtgttacaatattagtgtccaaatgaattaaaaataatagattattccataatatattaacccatgcatgaaccatcaacaggtaaattagatctataatacagaggaaaaaatatcaacacccatattaacccatatgtttttgaaggattattggtcgaacaaatattgttttcacgtgattctcgccaccgaatctattagattttttaaggcagattgtaattaatgtggacaatgtgatcaaatgaagtgtcaaatttttcttaaaaaccatatcaactactatgttttgatttaaaaataatgacatgtaggatcacattctagccttttacatgttgtccaaataattataaaaagaacatagattataacatatattactaataagttataagtgctcaaagttggaaccttaatagtactctaagctgagattaaactttttaattttggctataaatgactttaaaatagagttaatttaatccatgatattgcaaacatgttatttcagataaatgctattacaatttgtctatttgtagttgtgccattgaaattttacaaaattagaaccgtgccactgtcgtcacgtttgtacgatcaaacacaagtaaccaagtctaccagagggggtgaatggtagataccgtagattacgtcagcggaagtcaaataatcgaatcttgacagatcaaaacacaccccaacctcaaaagccaatgaaacacatgtaatccagtctatccgacctactagagtcagtctgaccgagcctggctggtctgaccgcaggtcactcggcggtctgaccgtcagccctaaaaacagcacgacagcgtttctgtaaaaacacgatttctcttaaaccaaccgttggatcgagttgcaaacttgatagaataaactagacaaactaaggaaaaactccactggagggatttgaaaaataataaacggtttaagagaaaacaccctcgaaagtcagttgtctcagagtttcagcaaatctgaaccctaaaactgaagcaaattcaaatctaacaataagccaagtttgtgaaattagatagggtttcgtgagaaacttgtaaggggtgcattgttaaatatatgatccgaattttgggcccacaatatatttggataagttttctaatagaacttgactattatgattagtttcctagtttgactcataagtctttccccactaggactgttagatttatactatatatattccttgtaagccacacggggagggtgcgatagcccaatgtatcccatgcgtatgtatccaactcctcaatagtgatcattgccggtcaacgcccatggtttttcccgcaagggttttccatgtaaaatttgtgtttcggtttcgggttgttttattgtatatctgtggatagttcatgtttatggcttctagatggatactatgcgtatgtaatactgtagttttctaataatgagtcacgttggagatagtttggaatcggaatatggtttctttgtttgattcatgtgtaggtgtctaaatgcctcgggagagtattgccggtgatgaatcgggagtcaacttggagataaggtgacgtccggatggtcagatatcatgcgggattcttaggctaaagatcaatgcacgtgattggtgaatattccatatggcatatgatggagatattgtgtgcgtatgggatgtggagtcgaatttggaaggagtccaaatttggtataattggagtttgtaaagttggtttcttgtactggaaggtttcctaggtggattaggacttcttgtatgagtttggttcgtggctttaggcagcctacctcatgtataaatagagagggagggtgtggattcccggtatcactttagagagcattgagttgagagattaattagggtttcgagtttggtcgagatttttgtgaggtgtgctgctgttgcactttgtaaacatagagagaagtaataaagttgtcatctactttgagatatcttcaatttgtgtttgcacgggttcggcggtccaaccggcgggataccggcggtcaggccggcggcattgcagcggtcagaccagcggcgacaacaggcatcggcgacaagttttggcggttagaccgggagatcaataccggtcagaccggcggctatggttcggtcagactggttaatctactccggttagaccgcaattcatcgattcaagggtaacttttatttccgctaaaagttttggtttttgggtacaccaaccattcacccgtctctggttggcttagttcctgctgttcggtcatgcaacgttctccatccatttcctcatttgcacgggggcccacttatcagattcctcttcttccttccccatctcagcgtcatggcgaggagagagctcctagaagtagttctgtgcgttgttgtggtggaacccctggtcctgttgccccaagagggaaagcgagagctagagcgaggtgagcgggtcatcgtcgacgtccccggcactaatggcatagaagccgcgagggcgtggaacacctgcgcacttccgcaccccatggataaaaggcagtctcggttctggttggtttttttaataggtgacgattttttaaaagaatcggcactatatctatattataggtgtcaattctttttacaaaccggcatctacagtattggtatcggttttttatctagaaccgacacctataatgtaagcaagcataggtgccgattattttaaaaaaccgacgtctatagtattagtaccggtttttttaaaaaccgacacctatattgtttaaaagtgtcggttctgtattttttcattgaggcagaagtgggagaaggtttaaaaccagcacatgtgagccgacaccaatgaaggtttttgttagctgaacggaaggcccatgcacaaatatccaatacggcatgagttgtggatatacacgttgcctagcaccatgccaatcggacggcataaaaatttgattgaatcagccataaaatctgtcgactgatttttagcaacaccatacttttatactcttcttgcgtgtttatatattttcttaaataaatgagcggtgaaaagtttaggatataatacgaaattatttgaagacagagtgagtactaattacagcaacccgtgcagtggtacatcatgtgaaaaaaatagaaatgctagatgttgtatacagatcgctcggtctcggtgactcaagagaatttagaaccaagagaccagcctttgtcaccctatggatctggcatgcggaatggacaccagagccatctgtaggtggttttgtaaggaagaacgtcgtcattcataaacaagtcggcgacgagtcgcatgtcgatctgcacctctagctctgccaaggattcgccacttgccatatgttcgtgcacgtcctgtgccagcccaaccagctcgcttgacgtggctcctgttactgtgtcacgagtcatcttcttcaagcagaagctgccggggatggaaccccggccaagcggggtccctgcatgccagacggagaactgccactctgaggtatacgcgtaagtttatatacgcatatgcaaactttgtatacgtgtattttttggattttatatatatgtaatactaattttttattcacgtatacaaagtttgtataaagttgtttatatacgtgcattttttggatttttatacgtacatataccaattattttttatacgcgtatacaaagtttgtatacacgtatttttttagatgtttatacatacacacaaactttatatacatgtgtatatatttttttacattaaaatagggtaagacttattctatacccccagtccactcctccccgtccctccctctcgctccccctccctcttctctcgctccccctccctcctctgatctctctctcttttttttattttttttctgttttttttggctcgctgaaacattttttccctcttttctagaaaaataaaaaataaactgccaaatttaagacttgaacccatgacctcatagttcaaagcacattcgtctaaccaattcatctaatgatgctatttatttcaaaaattttgtgagaaagtaatatgattatcaattcctatatatttcactattgaaactcatagcatgttactatgctccaataataacattgttgtaaaagtacagtaacacgtgatgttactgtataacacataggacattattgcacttatggcagtaatatcatagtgaaattgtagtagaccaggaatcgaaacaaaaatatatgggttaaagcctcacatgctaaccatatatttgttactgcacaaaagtagaagtgttagtacataataggtacatgttaccactttcaagtagctgtgttactgcacgataattgtagttttactatgtcatttttacaagatgaagatcgaataggtgggctataggtaaagtctgtaggtggctttgagcgaggtatgattgatgtaagagtgttttgaacaattttatacatttggtaaaactatgttactgcatgtatatacacatgttactacaaattacatactatgttactgcatatggagtgttaaagttcaaaatgccaatatttgaaaagcaatatctcacaagttatgtattattttttaaaaccgttttcacaatgatgctatagtgttactgcatgtggaggtttaaacttcaaaatgcatctacgtactcccctcctcaagaaaccgttcttcctccctcttttcaagaaaaccgatctcctccctccaatatagtgttactgcatgtatatgacgttactgcacttttgacaataatattatggtgaattacagtaaatcaggattgaaacaaaaatatataggttaaaagtctttgatgctaaccatatacttattaatgtacaaaagtaaaagtgttactgcacggaaggtacacgttaccacgtgtttatgcagtaacactacccaaaaatacagtaaaacgcattgtattaacatcgtgatatgattgtagtacatacaacagacaagtagtaacataatagtatacatacaacagacaagtagtaacataatagtatagtattaccgcttatggagagacaaattgcaaaaaagtcaagctttgaagaacaatatctcccaagtgatgtaaggttttttaaaaccgtttgcactatgatgctagaataaaagagcttatcaaaagtagatccgtcatgactatatttcaactatactttaacgctgttactacacgtaagacacaatattactacacagtggtcgtcgtattactgcactgtcttgggacgagagctgagaagaggtgggtggtggggggagttagtaggcgggtttgaccggtgggaggggcctttgaccaaggtgggaggtgggttttgggccttggtaaggagggggaagtgggtgtgacccttgggagggaggggggtatagaataggttatatatatatatatatatatatatatagacacacactagcaatgatgcccgtgcgttgcaacgggtaaaggtaattttaatcatgtatactggttgaaaaaaatataaaggaatcataatcataataataatactaatgaaataaaattgcagtgacctttggtcaaaaagataaaaatatataattaattttccattaattccattggctaaaaataatataatacgaagtagaaaaagttattctcaaattttagcaattttcaaaaagcttaaatagagcaaactaattatataaatgaaaacaaatttaatcacctaaataaaacaattagacctgtaaatgaaaatctgttgccagttcagttaaacatgagcctgcgggtgtgtgtggggtatatatctctcactcgtatgtcgtggtcttttttttgacatagaaaaaatgcccgtgcattgcgacgggtaattaaaattataacaaatataaaaatattatatgattaaggtttagttttacatgatatgagcactttaagaaaatatatttataatgaaataaaaaagttcagctgaagtgacctaacgtgaacttgttacatacggagcgtacacgtggtccatgaggtggcccaataatgtgggcatcctgggattagaatcggggaggaacaacttaagcgacctaaagtgaacgtattccgtgtgggcggcctgggaatggcgttcggcctaacgcgggagaagccagagccgtccgatctgatagacgatcatctcgacctatataaaagttcaacagcccaaaccctaaccctaaaatcatttcccctccctccccccctctctcaaaacaatgtggcggtggcccgacataccgacatccctacgacggcggtggcggttcagcagcgacggcgacaccctcctcttccagcgtcggtgtttcttagtgttcttgaatctgatcttgtattcttgttgtagtgttctgtttagaatttaggtccaaatttgatgtggtctctcatttttttcttttttttttcttttttgccatcggagagggattaaagcgggatcgatcacacgtgcgatggaattttttttatggacgaaaactataacccataagccatataatttttttaattaggtatatatagatattgaatcggactttccttttttttcattttttcgcccttttttcgttactacggatgtcagaaacatctttaatttgttttaccgtgtcacatatatcgattttttttgcccggtttctttttcacgtttttttcacggatagacgacggaaacacttttttatttttaagttgtacatatagagatagagatagagaaagagaaacggaaaacttttttcgcaacttttttttttggaatcggacagaaaaaaaattttacgcttgttttttaccgcgtcgatggagtcggattcgatttgtttttttaccacaccgtgtcacatataataggattcggttttctttggaatcggacagataccttttttctttttggcccttttctttaccgcgtcgatagagtcggattcgttttgatttttttcctttattttttttgccttttttaccctgtagaccgagtcagattcgtttctttttttttcttttttttgcctcaacttttttggatcggacttattatttttttttcttttttcccggtttttttcccttcttttgccttttttatcggagtttttttttcacacggttttttttcgccagcggatttttttcatttgtttcgtcctttttttatcggacatagtttttttttcgtccggttttttcgcccggttttttctcccacggttttttaacgaacgatggaagcacctcttttttctaaaagtagtatatatatatatatatatatatatatatatatatatatataactatacgtatacgtatatatgtatatgcatgtgccgtagagaagagagactaagaaaggaaaagtggccgcgcgcggcgcggggggcgcgactggtcgctaaccagcgccccccccccccaccctctcatcccttcctcctccccttattctatttcctactacactataaatttaaaaaagataaaaaaaacaaagttgaaaaaaattatatatagaaatactatatataaaaaatatttgaattcaaattcaaatttgaaacgggtatgtaaacttttgaattatagattttaggtctatacactaatatttgaatttgaatcgggtatgtaaacttttgacttataaactttgggtctataaactttaggtgtataaactttagatgtatagaaatactaaatataaaaaatatttgaattcaaattcaaatttgaatcggatatgacggagctcgtggctcctcaccgggagaccgcacaggcccccctttgccagttcgtccgggggcttagggtgaaatcccaagctctcgctgtatgtagaaagatcgcgagccaggaagaaacgcgagacacgggcaatgtatacaggttcgggccgctgggaagcgtaataccctactcctgtgtttttgtggatctgtgtatggacaagttacaaagtgtcatccagccctcagtcccctccctaggtgggcaaggtcctccttttatatctcaaggggataccacatgcacctttccctttccaaaccggactgttcttctcttcataaatggacggagatcggtacgattgctgtccgagtgcccttctgacgagacggcccatacctacccccacttccgccggaaacaggtgcgacgtgggattatggctgtctgtggatgacgcgaccagtgtcagaccggtcacagatcagtcatccttgtctaccacgcgtcagcttagcaacgtgcatgtttgcccttcttcatgtaacatcttgcatgtaatggttgggatgaagcctggtataaatctaaccagggctaacgtgccatctctaagagataacccgctagctccggcttgagacaagtgcctagaggctttcgtcttgacgggatggggcaaggcgtgcgtcagaccgccagtcgccacctaacccgtgatctgaccggtctgtgaccagtcacagaccggataaaagaacgcgctgcactgcgctgcatgcagtgtgacacgcttgaccagaccacaataaatgcggttaggtgagcactgccgtgttcacctatcccatatatgtggcgcaaactccctcaaggggtcggggtgcctcggccctcggggccggggcaggagcaacccgaccccccctcgggggggaaatcaggaggagggcggacacctcaccctcgggcccgacgtccccgaaggtgccaggccacgtgggcgattgtgtctgcctcaagcctctggtcacgatacccccggtcccatatcaccgacagtagcccccggcgttatgccagggcgatcgcccttctcaagggaagcggtcgggcgtaatgccactcctaaagcctggtgacaggtgggaccggtttccatggttgcgcagaaacccaacggtctcaaaccatgcacatatggtaacttggctgtccataatgggcggtctcttcaagactgccacatcacttaagcagcgcacgaatctgggtgagctgatttgcttcgcctggagatatggtaacgtcgcttcggccggcgagcgtaattaacgcgcgcacgatacgatctatctcgactgccacaaccgcatatccacctcatgcgccgcaagcgggcgaatgggattagtggaagcgagggcacgagaaacgagggagcgagatagtgagaaacgagggagcgagatagtgggcgcgagaaacgaggagccgggcccagcgatggcaagggtataaaaacaccgaggaaaagttttgctcccttcctttcgccattatccctcttgccttcgccgcttgagccctccctctttctctgctgcgccctaccttcgccacacgcgctcgctttcaatcacctcttcctccggcgccatggcacggggctccgctctgctcgatggtagcgttctaccgccttcccgcatcgtgagcgagaggcacgccgggctgccgcgccgcttcatgccggaatccgccaccggtcgggagatagtgatgctgggcgggggacgcccggcaccagactacccggggcggtccgtcttcttcctccccttcgcaatggcggggctggttccgccattttcttgcttctttatggacgttctggagttctacgatctccagatggcgcacctcacccccaatgcggtgatgacattggccatcttcgcgcacctgtgcgagatgttcattggggtgcgcccatctcttcggctgttccggtggttcttcaccgtgcagtcggtgtcgccaccgtcggtggttggtggttgctacttccagccgcgggggccggtgctgaaccgctacatcccctgcgccctccgcaagaagtgggacgactggaagagcgactggttctacacccccctcgccaacgaagcgcgcctccgacttccaagccagcccccggcgcaggtctccagctggcgggcgccggtagatctgggggatgactatgacgccgtcctcgaccgcctggcgggcctgcgctcccaggggctcacaggggccatggtgtacggcgactacctccgtcgccggattgcgccgctccagcggcgcgcccggagcgcttgggagtacactgggtccgaagactacatgcggacccaccagggagccagatgggattgggctcccgaggacttcaagatcgtggtccaaagggtgctgaatctcagctccgtggaggcgtctcttattcctcgaggaatcctccccctctgcagcgatcccgaccgcgcctctattctgaccattatgataggggtcggggcctcagaggaggaaactcctaagggccacgacggcgcgggcgagagccgccggggggatcaatctaccccaggagggggtcgtgcttctgggcctcgcgtcgggggctcggggagcagccgccctgccgacgcccaggggaagaggaagctgggaggaacacctcccccatctcctccccgagggggcggggcggcgcgtgccagcaatctgcgcccggagggggccgcgccgtcatcgcaacccgagggggagcgcaagaagaagcggctccgcaagatgggggagacggaaccatcccggggaaacctgatttcccctccaaggtggtcatttaaccgaccccctcgcaggttcgtcccactctccttgcgaccgtctttctcctatcccaaaagcaaattttctcttacccatcttgttcgtcttctggttttttcttctgcttcagcgatgtcccgtcgcgttcctcccgccaccccaagtccggccagtccgaggccgaagatccggcggccgcagaggaacggaggcgagaaaatgaccggcgagaggccgcagatcgccttcgggaagctgaagaggccgcccgggaggccgctcgggttcgtcaagcggaggaaaccgctcgggaggaggccgcccgggctcgccaggctgaggcgatggcgtcttccgaggcagctcacgacaaagctgctggcgtgtcgcttgggcccactccctcgggcgacgctcaagcgacggcctccggggcggctcgtgacgaggccgcgggcgcatcgcctgggcccacttctccgggcgacgcccaggaccaaacgggtccgggggacatccccgagcccagcgcatcctccggcgggccgagccgcgtcgcgttctctccaaggcggctcttctcctcgtcttctgtcgccccgctgagcgccgagccccttctgcaggccttggccgccgcaaacactgcggtgctagatgggttcagcgcccaagtggaggccctgcgagcggaacgagcggagctcgaggccgcatgggcgcgtgtcgaggagggacggcgctcggtggacgtcatggtggaggtgggccgtaaggctcaccgccgtcatgtctcggagcttgaagcccgcaaagcggtgctggcggagatcgcccgagaggtggaggaggagcgggaggccgccctcatcgccaccaccgcgatggtcgaggcgcaggacaccctccgccttcaacacgcaaactgggaggcggagctaaagaaaaagctcgacgctgcccaaggggtccttgacaccgccgctgcccgagagcggcgggcaacggagactgaagcggcatcccggcggcgcgaggaggtccttgaggcccgtgccatggcactggaagaacacgccggcgccgtggagaggggcttggcggaccgcgaggccgccgtcgccatccgggaggcaacgctagcggtgcatgaggccgcctgcgccgaagaggagtccgcgctccgcctccgcgaggacgcactcgctgagcgggagcgagctctcgaggaggccgaggccgcggcgcaacggctggcggacagcctgtccctccgcgaggcagcgcaagaggagcaggcgcgccgcaatctggaatgcgtccgcgccgagagagccgcactggagcagcgggctgctgacctcgaggcgcgggaaaaagagctggccgcaagggcgcccatcggtagggcggctgcgggcgaaagcgacttagccgcccgcctcgcagctgccgaacacaccgtcgccgacatgcagcgcgccctcgactcatccgccggggaggccgaggccctccgcttggcgggcgagatagggcccggcactctttgggatgcggtctcccgcctggatcgcgccggtcgacaagcgggcctctggaaaggccaaacaatgctgcactccaccaatctggaaggcctcgctccgcgcctcacgaagatggcctgggctctccaacaactccccgaggagctcgagaagaccatcaagtcatcctcgagggacctcgcccaaggagcggtcgaactcgtattagcgagttaccaggccagggaccccaacttctctccatggatggcgttggatgagttccctcccgggaccgaggacgacgcgcgcgcgcgggtccgggacgccgccgaccacatcgtcaacagcttcgagggctcggcccctcggctcgcgttcgcccccaactccgacgaggagggcgacgccagcggtgcagacgacgatggcgacgaggccggcgacccgggcgcattggaatgagcccccaggcccccgccaatctccaattttttctttttctttcttctaaggccttcatgcctcttttttgtatagatcaacttaatctggaaaaaatgatgaaaaaattcttcgtgtcaattttattttgctatgcgtatgagatgaggatgatctgtgccgtggtcctcttttgtgtcttagcttgatttaagggctcgtgcccaagtcccagtcctctaatggctcgggtcggggctagtgcctggggagatccacatgtcgaggctggccagcccgggaacgtggtgaccgagggttatgggtgacccgattgtgggtttttgccgattcccccccggagttcaccacgccccggggcacggctcggttctgggccccgtttggcgattttagctgaccgaaccgagcccccgagggcaaggttgagcacgagtgaccttatttcaagtcaagattcttcaaaaggaaaaaacggcacagacacaacctttaggaaattgaaactgcttttattgaaatgctgaaataagagaaataagaatgtgcatgcgtggtagcccccggccaatcctgcacacccgaggggggtgcggggttggcccgagccaagacctgacactcgacccccccctcaggggtagaagcgacgaaggtgttcgatgttccacgggttaggcagctccgtgccgtcgcccgtggccagccgtacggagcccggccgggggacaccgatcactcgatacggaccctcccacattggtgagagcttgctcaatccagcacgcgtttggacgcggcgtaagacgaggtcgtcgacgcagagtgatcgggcccggacgtggcgctgatggtagcgccgcaggctctgctggtagcgcgcggctcggagggccgcgcgcctccttcgctcttccaagtagtcgaggtcatctctgcgaagctgatcttgatcagcttcgcagtacatggtggcccgaggagacctcagggtgagctcggatgggagaaccgcttctgcgccatagacgaggaagaaaggcgtttccccggttgctcggcttggtgtggttcggtttgcccagagcaccgctggcaactcctcgatccacgaatcgccgtgcttcttgagaatattgaaggtcttggttttaaggcctttgaggatttctgcattggcgcgctccacttggccattgcttctggggtgggcaggtgaggcgaagcagagcttgatgcccatgtcttcgcagtagtcgccgaagagttcactagtgaattgggtgccattatccgtaataatacggttaggcactccaaaacgggccgtgatgcccttaatgaatttaagtgcagagtgcttatcgatcttgacgaccggataagcctcgggccacttagtgaacttgtcgatcgcgacatacagatactcaaacccgcccggggcccgcttaaacggtcccaggatatcgagcccccagacagcaaatggccacgaaagtggtatgatctgcagggcctgggccggctgatggatttgcttggcgtgaaactgacacgctctgcatcggcggaccagatcgactgcatcattgagagctgtcggccaatagaatccttgacgaaaggccttgccaaccagtgtgcgcgaggcagaatgggctccgcactcgccttcatggatatcggcaagaagctcaacgccttgttcccgaggaatgcacttcaggaggattccattagccgcgcgccgatagagggtcccttctaccagcacgtagcgtttggaaatgcgttggatgtgttcactcccttcgcggtcctcgggtagagtcttatctgtgaggtatgcttggatctcagagatccatgcaatcaatctaagggagcttggagcgctcccttcgggtcccgaggcctggactccgacgggcctcgggggccggtcaggcgcatccgtctcccctaaggggtcgggtcgcgccgacggctgggtaagcctttcttcaaaggcgcccggtggggtctgggctcgcgaggacgcgagccgtgagagttcgtcggcaatcatgttatcccgtctgggtacatgccgaagctctatcccgtcaaaatggcgctccatacgccgcacttggcgtacgtaagcgtccatctgtgggtcagagcaccggtactccttacagacctggttaacgaccagctgggagtcgcctaacaccaagaggcggcggatccccagtccagctgccactctgagtccggcaaggagtccctcgtactctgccatattattagtcgctcgaaaatcgagacggaccaagtatctgaggatgtctccgttcggagaggtcaacgtgacccccgcaccggcgccctggagagacagagaaccgtcgaactgcatcacccagtgggcggtgtgaggcagccgtgaggggtccgtgctggcctcgggaattgagacggtctctggagtcggggtccactctgccacaaaatcggcgagggcctggctcttgatagcgtggcgtggttcaaagtgcagatcgaactcagaaagctcgattgcccattttaccacccgtcctgtaccctctcgattacgcaagatttgaccgagggggtaagacgtaaccacagtgacccgatgcgcctggaaataatggcgcagtttcctcgaggccatcagaatagcgtaaagcatcttctgggcctgagggtatcgggtcttggcgtcccggagggcctcactaacaaagtagacaggccgctgcacccttcggtggggccgatcctcttcgctaggggccgtatccccggggcgttcttcgtccaaatggcctctcggggcgcactcgtcttctgtgccgatgacctcggggtcggaggatgacaggagcggccttcccacagtggcctcggggccgtcctgagggtcgggggctcctggcgtcgtcggacaagcgggcaaagggacaactccggtcgtcaggggcctcaggcctccgttcggctcgggggcctctcctccctgctctctcccgggtcgagtcagcacagggttagcctcggggccaaagggcgataggtgcggccttcccgcagtggcctcggggccttcctgagggtcgggggcacccagcaccgtctgacaagcgggtagagggccgactccggtcgtcaggggccttaggccgccgttcgactcgggggcctctcctccctgcttgctcccgggccaagtcggcacagggtgggggtgcgcggaatgaggattgtcctcatcgcgctccacaaccaacgctgcactaactacttggggggtcgccgctaagtaaagtagcaggggctcatttggctccggggcaacgagaaccggaggagagctgagatacgccttcaactgagcgagggcattttcagcttcctccgtccaagtaaacggccccgagcgcttgaggagcttaaataagggtagcgccttctctcccagcctcgatatgaaacgacttagggcggccatgcaaccggtgacgcactgcacatccctaagtttgctgggggggcgcatccgctctatagctcgtatcttctcggggttggcctcgatgcctcgggcagagaccaagaacccgagaagcttgcccgcaggtacaccaaacacgcacttatcggggttcagttttatgcgggcggagcggaggttttcaaaagtttccgctagatctgagagtaaagtctcttggttgcgcgtctttacaaccaagtcatcaacataagcctcaacattacgtcctatttggctacccaaagaaattcgagtagtacgctgaaaagtaggacctgcattctttaacccgaagggcattgatgtataacaataggttcctacgggggtaatgaacgcagttttttcctcatcctccctagccatgcgaatctgatggtaaccagagtatgcatctagaaaacacaaaaggtcgcaccccgcagtggagtcgacaatctgatctatgcgaggcagggggtaagggtccttaggacatgccttgttaaggtcggtgtagtcgatacacatccgaagcttgccgttcgccttgggaacgaccaccgggttcgccagccactccggatggatgacttcacggatgaatccggcctccagaagtctcgccacctcctcgcggatgaaggcttgacgttccggggcctgccgccgcactttctgccggaccggcctcgcgcccggccgcacggcgagacggtgctcaatcacctccctggggaccccgggcatatccgccggtctccatgcgaagacgtcagcgtttgcccgcaggaaggagacgagcgcgtcttcctatttgccatccagaagaccaccgatccgtgtggtcttggatggaccgtcgcccagggcaacctccttgaccgggacctcgtcgcatgtgacaatccgccgcctcggggcggtgggggcggaggtgccaagcctctcgtcaccaccctcgggcttggacgcagcagcgaggtggtccgcgcgctgctccatgcaagcgagcgcgactttcaggtcgccatggacagagatggggccgccggggcccgacatcttcatctggaggtaggcgtagtggaccgccgccatgaacttcaccaacgcgggcctccccaggaccgcattgtagggcagactgaggtccgccacatcgaagttcacccgctccgtgcggaaattggcggatccaccgaaggtgaccggcaggtcgatgtgacctaacggccatgtgtgccccggcgtcacaccgataatcggttgagacggccggagcaccatccccggagccttgatggcatcataggccgcgggggaaaggatgttgagggcggctcccccatcaatgaggactcgccccaacttcacattgcaaacggtgggggaaaccaccatcgcaatctgccctccccgggcaacgcacggtgggtggtcggtctggtcaaaggtgagggcaacctccgaccaccgcgcccgacgcgtcgcctcatgagtaggggccgcggcgagaagctctcgcttcatagccttgaagctccggcgagagatgtgagcacacgctcccccatcgacagtggcaatggtggccccaggttcttggaaacctaggtcatcatcaccgtcatcgatgtcaacagcgggggccttctgtttggcctcacttcgccgtttgccggaaggaaccgccggggacttaccttcccggcgctcctgcctcctgtcctcctcccacttcctcgttcgctctgccaaatttttgactgcatggcagtccgcgagatcatggagggaggtgttgtggacggagcaccacttgccggctgagcgctccctgctgggagtaccagcctctttctttttgtcgctcgcaggcctcccctttcgggtggcccgtggagcgccctcgacggcgaggacatgaccctcgtcgccggaatggaccgacctcttcttcctcctcctgtcacgccgccctgtttgagcggcggatccgggggcggccgaagctgccacaccggaaccggaggggttccaggtccaagcctcctccttacgagccactcggtccgcgagctgaaaaagctctgcggtagtctggggctctttggaagcgatcttttcgagcatgcggttgtgccgcacaccccccctgaacgcgtagatcaccgcgtgtgcagggatgcatggtatggtattgcggacttggcagaaccgctgaatgtacgagcgaagtgactcatcatcccctcgctgtactgcgtgcaagtccgcttcttcgcctgggcgcggatatgtgccttgaaagttcatggtgaactgttggcacaaatcttcccaggagtggaccgacgcgggtggcaggttcattagccaaccccgcgcctgtcccttcaggaccatgggaaagaaattcgccataaccctgtcgtcacccccagcggcctcaatcccggtcgtgtagacctggagaaactcggtggggttgacgctcccatcatacttctcggtgatggtgggccggaaccttgggggccaacggacattccgaagactcgccacaaaggctctacagccgacaccaccagccgggggcacggagggctggtcctcacgtccatgtcgaggcgacactctggacgaagaggcgccctccgttgcgcggggagtacgccggttattacgccggcgctcgatgtcgaggcgggcatccggctctccatgctgatcctcccgagtcgggggtgtcgacgagggagtggcagccgaatgacgtgcaaccgccgccgctcgccgcgccctccgccttgatgacacggagccggtggtggcggcgccggaggtcttggtggtggcggaccgtccaccagcacccaggcgctgctgtgccgtcatgaccaagttggccacgtcgtccagccatcgctgggctggagactccgggtcaggaacgacgggcgggtgacgtaggagcgcgccagcagcctgaagcgcgccctgaggcgtgctgccgtcgccgtagacgaggaggcgacgctccccatctcgccgttctcctgcatcacccgcgaccggtgatgctatggatttatcaaccctctcgagcgcctccccctgcttaggactttggtgtggaggaggtgggggagtacgagctcgacggcgtgggtttggctccccgtcgtcgccgctcacactcggagagaggtcgtgcgcctttgcttgctcggccattaggctgaacaagggaaacttggcgcacacggaagagtatgagagctcagaaaacacacgctgagccccctacctggcgcgccagatgacggagctcgtggctcctcaccgggagactgcgcaggcccccctttgccagttcgtccgggggcttagggtgaaatcccaagctctcgctgtatgtagaaagatcgcgagccaggaagaaacgcgagacacgggcaatgtatacaggttcgggccgctgggaagcgtaataccctactcctgtgtttttgtggatctgtgtatggacaagttacaaagtgtcatccagccctcagtcccctccctaggtgggcaaggtcctccttttatatctcaaggggataccacatgcacctttccctttccaaaccggactgttcttctcttcataaatggacggagatcggtacgattgctgtccgagtgcccttctgacgagacggcccatacctacccccacttccgccggaaacaggtgcgacgtgggattatggctgtctgtggatgacgcgaccagtgtcagaccggtcacagatcagtcatccttgtctaccacgcgtcagcttagcaacgtgcatgtttgcccttcttcatgtaacatcttgcatgtaatggttgggatgaagcctggtataaatctaaccagggctaacgtgccatctctaagagataacccgctagctccggcttgagacaagtgcctagaggctttcgtcttgacgggatggggcaaggcgtgcgtcagaccgccagtcgccacctaacccgtgatctgaccggtctgtgaccagtcacagaccggataaaagaacgcgctgcactgcgctgcatgcagtgtgacacgcttgaccagaccacaataaatgcggttaggtgagcactgtcgtgttcacctatcccatatatgtggcgcaaactccctcaaggggtcggggtgcctcggccctcggggccggggcaggagcaacccgaccccccctcgggggggaaatcaggaggagggcggacacctcaccctcgggcccgacgtccccgaaggtgccaggccacgtgggcgattgtgtctgcctcaagcctctggtcacgatacccccggtcccatatcaccgacaggatataattcaaattcaaatttgaatcgggtatttaaacttttgacttataaactttgggtctataaactttagatgtatagaaatactatatataaaaaatatttaaattcaaattcaaattcaaatttgaatccgatacaattcaaatttgaatcgggtatataaacttttgacttataaacttgggtctataaactttaggtgtataaactttagatgtatagaaatactatatataaaaaatatttggatttaaatttaaatttaaatcagatatataaacttttgatttaagggcctgtaaactttagatgtgtaaacttgaagtgtacaaactttaggtgcataaatttactaaaatagaaaagtaatgtggtgctaaaaaaaaccacgtggagggtggaggaaaagagggaggagacccgatcgcccctggcgatcaatcgtacatatatgcccgcagcttgagaatctgtctatatatgcggggtgactgttgtagtttgcgagttggaaatggatgtgtgaacgttttagccgcgcgatcgaatcggatccgtcctgaacaagctgtaactgattactaacggaattccattagtttaagtggtgcgagccgaaaccgaatctgtccccaacttcccatgcatgcgaaatcgatggcaaataaaaacgccgggcggcgtacgtgagccaaagctgagcgccggagtcaagttgagcaatggcgaggttggtacgcctcatccatgcaaagtacatttttgtttttatagttgatcagctttggcataatcacattgtaacgaacgaatttaagatgtactccctccgtccaaaaaaaaaaagcaaatcctgggtttccgtgtccaactttaactgtccgtcttatatgaattttttttataattcgtattttcattgttgttagatgataaaacatgattaatattttatgcgtgacttgtcttttaattttttttaaataagacggacggtcaaacgttgggcacagaaaccagggtttatctttttttgggacggagggagtactcatttcggcacagagatagtatttttaatgagaatggattctaatttctcaatgtgttgtccccacgtttaaccttttttttctcaaaatccgatgcaaataattgtgaaaattcttaaataaattggtaatgtagagtatatacatatctatcagttttccaaaaatcaagttaaaattcaacctacacaaaaagagaaaaagaaaagataaattcaggtatgagcaatgcgctactagctactattaatacgttgaatttgtttatttatatctcaaaactaggtaacccacgtatatgcgcggacctcttctttaatgtgattaaaatttattatgaatgtttatgtgtggcagaatttttattaaaaattttgtactatattttaaactaaaatttcatttagtgtgctttgaacgctgatcataattttcttctaattatccataattaaaagaaaattatgaccagcgttcaaagcacattaaataagattaatgagatatttttggatattttgagttttgaatttagcagttaggagaaaatattcaaaacaatggatggggttccctcttagaaaattttgggtatttcgagtcctagaaggatatcttaccccaaaaatttgccaaaaatgtcaaattctttgtttgattctatttgaaattttagatatttttgttccgaaagtccttctaaaattttttattgtttctatttagaaagggtttttaaatccaacaacatttgttcaatcttcaatttaggccacgtccatttttgtaaaaaaaattggagacttccactctataaatcatccttgaaatgatatgatctttgtaatttggcacaaaaatataagtaggttgaacatacaacctggcatggggcaaaagcatccgtctaaatttctctctccaatcaagtaagaaatattaaaataattaccatagtatttttcattagcaaattaccactaaattgtagttgctcataacaaatacatgtttttaaattgttttatggtaaatgtcaggaatttacaattaactgtagcatgttctagcaaaatgaaaaaaaatggatatggtctttaattaaattccatgtggaagtgacttgatagattgatgaggccacctcatggttgttttactgctaagattcctggtgcaactcatacttggtacgatcggtatgatgttcaactaaccatacttttattttgaaccagttgtctataaaaaattaacactataaggaatacacgttatggaaaaaatatatcatttaaatatttttctctaatttcttagtgacatcatcttaagatcatttatcatgtgtgtaatttagatgctattatcatcttaagatcatttatttatctattaaaaagatcatttatttataaaaatataatggtcaatttgtataggtaaatggccgcatatacatgttgagagaaattaattaagttggtagaaaatcatcagatatttaatgtcatacaggtaatacggaggtcttttttggtcttcctttttttccccattaggatagtgttaattttaattgttatggagttgaaaagaaaagagaaaaggaacggacggcggatgctgcataggggcagggatggagggaggttttggatattttttaaaaaaaagattgatgtaatgatctaaaataatatgtctaggatattttctctaatttgagagaatgacgttacagtttggaagtcacagtccaaagctaacatggtcaacatgtggctgccaacttggaccggcaagccaaccccgagccaccgaggcacagcgttggcgggccaggcaagccgtaggcagcccccgtggcctggcatgcttcagccctttcatccttccctaatggacaggaaataggaataagttcacaagaggtccctcaacttaacaacgagattttttaaggtcccttaaccacaaaaccagaaatgtttacccctaaactcatataaaccgtgcactcaaggtcctatggcagtatatataggtggtttcgctgacgtggcatcctagtcagcaaaaatattaaaaaaaagtatgtggggtccacatgtcagttgtacatatcttttcttcttgttttcttctcctcttctgtattctctcttcgctcttctcttattcaggccggcagagagcggagagccggcgggcaagcgcggatgtgggcggcgggctactctccgaccaccgcgcgcccttgttctccctcctccgccgctgggacgacgagcttcggaccaagatcaagaaccacctcctcgcgctcggatggaccatcacctccaagcccaacctccctggcctcgcgcccaggctccactacgtctcccccgccagaagcaagtcctactactccctccgccgcctcatccagaccatccacctccaccaccaccatgctgctacccaatcctaatctcaatctcaatctgagtcttgggcccctcttcttgaggaatcggatgacgaccaataccaacaagaagcagatgaagatgccatcgcggggtacattgccttcatggaggagcagaatgccaggcgcggccgcgggcagggaaatgatgaggagcagaggtccatggccaaggagcttcggatcaaggctaaggaccagctcaggtcgttgtggtggacattctcgatgaaggtcaagtacaacggtcgcgaggaactgtgctacacagagccgcgtggccgctcccacatctccctcatcaccgcctgcaaagcctaccttcttcaccacacgccctcgacaacaatgcagacttcaagcataaacaaaaaaaaagagatggtgaaatgcagacttcaccacatgcatgtgcggcggctgcaacaataagagggccgcagcagagtacacggtggccgagttcgctgtgcacggcgacggtgatggtccctccacctccggccacctccgccgcccgcggcctgccgactccccctcccccccaccgctcccgccgccgacgacgccctccccttctttgcgtcgccgccaccggcagtcgaacctctcgtgacccgtgggtcgtggctccgcgcacgcccgccgctctgtcgtccgcagcccgccgccgcgctcgcccaccgccgctccgccggtgaagagaaaagtgaagaggagaagaagaaaagcgaagaggaggagaagaaaacatctatgaagctgacatatgggcctcatatattttttttaatttttttttctaactaggatgccacgtcggcgaaaccacccacgtatgttgtcatgggaccttaagtgcacggtttgtgtaagtttaggggtacatatttctgtttttgtggttaaaggatttaaaaaaatctgttgttaagttaagggaccttcgtgagcttattcccaggaaatatcaacccacaaatccgaggcctctccctctctccttcgctccaaggcctaggtcgatggaccggcccaacttcccaagctcactggcgctttttccctcagttgagtctacagtgcctcccgtatcccatttcaacttaccttttggcccacctgtcatagaataataaattgtgttcctctgtttacaattgacatctcaacatcatttttaaaaatttgagatttcaactttttttaaaaagaaaaaatggactgtttacattaagatttaaagttcttgcaagctgtcataaaaattaaaaatatttttaaactttggtaatgataatgatgttaaaaataaagttttagcttaaaatacaacttgtataaatagtaaaataaagagaaaaaaatattaaggtgcaaagtgaaccatttacaacttgtataaataccttttgttttttggtataatagtactccctccgtccctaaatgtttgacgccgttgacttttttaaacatgtttgaccgttcgtcttattcaaaaaatttaagtaattattaattcttttcctatcatttgattcattgttaaatataattttatatatacatatagttttacatattttacaagagtttttgaataagacgaacgatcaaacatatttaaaaaagccaacggcgtcaaacatttaagatgtttaaggacagagggagtagttggtttgaaagtttgggcgattatgtggagttactccattcagaaattcaatcactcgtggctatccgctatgcatgttgatactatatatattcgctcgaacaattcacaccacactcaaaatctcaaatcaacagatgttctcaagatttcgatcaagcatctccagccccatcttcattggcctcgttggtcgattgccgccgtcccgcggcccagcgaccgagcagtcctctgatatcccactccaaatccctcaggcgtagcaacaggtacagcacgattccggagatgaagcccagcgcggcgctcgagcctgtgagcgacacgccggcgcagaccagcatgacgaacgactcctgcttgctccccatgtcgcgcgacgccatggcgagctcgatcccggagaagagcagcatgacgcccagtatcccgatcgggaactgccccaggatcgtcacgaacgagttgccgaacaccagcccgagcgccagcttgccgatggccaggaacaccacggacgcgccggtccggccgccgaaccggtactgccccgccagcccgcccgcgccgtggcagcacggcatggcgccgaaccagcaccccacgaaattcatgagccccacgctcaccgacacccgcgccggcgagagctcggcccgttccgggaacaggtccgacgacagcttgcacacggcgatcaccgagttcagcacggacagcgggagctgcggcacggcgccctcccagaacccgatcttgaaatcgtcccaggttatcttgaccagccccaacggcgccggcccaaagcggagatcctgcaggatggacggatcacgaacgaagcagagcaccaagccgagcgcgaacacgattagcgccgccgggacgcggctgcaggagcgacggcgacggctcgtgccgtccctgttgacgtcctcgtcgtcgccggagccggtggcgaggattatgaacagtagcgcggcgagcgcgaggacaaggccgtcgaggccgaggagggggcgcggcacggaggtggaagcagaggaggaacgggagaagtcctgcacgtagcggatgtacttgacggcggtgaaggcgaaggagaggccctgcgagagctggacgccgcgcacgacggggagcgggaggaggcggtagagggtggtcatgaggccggtgacgccgaggaagaggaggatggcggcgacggcgaggccagcggacatgatctgcgggatggtgaggtgcgcggaggagagcgcgacggcggcgatggacttcatgggctggacgggcatggggatgccgaagaggagcccggtggcgaagttgtagagcgcggtgaagatgagcgtggtgccgaggtcgaggtgggacgcgagcgacagcgccagcacgatggggatgtaggtgcccagatcgcccaccgcgccgcccagctccgaccacaccgacgtcttgagccgtatggtggacgggacgaacctgcggcggccgtcgccggcctcgccggagaggagcgggtcgccggcggaggatgccatgggtgggaaactcgaaagcaacgacttccttttgcctagcgatgttgttagcttgcacacgtttctgaccggtggaatgagcgaataaaaatactaatgtctctctcgaggcttaattaagatgcgatccagatttccgtagtggcagagtccagtgaactcaagtttgatccacactatccgtaattgggcgttaattcctacctaaccttaaatagtcgatgtcactgtcagggatggtatatgcttaaagattatggaggccagctactgcacgagataccacccaaagatctcagttcagattgggtaatttaccgtgtttaaatattcttgaaactgcgaagtgcgaaccatatggctttggcttttacttgaccaaaaacataatgatggtcaaatattatccattattttagaatatattctgaaactatgaaccttgattcaattgggctttagttgacggaaattacactcgcttatagccaaatattgccagttttatatcgagaataacttcttttttctttccaaactatctttactgtgtttttgttgtgacttttggcgtgatgtagggacgggacaaacaatatcatggatgatgcattctgcacgtacgtcttcgcaagatggatagcttccaacgagaataatggccgcgacaaggatgtcaagtgacattctggccttctgggtgacgacggggtatgaggatatttccctcttcggcccatgataaaggtggacacttcagcggacaacattgtttgcgtggtcacttggaaaccttttgtactaccatacaaatcacaaatgcttttgtaaagaaatgatgtagacacggtgaaaatatctttcacaaacctgcttatctcaaacgattccgcggtatccagtactcccttccgtttcacaatgtaagtcattctagtattttccacattcatattgatgctaataaatctagacatatatatctatttagattcattagtattaatataaatgtggaaaatggtagaatgacttatattgtgaaacggaggaagtaccattttgttacgaaaatatatctattgcggaataacttggcatctaaaaacttgctatattgttaacactacttgttgtaagtaatctgttgagtttctttctccttgtaatgaaataggtaatctatagcaatagtccattcaataatatatgtttatccggtttgaggattctggaaatgtggaaggctgttatcaatggcaaacccaacactaaattttagctatgacggattaatatactaggatgaggcgtattatactttcagttagtgaaatatttttttatgcgcaaactatactacaatcgtgctttccattggtgaaatatttttttatacacaaactatactacaattgtactacaatgaacaactataatggaaaattttgcatgtaatatttttaccaataaagtaattttcgtgagagtgttatacaggtgtgtttgctcgtatttctattattttctttagtccggctgtgcctttggtttagaacattagaaaattaggccgataaaggcattaaattagtgtccaactaacctattaatcaaattactagcatctgaaatcaacgcccaaatgtccaacgccaggtcgcaaactcaccttggttgtggggcatagctatggacagtgccttggcaatggccacgagaagatccgtcactggatgttattggagctaacggggtaaatcagactactccaatagttcagaaactggagtaattcggttagcaaattatatttctttaattaataacatggaaatagaaggggtcatatatgtagaacaagaaatacaagatttttcagaatcgatgcaaaaagcccctaaaaaggccaaaacgatcagccgagctctcctttccgcgctgtaactgcaatgcagcgttcaggctatcttctttcgggccttcccactatcctaactcacaagccgttggtagttcccttgatcgcttccaatagtcgcgggctgctagctccgtcaagcgtcaaccaaccgctgtttagtctgctcctcatgccatgcgttacctctacttccacggcaacgcaagccaggctcggcctatccgccaccacctcctcgcctacctcgacgcctgcgcctcgcgggcccacctggcggagctccacggccggctcgtccgggcccacctcacctccgacagcttcgtcgccggccggctcatcgccctcctcgcgtcccccgcggcgaggcatgacatgcggtacgcgcgcaaggtgttcgacggaatggcccaaccgaacgcgttcgtgtggaactgcatgattagagggtacagcagctgcgaagccccccgggatgcattggcggtgttcagggaaatgcgtcggaggggagtctctcctgataattacactatggcagcggtcgtgtcggcgagtgctgcctttgctggcttgaagtggcggtcaaatggggacgcaattcatgcgctggttcggaggattgggtttacatcggatgtgttcgtcatgtcaggtcttgttaattattatggtgcctttagaagtgttgaggaagcaagcaaggttttcgaggaaatgtatgagagggacgtggtgtcttggacgtcaatgatatcagcttgtgcacagtgtggtcactgggacaaagtgctaaagatgctttctgagatgcaagcagaaggaattattcctaacaaggtcacgattataagcctgctttctgcttgtggccaaacacaggctgttgatgaaggccggtgggtgtacaatcaggttggtaaatttggtatcgaggcagatgtggatatcaggaatgctctcataagcatgtacacgaaatgtggatgcttgtctgatgctttagaagcatttcaagccatgcctgcaagatatactaaatcatggaatacgttgatcgatggctttgtgcaaaatcatgagcacaaagaagcgctaagaatatttgaagagatgctgttgcatggcgtaactccagatggtataacgcttgtaagtgtcttatcagcatgtgctcaacttggtgagttgcggaaaggcatgcatgttcacagttatatcaaagataatgggatctgttgtgacaatatccttacaaattctttgatcaacatgtatgccaaatgtggtgatatggctgcagctgaaagggtttttcaaactatgacaaaaaaggatgttgtttcctggacagttatggtttgtggttatgtgaagggacatcaatttacaatggccttcaacctatttgaagaaatgaagattgcagaagtcgtggcacatgaaatggcactggttagtctactttctgcttgttcacagctgggagcacttgataaaggaagagagatacactcttatatagaagagatgaatgtagccaaagatttgtgcctagaaagtgccctggtggatatgtatgcaaaatgtggctgcattgacactgcttctgaaatatttagaaaaatgcagcataagcagaccctctcatggaatgccatgattggaggtcttgcaagcaatggttatggaaaagaagcagtggagctctttgatcaaatgctggagttacaggatccaaaaccggacggcattactcttaaggcagttcttggtgcctgtgcacatgtaggaatggttgatgaaggtctccgttacttctatttgatgtcaagccttggtgttgtccctgatactgagcactatggttgcatagtagacctcctggggagagctggtatgttagacgaggcatttcactttatcaagaagatgccaatagaacccaatcctgtaatttggggatcacttcttgctgcttgtagagttcatcacagaatggatctaggaaaggtaattggacagcatatcgttaacgtagctcctaatgatgtgggagtgcatgtgctcgtttcaaacttacatgctgaagaaagtcaatgggatgatgtcgaacatgttagaggactaatgggaagcagaggtatagagaagacacctggacacagttctgtccaggtataaaccttcagagttcagactatgtaaacttcacttgaatacatgatctaccattgagtaaaatatagaaagtttgcaggagcaaatgtaagtatgtaactattcagtttcagttttcttcaaaaaaaataaataaagaagtaaactattcagtttcagttttacaagatgtcaggcatggcatgaccaaacttcactatctacaggacatgatttctgtctcaatatcaaatgtctaaagcaggatctaaaagttctcaggttaacttctgctgttgagcatagtctatagcatggcctacagaatgtttggttgcattactgaactgtgctttacaaaccctgtgtgatactatctgttctggcgtcaaaggtcataccaacattttagttgcccactgaaggcttatgaaattgtgctaactggtactcatcagtctttatacttcatatgtttgcgaactcatctattgtcttttcctagctaccatttctaactgaatggctaactggtagattacttgcagggccacggctgtagccgggtaagacaataatgcctacatgtgggtatgctgcgtgcctgcgtgactgctgatctccgtgctgaatccttggccagccagccacaggtgaaaaagagaggcacaaatgtgcatttaagtagctgtagttactaacgtatatcgggagagaaacaacaacaaagccagtatttaatttctgcatccatataatcacattttctctactcttgcacactggtgatagttctgcttttaaaactgttgaaggcaaatttcagcaaatgttcagaatattggacgatagtaaatcagcactagccactaacccagtttttacatagagaactttttcagtatttgaagaatgattgaacgaagaagttcaaacatagagaacttattaattactacctccttttcaaaatgtgtgatgccgttgacttttcgcataacgtttgtccattcgtcttattaaaaaaaattgtataaatatcatttgtcttattgtgactcaattataacttatacttttacatatcaatggcatcatacattttgaaatgaaggagatatttgaagaatgactgaacgaagcagtttaatgtgaactcgcattttctagatggagtcatacgaagaaacaaaataatatacttagtagaaaatatggcccatttaattaactgtatttactgaagtgtactgtacctgtagagaaacaacagcaaagtcaggatttaccttctgcatccattttctctaatcttgcacactggccataattctacttttacctgttagagtgagaagtgctgctgaaggcaaaattacaggaaatgttcataatattggataatagctcgtcagtaccagtataaaacattttaggtttgtcctaagttaaactttttgatcaattctatagaaaaatatagcagcattccattattccatataataaaacaaatataatatcaaaatatattcaatggtgaacttatatgacaaaaccaaaatgtcttaatttctttgatgtagtttgaatggtgataattctacttttatctgtttagtggaaagcgctgcatgaggcgaattttagcaatgttaagaacattggacaatagtactgggaaatagctcacaaactagttttgacattctttttagatggagtttgaatgcagccatacgattcagatggattttaaatgcagtcatacgaaaaataagaaaatggatggaatttaaatgtggttatcggaaaaaatggagtttgaatgcagccatacgattcagatggattttaaatgcagtcatacgaaaaataagaaaatagatggaatttaaatgtggttatcggaaaaaggaaaaacatacgattcagatggattttaaatgcagtcatacgaaaaataagaaaatagatggaatttatatgtggttatcggaaaaaggaaaaggtatgattttaaatgcagtcatacgaaaaataagaaaatagatggaattttgtggttatcggaaaaaggaaaaagtatgattttaaatgcagtcatacgaaaaataagaaaatagatggaatttaaatgtggttatcggaaaaaggaaaaagtaagaaaatagatggaatttaaatgtggttatcggaaaaaggaaaaagtatggcccatgcaggtctcgaacctgcgaccttcgcgttattagcacgacgctctaaccagctgagctaataggccatctgatcaaaacgtctttaacacagtagaaataaatatgtactccctcgaaatgttgacattattgactttttagcgttcatcttattaaaaaaataagtaattattaattctttttctatcatttgattcattgttaaatatatttttatgtaggcatataattttacatatttcacaaaagtttttaaataaaatgaacggttaaacatgtgctaaaaagtcaacggcgtcgagcattttaaaacggaaggagtaattaatttctagcatgcctcatgattgcctaaaatttctcctccgccacgcctgccgcctgggctcattccactagtgatactggattactagcctgaacgcaggagatcggcggtcaccccgatttgtttcgatacctacaaacttacaatggtggatcacccacttcgtactttcccgatctcttctcaccatgtcgagcgagtttcctatttcaccgcaacacctactatcgaaaagcaatcgtttttcctacccgaaggttcccgcagcaatcccatccgcgctgcgaaccagcgactgcggacgcgcgccacgcgcccacgcttcaacaacgtacccgcgatcacacgggcggccggccgcgcgacacagcacgtgccgcccggtggtccgcactccgcgcgggcggagcacgtgacgtgagagcgcgcgcgggggagggacaccggcctcggctgacatgcgcacgcgctgcgccgagccaagccacccgtccgtccgccatgcgcctgccggtcggggagcgcagctcgctgatcgccccctcgctcgggcacgtgaactcgtacgccgcggtggactggtggtccgtccgctgactcctgccgacgccaactagcttgcctcctcgctgcaggactgcagcatagtagtcggtaggctgctacgagcaagtcgcgatgttgtcgagtcgtggtaatgcagacgtgcacgtcggtttgcctagttgagctgacaggttttatacgactctctctctctctctctctctctctctctctctctctctctctccacacggttgtgactagtgtgcatccaatggtacagtagtttggagtggagacccatacaccgaggaatatacgattccttttcacgtaaccccacgccacgtcgccacagcccccgtactgtgtatccgcgaaagctagcaaaatgtatcttttgccgaactgcagcagcagctccaattaaaccttgtattcaattgttcttcttactaagggaaaagtacgcagaagatactcaacttatcatcgggataaaaaacgtccttaaaccataaaatcagatatatagggtcccttaactatataaaaccggttacccgagatccttcggtggttttgaccccggttttgatctacgtggcagctgagtcagcgtgggacccacgtgggccccacatgtcaggtgaccacaccaccccctctctctctctttcccctttctctttctttttttctgtttctctccttccttcctctcgctctctgctctcacactcgcagggcatggggatgccgacgctagggcgcccacagtggcgcgcgcgggcagaggatggtgcggccggcgacggcggctcctagggcggctcgagcttccccctggcggcacacaagctcagggagggagcatcgagaaccaatcccgcagcagcctccacctgctcatggtccagcacgacgacgtcctcgccgcggatctcctcgccgtgctcgctgtggacctccccgcctagcgccgccacacctctttgtcatgggccgctacctcggcggcgtcgacgcgtacaccaagctcgccgagagcggcaagctgccggtgatggcgaataggttggggggaggggctgatgcaggagctcgctagtggggtccggctgctcatggaccccgcatggacaacgccgcggaggtggccaagagggagaagcgggggcattctgtcgatgcggcggtggaggaggaggaggacgccagccaccacaacgcggcgggatccggcggggatgagggggacgaggaggagaggatctcgtcgggaggaatgggcgcgaggcacgccgacgaccaccgggagaagcggggaacaccgacgccgacgaccaccatgcccgtcgctagggggctgccacctccacaacctccgcctccgccatcgccgcctactggctgccgctccctatccgtcgcccgccgcgcgctcgcccgcctgccgccaccgccactccgcgcctccactccactccgcttcgtcggctcctgcactcgcacactgcctccgtcggccgccctcgtggcgccgcccttcttctctcccgcctcggccccgccagcttgcagagaagtgtgagagagagagatgaggaagggagagaagaggcgaaagagggagaggaggctaacgtggataaacctgacatgtggggggggcacgataactcaaccgccacgtagaccaaaactggggtcaaatccaccaaaggacctcaggtgaccggttttgtatagttaagggacatcgcatatctggttttgcggttcgaggatgttttttatcccgatgacaagttgagggacctgcggtgtactttttcctcttactaacgaggcctacgcccagtcctggcccagcatcagaatagcaagcccgatacctttgccagcccagacttatgtgtgaatttaggcccaaaacaagtcagtcttttcgcccgctgaaattgctcaggtctactagcaacttgggaagggcgtcattagatcgaggatggtggcagtattaacaagggttttgacggcgccttctcttatgtctctttgtataattgtactcctactattaacaaagatatgccaagtatattaattaatcagttggaatatccaaattgcatctgaaaaatatatgccaagtatactcccatatcggcgagagagatagatggacaggaaactcttcatcagatggtaagttcaaaagttccatgccattcagattttcatatttgcgatttacgatcgatccccttaatcaaactaaccctcccgcgatttacaaacacacgctgctaccatcccgagccccactgcttttaccattgctgctgccgctgttgttactgtcactgccgctgctaccgctaacgttgctgttactgttgttgttattgtcgccgccgccgtccccggcggcttcccaggcggacgccgagaacagcggccgcccgtgccagccgagggtgaggcacccgtcggcctcctcgacgctgtgcccctcgccggagaacagcccgaccagcatcctcgcctgccgcagcgcgttcgaaccgagcggcacggcgctcaggccggcgcgcgtgagcctgtcccgccaccgagacagcggctcgtgccgttccctccgggcggcgccctccccgcacacgatgtcgcagatctccctctggaggtacgcctccgccatcgcgttgcccgcgccgccgctggcgctcgccgcgtccagcgagtcgaacaccgcggagtagtagaacagcgcctccgtgaacctgtcgaggaagcccgtcttgttgtggtcggcctcttgctcgatgaccgtgaagatcttgggccggacggaggcgacacagtcgagaacggcgtcgatgggcgcctgatcggccgggtcgccgaggaggcggtggagctgcagcacggagttgaacgcgacggcctccccgggcgcgatctggagcatccacgggcggacctcgtcgaggctgttcgcagcgaccccgcggaaggagaagcggacgcggacggagcgcgcgaggtcggcgagtcggaggccgacatcgcgcagctcgtcgcggccggtaggtgagggcgggccaatgccggtgatccggaggaacggcgggccgcctggtcggagggcgagggcttggatcaaggccggccactgcaggccctgcatgaggctgaagtcgatgacatggacgtggtcgcacccatggaaggcctcgaggatggcctggttcgccgtgaagtgcgcgaacttgaggtagggacacgcctcgtagaagtgatggtagaggaaggcgtgctcggcgtcggtggtaggcggagcgacgggcgaagggaacaatctccgggagagcgcggtggtgaagtggacggcaacgcggccgatgccggaggcggccgagacggccgcaagcgcggcgtgcgagtcggcgagctgcgcggacgcgagcgcgtggtcaccagcctcgatggcgcccgcgcagctcatcagaagatgaaccaagcggatgcccgcgacctcctcctcctcccgccgcatggccaacacagcagcggcagcatcaggcgcgcacggcgggaaggccgcggcgaactccggcagagcagcggcgtccacatccgcccccgcaggcgggtcgtagtaccccacgccgtcgtcgggcgccacagccgctggaggcggcagaaacccagcgtcgaggccggatgacgcggctggatccatgggccactggaacgggaaggtatccatggccatactaactcaaagagtagtctagtctcaccgcttcgcactcggcgagcggtgcgtgtgcagcggggggaattgtagcggtggatacaagagtatagagcggagcgtcagctaggagggagtaggagtcggtcggaggagggagaggagggggaagaggttgagggcgagtgacgttggcggggggtgcacacgtggagatgcgggaggggacacgtaggcctcgggaaggaaggattccgggtgcgaggcggggcgggaggcccgaggaaccgccgtggggtggggatgctgccccccgccttctgtcaattcctgttttctgattttgtccgtgggggggatctcggagtttggaatcctgtacaaaactacagaaaacttcgtgacggagagagagcgaggcaggaataggccattcaagcacgaactttgttgagattttgtagtgaaaccactcgaattttacatacaaacaggatcctatgtccatgtctgacgtgaaatgttcaatcgctagcagtaatttcttggtagcgttagagtgtttcaaatgaagtgctatttttttttttacgtgccatggagcttattcatggcgcggtagcaatccaacagaatatgttagtcaagctaccaaacgatacggtagcctgaaggtaattgtctgagacaaaaaaaaactagtactgcctctatctaaaagtttaatacatatttcattttttagtttttaaataaattggacatatttactctgtgtgctgaattaaattgttagtcgaaatctaatgagttggcttaatactcatcggttacatgtatgtatatagttcgttggttttgtcacattgatgaatgagttaatttcttcttaattttgattataaaagaaatactccctccgtactcgtaaagaaagttgtttagtacaatgtttaagtcaaaccttaggaatataaatcatgaataactctcaaattgttgagtttgaaaatgtaaaaattatataaatagatttgtcttgaaaaatactttcaaaaaagaatacatatatcacttttaaataaatatttttataggaaaaagatgttaaagttgtgttttggagaccgtgtcgctgtccaaaacgacttcctttacgagtacggagggagtataccttaaacttttgggtagggtttgcgtgcgtgcgtccataggggtgagtgcgcgtgcgttgtgagtgtctgcgttgtactgtgtaattctcataaaaaatatttgtggagaaatggtgctaaatacttgtatgaggaaattacaccatggggctggaatatgcctcatgcgaatcataaactggatatttggatagctaacaagtgtaaggagaagtgttcagcctcaaattatttatttataaagcttagatatttttgtcacaggatgttattagtacacacctagtatatctgattgttaggactatacatttttgttcttgtgatgagactttggcttggagttgtcagtccactgattaaattgtacacaatatgtacctttccataggaaacgcaactgattgatcaattcaattgtatgtgttgtccttttcatgctacataatcgacatctcaaacaacttgatcgtagttctatcaaacaactaactaaaaaaagaaatcacacactctacatttgtgaaaaaatatcggcccggcgaaaacttttgtgaaaaaatatgtatatacatagtacacaataatttacctttccttgtcaattgtggcccattaccatcatttttttttctagttagacatttgcactttcccgtatgacataataatatgccaatttcttcgaaataacttcatcgcattttaattgtgccatatttttcttttacagatgtcccataatatatataaaacggcgatcaaagttgtcataaaatgctcctacttttggctggatgagtgcacatatctttctgtgtacataaatacatcatttcagaaaacgaaagtaagactgcaacattacgaacctcaaatggaagtttgaagactacacaaggcagttgctggagcccccacacctgtgttgatagtgagatatgtaagcaaagagtatggttttacctcattaagcacagacaaaaattgctgggtgccccacggttgctaccccggagaaatttccttgttgctgtaacggtcgaagccgtgccatgtgttatcacccatcggtgacatagggggaggtcccccacggataacttctgtagcaaaatcagtgggtaaatgcgtcgcgcccacgagaaatgcacccagatttacccccagagcattgcttggtgggccggcgtgtacaagagtaggagaactggggataaggcctgacgttttgtagattccgctgctctttggcgaaaagtcgttttcagttgtgccccccaaaacaggcgatcgtacatcggcggcacaccaccgtcgctcgcacgccgctctgtagccagccggcagccgcccggcgctcgtcacaagaaaagtttcctcggatccatgcacgcatcaactttcaagcaagacttgttgctgaaacgacgacgggctttctgcaaaatttgacacaagttcttgtggaaaccttagtctcagctagctgctgaacttgatttcacaattcacagccgagtttgctcttaaccatggcaattttgaggctctttgtgccgtgtactggaacatgcgcagcagagcatgtgcgcaactgtgtaccgaagtgacgtgcgagcgagtcgtcaacctcggttgcatgcttgcggccatggccctacagtctacagaggcaggggcacgcaaattaaaacggaaatcggggctggacccgtcgacctggcggatggtcctgatgcgtcatgcggttgcacggtaccaccacgacgttcgtaacaagaatttgctgggtgggagacgcgcgcccgtacttaccctttgcatcctagtatgaccgattcgatcggattagcccatgcgcaagcgaatcagcggcggcgaaagcgccaccacacctaattaagcgcttgcagatttgtcatctgccatatcgcacccagaggcacatgacatcgaccagcgtactcaccaaccgttgccgtttctcctcgcgaacgagcatcgtaggcgaatttcgggctgcagcaggtagcagagctttacagtaatgcagtgtaggagtacgtttgccacttgctggaattcttttagacattgactaagcaatgaaatggactatgaacgcggcgccttttcttttctctttttttttttaaaaaaaaactctttttttggttggagtatcaggcgtagggtgatgtgccgaacagtatttggtatttctttcttcccatcttctcccgtgcgatttatatcttctaaaaatacactccttccgtcctaaaataagtgtaattttacactattcacgttcaacatttgaccgttcgtcttatttgaattttttttagattaatatttttattgctattagatgataaaacatgaataatactttatgtgtgactaaatatttttaaattttttaaataagacggacggtcaaatattagacacgaatatttacggctgtacttattttgggacggagttagtacagagttgggactcggatagcgagtcggaagatgctcctgtctggatcaatagtacaaaacatggtcccggaattgcgtgctacacggtcagataaatggtcctagcaggctcggtcagttgcagcttgctttctttaaaccggttgaattcacccagatacttctcattttcaatcattgcaagccaactgactttgtaaaactcttggttttaaaatttgcggagaaaatcctttgctataccgatgatctcaattacttacttagtatttgcaagttgtaatttgactaaaacaaccagccatcacttcttgtgacggtgaattgtgctccaaacaagagttagaaagaaaggagaaaaaaaaaaggagaagtaacgatcagaactgtactactgataggaatgcaagtggatagttgcgttaaccatataaaaacttatttgctagtttatttttcatatggtagtataaaatttaaaagaaaaaataaactagaagtaggataaacgggctaaaaaacccgcctgcccgcatcgcttatatttctaactatctctaactactgagcgtgtcacccacggaaaattacagtacttttggcatggttggaactggaaatatatgaaccaaccgatagaaagagatatatgtgattggtgcaacaaaactatattttttataatggcaaaactagagttggatacttggatatcatggttttctagaaattacacatgtgtgcaattatttctaaaaaatgcataaatccacgtgcagaaaatcattccgaccaagatctagtcaaatgcaaagaaaaaatgcaaagaaaacggatccactgaaacataaaaaacaatctaataggagtaggatatagctaccatagtgaaaaagctagaccgtccatgaaattggtgaagctcatagttcaccagctcaccggtagggtttcctaaaccgccgaggtcggggttaccacaccccggcggtaagtacggcagggttcgacttaccgtcagtaaccttgcagttaccgggtttaccgtgggggtacggtaatataaataccgcggtaacctccttaaatttaaataaatttaaaaaataatttaaattattgataaattttgcacggttttttacggttaccacggttattgcgcggtagtcaccggtcgtgcggttcgatcgaagaaccgatgcatttatttggtgtgaatattctttgttaaattgttagccatggtgcaaaagccatttagctcgcttagacggtgagctggtagctaagcaaccatgattcaattccctcgcacactttctttttcatttatttggtaaaattgacgcacgtgtaacttgagcctagtagtctttctagcgtaatccatgtgctcgctagaaccgtcgaaagcaaaccagagttggttccggttcaaccgcatagccattggtcttggtcggtacggtcaatttcccatttccctagtgaccctgagtggccgttgagcttattggcaaaagcaaatgcaatttttgcattattttaggaatcgaaaacgccgttttcttgaaaagcagtttaatattgttagacttgcatagactaatttttaatccaaatatatcacatgagtagtaatcactggtttgaaacatatacatttcggcctccttggaatgtacgaaaattttccaattcgaatccgtttcaaaataaagcaacttctgcattcgtaatttatcatagatataacacatttttcgaactactccgatcttaacaaatcacaatcatcatttattcaatttctctatctctacctactcaccgaaatcaatcataattatctcttatttaatttcacctcttattgattctataattacttatatctaaattataaaaataaagggagttctttgcaagaactaactatccaattttttctcattcaaatatagcagatgcaacacgcgcgggtgttaattggcctaacgtcctaaactggacaacgcgcattggggcgtgtgttgtgcaagttttaactaagagcaggtacaactattagctagctgtaaacatattttaatgagataaagaatgagagagaagatcagcgggctacagatctgtagccaactgcaacgcggactccaagacgcagtgtgtgtatgacaggtgggatcatatattaatagaatagtaagcaactattgtgtgaattaactattagattggctatatatgaattagagttagcagtgactatctcttgtaacgaattccacgcgcattctcggccgattagccccgccatgtggctgtgtgcgattcgagggtctagttcgcgtgcgcgtccgttggattaggaatcaacggcagagatgatgcaagggagtttagcgcgattcgcgaaccgtctccggccgtccggcgtcggccaccgccgctcccgtccctcgtcgatccctctgtgcctccccggcccctcgccgatccccatccctaaaaaccctagcccacagtgccgccatcgtcacttcagctctcctgctcgttcgcatctcggtagccgagcgtcgccacctcctccgatccttgcccctttgctgcccatcgacctccctccttgccgatgcgctggacccgatgggccgcggtcgagcttgctggcgcagcgctcgagttgtacgtcccacctccgctccagttcgccccctccacatgtaagtgcgctacctcctcctcctcctcggcgagctagcggatttggttcggattgccatggcctgacacaagttttgcacggtgtgggtggggtggcagagaagcaggggagcaggtgccggcgacgcggatggcatgagaggagacggaggcgtacgcgcgggactggccggcagtggtaagcaagctacagtctatagtctgatatttgttccatttatttccctggacatgaaggatgtgtggttgctgatttgcaacgcaaactgtgcattcatggtgttcgatgaaatgaccaaaaaagagtatatttccttatttcttagagttgcagttgattagcactcagttaggaatattttgttggatagtatattaattgctctattgctactaccacttctgcagaaatccaggagaaacacgacttgaaattgcaaattttgatgctaattaagttgtcatgtgaaactctatatggattattaatctgttaacttatgcattactgattccatcatagcagcaatcgaattatacatgagttagagatattagtgtatatacaattagcataatctggaatagaaatagtaataagctaaaaaaacataatcaggaatggttcttgacaaaactcaagtttgttttttttttatttctgaataccctttctaatagcacttataatcatgaaaatgatcctgcactgcagcactggtacatactttttttttctttggtctcaatcctgcacaatagtttctttacagagttttcctcctgacaaacgaaaataaatctataaaagtggcacaatttagacatttgcatcataattggttagtgccctaattgcaagtgttctactcaagggaacatcctgagtattaacttaagaaattctgaagttgcgatcgattgcaactgtacatggtgaccacattcttaagttaatacatcatgagtttgttatatttctttccacttctctaaatgtataaaaaatatagtgttctctgaacatgctttttttgcagttatctgacaaatatatagagatgtaatgttttctgaagacatttgtttctctgttttgttgggtggatgttatcactttgatgggcctatcaacaagttatttcattatcatttgaatgcacctataataaaaactaacaattggcaaacaacagttttccttcagaactggggattgttgtttcattctaaaaataaaaatagtcatagtctcttatagcttttgctgctttgccactagcccaccaggacgatctggctttgcaatgcttatgtctcttgctcttgatctccttctatcagtcactctaggtgcagctaatttctgttcgtctcctgacatttctagggatgcaagatatcgaagatgaaaattgctgccgcgtgctcgaaatcatcacctccggcatttaaatgtgtgaaagactggttcttaaatttatttttgctttcactgtaactacattgttgtgcttcttctttgttccatagctagaagctagactggaaacaactgtggctgtttcaggctttttttttatcttggtgaattaatgtaaatatatttagttatggttatatccggttttcgatggtttgttcttacagggcaatagttactatttttagcaggagtgccataggagctaatttagctaaacttgttgcatcagttaataacaccatcgaatatttcatttgccaaccttttataaacctgaattttgaaaaccaattggaaaatatacacaggctataatgagcagaggcgcgctaattttctagtactattaaacttgctctaaaatctgctggcacacagtacaggctacagcaacacagcatgcagcaagcaccacgcaattagtgaataaacaaggacgtgcaaaagggaactagccgaagcagcttgatttgttgacagcgaaaatcctatcatatatgggtagatgtattaggtgtcaagtagcatccaagtgtacagcccgagctgtgagttgccacctaatcttttataacaactttttgtaggctaagcttagtcttatcgcgagaaatctacttagctcaatcagaagcataggtcgttgtccaagtatatcgacaatgtaatttatccccactatcactaattaaacagaaaatcgtgggctttaattatgaagttgaagcagcagcccgagaccagccgttcaagagatcggtattgacggagtgagacagctcgcaaggattagattagctgaagagtaggcatcgattgtacgtacgtatctctgcttgtctgaccgaacgtgtacttgccattgttccctgacacttttcagctttcaggtagagatgtcgatgcagattctctggccaagattatttgttaatgatgcatgggttgttgaccaccctgaagacctgtgcaaaatatggtctttggtgtctgatgcacatataattaatactgatcatgcaatccatattccgtggcgtgatgcgtttgtttcgtagctggtcgtaccgtgcaatgcgctgcagtatgtggaaactgtcggcccgcacgtacaaagcgctacgtttcaggaatcatacgaagccctttttccccattcttttatttatcagttggacacttggagtccagatttggtgaacccaataaaccacatggatgcgtgctatccatctcaaagtttaaaatttgctttaagttccctggtcaagttcaatttgccctgtgatcttgtctgcaggtaggtttctgccatccggtactaaaaactgtatttatcacagtaacctagctagctccagatcgctaacagctaatcagtatctttcagccatggcagggaccagaatgctcgcgctcgtgcagccttgcagatgctcatgctccccgacttaccagtacgtactccatacattatttgaccgaggaatgatgaagcggttcagatcgatccgatccattttttccatccacgaaaaaaaaaaagggaagagcacacgctaatccatttaggatgtcaatggatcggatcggacacgagcataaaaggaacacggctgatcaaagacccaacatctttaatccacgtttgatattcttgaggggcaaaatcagtgcccatgcccgacagtcaggcagccgatgggtaattagtgagcttctttataacttgagttatattttttatagataattaaacagaaaggaacacgattaataacaagctagaaacacaaaactagctcatatacacgcggatagagactaagaatgtaagaacatataagaagcacaagactacctgcacctttaattgatatagatagtactgtactaggatgatgcacgatagatgatcagatagctcaattaattagtagagtatagaactgaaaatccttttatcactcgttcaaatatggttcctggcacaaaaaaaaaaagaaccgaataggtattactctagatggactcaaaataatttggcgaagtgtttgtttcaaaacggaaagtggtcgtctgctctgccaaactccgtcaaggaaggagagagataggtgaggggagagagggaggggggggggggataattgagggcaaatccagctagaattccattttcacatgagctgtgagtaaatgggccaaaattagtacaaattaatatcgaatcaggtttagattagccatgggcaaaataaatgcccatacacatccgctatgatttcagggcaaggttgggtgtgtccagaaaaaaaggtaaattgtattttggatcatcgttttattactaaagttaatatactccatcagacttggacacgggtagtgcattgttgttttttcaactatgctaaggtcaaatctccaacgcaaatatttagtcgttattttttaactgtatattgataagaatgttaagatgtaacggatttttatgataaatctactaatactatttttttatatatcagattatatttcattagagttaagatgttgaattttaacggtgataattccaaaatgcacctatctaacaacataccgtagtaggagaaagtagtcttcggaaaaataatgaagaaagtaacaaccgatcgcgctgattgcaccttttaggcctcctttgattcataggaaaaaatggaggaaaaacataggaacaagaatcctatgggatttggtactgttcatccatttgatttgtaggaattgaagataggaaaagcatgggaaaatttcctataaccatgatttcaagggaattccataggaaaattaacatccaccttgagctcatttttcttctcctatgtgtaggatcgaggcaaaacactattggaagataaggtttaccctagtaaaaccattcaaattttgattgctattaacttaatactcaacattcctatgtttttcctttgtaccaatcaaacgatcattcctataattttcatatgtttttcaatcctctgttttgcatatgatttcctacactattcttgagtttttcctattcctacgttcactgaatcgaaccattccacaagagcatctggtacatgtctctgcaaactagcactgtccatgacaacaacctgtgctgtgcgtgcatggatctccccagaaaaaaagaaagaaagaaaagaagcccctgcccgcggtatcaggtccagcagggctgatcggaatcagcggctgggtttcacattcatggtttcatttcgttcatctgcctgaaagaatgccaggaaagtgagagcagcatgtgggctgatgtggccgaaggcagatgcaacaggactacaggagggcgtacatgtggtctatcacctcagtcctcatagaggaaaccattggtgcatactcctccagagtccagacctgagtacacaggtgtaccgcgcgccgcgcgcgcgcgtggtggcacccaggccggcacgaccgcacaggcgcacagcgcgagccacgccatcatggctgcgagcagtcgagcaccaacgacgtgagggtacgagagtacgtgagacgatcgcccacgacagctgcgccccaacgataaacgggccctaccggcctaccggtgctcgcggccgcggagcagggaggtggctgccgaggcgggctgcggaccgtacgcgggtaacgcgcgcaaggctgcgcttgcaactgtgtctgtggctgaccgaggtcaaggagatgggcctgggctaagaagcatgggcttacagaagtgataccgacctgggctgcgtgagtcgtgtacattggggggggggggggggggggg

SEQ ID NO: 10390 - DNA, 6615 bp, Oryza sativa
gttatgggcaagccgagcaatgtacccaagtcagtgttttaattcttaaaatttgctcaacaactaaaatgtggaatggttggcctgggttggcttgggacgagctgggacccagggtcgggttgccagttcggtctgaatcatcgtaggccttgggttaaggcaggttcgtgtgggttcacggccttgtttaataatactgtgtagctctaggatcgtctttataaaatggctttgggcaactaagtgacttttaaatgctgtttactgcaaaacttaacccctatattattatccccttgtactcccttgcattaattatgcatctgccggtgtggcttgctgagtactgtggttgtactcattcttgctcaatctttcccctcttcagtaagagaagctttggagaagatgtcttaggtggagtcctggcttataccccagtggagcgcctgtgaagatggagccgtaggcccgctagtccgctgctgtttatttttgattgtcaggcctgaagcgcctttgtaataatgtaaattttatcgatataataaagatgtgtcttttatatcatgtttgtgtggtgtaccccggcttttcctgggacggggattaatacactagcgttcgggaaaaggcaattttcccggtcgcgacactcagtcttgctcaattttttcccaaacccagaagaggagttcctggaagatgaaggctttggtgtctagctcgtgcctgccgtcaagtgcctgtggtcgtcgccctaatcttccactgtttcccgtttgtctttgtgtgtgctgggccttcgccgcccatgtaataaattaactatttacggttccgcttgttaaactctgaactgtatcaacttttggtgtaccttgcctcctgggacaaggaataatgcacgcacgtaaggaacgcccgttgggttatttccggtcgtgacagcgatggaatgcgcgcgcggcgacgggatggcgacggcgacggcgcggcagtggtggtgcacggcgcgaggcggcgatgggatgcacgcgcggcgcgaggcgggacgcgacggcgcgacagcggcgatgggatggcgacggcgacaggcggcgatggcgacgacggcgcggcggcaggcgacgatggcgacggcgcgcggcggctcgggacgcgaggcggccaggcgcgacgggcggcggcgcgtggtgacggtggcgacagagagagggggaaagaggaggagctgggttaggggaccacgtcgaacacctggcggccgatgaatagtgtctcttcctatttaatccccattttaccctatttcttgtgtaaatttgattctataaatcctagattttgtgtaaatgaagtttactcaatatttgtgttattccaaccaatggatttactctagattaatattagtcattttttttatttatataatttatttgaatctttaattagggttaattcttattccatcgcatttaaattcaattgatccaaatatggtcgcgacaatattttatttatttctatccacacctaatctttattttaaattatatttattttaccaatttgtttttagggtttattcctacttaactattctttactcatgattaatgaacttcgaaatcaaatcaaaataaaataggcaaacaagatcggcatgatgcaattaatttaaaaagtttttgaaaatccgtatttttagagttttgatttttgccggtcgaattttcagggtgttacaccgggagaaccccgatgtgttcccagacgatttacctggtataccgcctaaaagggatatagagttcagaatagatttggtaccaggaacaactccgatccataaacgaccttatggaatggcagccaatgaattagcagaagtcaagagacaagtagatgatctgcttcagaaaggatacatcagaccgagttcatctccatggggagctccggttatttttgtggaaaagaaagatcatacccagaggatgtgtgtggactatcatgcactaaatgatgtgactatcaagaataagtacccgctgcccagaattgatgatttgtttgatcagcttaaaggtgccaccgttttctccaagatagatctccgatcagggtatcaccagttgagaatcaaagaggaagatatacctaagacggcttttaccactaggtatgggttgtttgaatgtactgttatgtcttttggacttaccaatgcccccgctttcttcatgaacttgatgaataaggtatttatggaatacctagacaagttcgtggtggtctttattgatgacattcttatctactcctgaaccaaagaagagcatgaagaacatcttcgccttgcactagagaagctacgagaacatcaattgtatgccaagtttagcaagtgtgaattttggttgtctgaagtgaagttccttggtcacgtcatctcagccggaggagttgccgttgatcctagtaatgtggaatccataaccaactagaaacaaccaaagacaatctcagagattcgcagtttcctgggtcttgtaggttattaccggaggtttatagagaatttctccaagattgctaagcccattacacggctgcttcagaaagatgtgaagtacaagtggtcagaagaatgtgagcagagttttcaagagttgaaaagtcgcttaatatcagcacccattttgattttgcctgatccaaagaagggtttccaagtgtattgcgatgcatctaagcttggcttaggttgtgttctgatgcaagatgggaaagtggttgcctatgcatctcgtcagttacatccgcatgagaagaactaccctactcatgatcttgagttagctgcagtggttcatgcgttgaagatttggcgtcattatcttttcggtactcgtacagaggtgtacaccgatcataagagtttaaagtatatctttactcagccggatctgaacatgagacaacggagatggttggaattaattaaggattataacatgggaattcattatcaccagggaaaggctaatgttgtagcagatgctcttagcaggaaaggctattgcaatgctacggaaggacgacagttgccattggagttatgcaaggaatttgaaagattaaatttgggaattgtcagtagtggtttcgttgcagccttagaagcaaagcccactctaattgatcaagttagagaagctcaaattaacgaccctgatgttcaagaaattaagaagaatatgagaagaggaaaagctatcggtttcttggaagacgagcaaggaactgtatggttgggtgagaggatctgtgtccccgacaacaaagatttaaaagatgcaattctggaagaagctcatgatactttatactccattcaccctggtagtaccaagatgtaccaagatctcaaggaaggattttggtgggcaagtatgaagcgtgagatagcagaatatgtagcagtatgtgatgtttgtcagtgagtaaaggcagaacatcagaaacccgcaggtttgttgcagcctttgaagataccagaatggaagtgggaggaaatcggtatggatttcatcactggcctacccagaacgtcgtcaggccatgactctatttgggtaatagtcgacagacttaccaaagtggctcatttcatcccagtaaagacaacatattccggaagtcggttggcagaattgtatatggcaaggattgtgtgtttgcatggcgttcctaagaaaatagtgtccgatcgaggtagtcagtttacttcaaagttttggaagaaacttcaagaagagatgggttataagctgaacttcagtactgcttatcatccgcagacagacggacaaaccgaaagggtaaatcagattttggaagacatgttgagagcttgtgctttagacttcggtggaagttgggataagaatctaccttatgcggaattctcgtacaacaacagttatcaaactagtcttcagatggctccttacgaagcactgtatggtcggaagtgccgtactccgcttttgtgggatcaaacgggagaacgtcaggttttcgggactgatatcctaagggaagcagaagagaaggtaaagatcattcaagaaagattgcgtgtggcatagtctcgccataagagttatgctgacaatcgccgcagagatttgagttttgaagaaggagattatgtgtaccttcgtgtcacgcctcttcgaggggttcatcgttttcacaccaaaggaaaattggcaccgcgtttcatgggaccttacaagattgtcagtagaagaggagaggtcgcttatcagttggagttacctcaatctttggcaggagtccatgatgtgttccatgtgtcacagttgaaaacgtgtttaagggtacccaccgaggaagctagtcttgaacagatagaaatctaagaggatctgacatatgttgagaaaccaatccgtatcttggaaacagatgagagaagaaccaggaatcgagttatccgtttttgtaaagttcaatggagtaatcactcggaagaagaatcaacttgggaacgagaagatgaattaaagtcagctcatccgcatctgttcgccagttcttccaaatctcgaggacgagattccgtttaagggggtaggtttgtcataccctaaaaatcctaaatatataaattgttgtctaaattggaattattagaatttattttaaaagcctagaagagaagatcttattttaattaataaattccaatataaaatggggccagataaaatttcattaaatactttgcttaattctataattcctagatttttctgggatttatttgagctaaggaagtatttttaataaatagaattgtatttaatgaataatttaaattgaaaaaggtttttaaaatcctcttttggctttgggccgaaagtcggcccaaaaccttctctctctctccccggcccaagccggcccagtccgcccgcgacaaccgcgtgcgcgcgccctcggacgctgactggtagggcccgcctgtcaggtcgtcgtctacctccggccgcccgccgcccgagccctagcgccacgccgccgcaatctccttccaaatccggccgcccctttctgtttccgatgaaattaatagaggggaaatgatccccgggatcccctctatcttttctcttatggaatcgtcggctaatttcgtttggaaatccgtggattcgatctcgaatcggattcatctctctccccaaaccctagaccttccttcgccgtcgccagtcgctgtgggcctccgacgccgcctccttgcccctataaaaggacccccggtgtctccgctacctaccgccaccctcgccttcgcctctcgtcgcccctagagccctagcctcatgcagcctagcgtcaccgtcccgtcgccgccgtcgctccagccgtgcgccgccgtcgcttcggtcgtcgccgtcgctcggggaggtcaccattgtggtcgccaagtcgtcgcagtccttgtccgcccctccgccgtcgctgtcgaccgacggatccccgtcgccgtcgtcaagccgaagagcgccgccgcttcttcctcgtcgccgacgtcgtccggtcaccgtccgtcgccgtttaggtcatcagtgagttcgccgcgtcgcccgcattgttttggtgctctctgttcgcatcgccgcgccgtcgttcgccgacgggcatgcgtgcccgagtcgtcgccagtgatgacgtcactgctgacgtcatcgttgtcgttccccctggcccagtcatggaccgatggatcttggccgtctgttttggatggatcaatctcggccgttcgtttccgtgagccgctgctgtgcacccggttcaccgcgaaccctagccactgacgcaataaacccctttttccttttcaaaaataattcattattgcgtcataattcaattaaaatctaaataaatgatttaatccgatttaatctttgaaaattcataactaattcatcttagctcggatttagttggttcaagtctctaaatttttctaaaattgagatctacatgttaaaaatatccacatgtactgttcatgcttgtttatgtgctgttttggtgttttgctcctttctatttagattccgacatttccggagagtccgttttcgcagcagaagaatttgaagagttccaaggccagcaaggcaagtcacacagatcccaaacaaccctttgagcatgttgatcccgtttaaagttgttgtttttattcaactattacatttattatcgaatgtcattgggtggaattaacctattgtttgttatagcccttttgttcttgattactttattgcttgataccttgggttattataacttgactagttgagctttatatattggttcagctatatattagatatgattgcttagccatgcttagaaactttagcacactattgggataacttataattcactattatttaatgctggcttaatgatagctcacgatggtcaatcgtgattggttaattaattaaattgccaactaaaacttgataatggtgggttgtg

SEQ ID NO: 10391 - DNA, 15757 bp, Oryza sativa
ctcttatcacctggacactatggaatggttggactattgtggaattagattcacacctcccccactattcaaaatcttcaatggttttaggctgggctcggggtgcatggttttgatagtagcacctcggccatataaggaccggtcttcgggcctctgttgcaaagcactaccgtacttccacatgtctagtgggtaaggcttagtttgtggctcagtctggttataaacaaaagtacacggatggagatggacgaagtcgggggtcgatggacatctctagggcaaatgaaggctacacgagctgcggcccggtagtcgagatgtcatggcagagggccggtgtcctgctgctaggggctcagtcctgcctacctgtcccggaggttccggccgtaggtggggttgggtcggtactcttgtctatggctaggatgggttggaaactatgtcacgtcttcagtccgtataccgtggtggtatgcggcacgtggttacacgtgaggaagatgtgtcttgtgggtaaagatgtacacctctgatcagagtataatctattcgaatagccgcgcccttggttatgggcaagccgagcaatgtacccaagttagtgttttaattctcaaaacctgcttaacaactaaaatgtggaatggttggcctgggttggcttgggacgagctgggacccagcgtcgggttgccagaacgccgcactcctcgccatcggcactcttcaccagcgctacccggacgagttgcagcactcgccctaccgctaccaccctcgtcgtggaggagcccgcgactacgccatcttccgggatgctagctcggaggatgacgctaccatcatgcacctggcgcgcatggtggaggcgtacgacgcgacccgtatcgacttccatcagatggtgcgtcgtgggttggtcgagaacagcatgaagatcctggagctgcgtcaggagaatctgcagctgaagaaggacctagacgcagtggaggcgcagctgcatcagcttaagatcgcccagggagaggtctgtcgccccaagcgtcgccgcgtctgccgcagcctgaagatcaccgcccgcaagagtacctccgggcccgagcttgttcgtcagtccctggcgtggacctgcttcgtcgagacccctcgtgccgagcccgcgcccgtggttccttaggaggatggagcctccggcgttggcagcacggaggatgcgctgctactcaccttccgccctggcccgtcgcagcagtagacgagcagttagtaggcttgcgtgtgtgttcttctcgtttgtttttctgctagagtcgtatggggcatggttaagccggtgtgtggtataactgtgtcggagcctgtctttattttatttgcttaagcaacttgaactttaatgaaccaatttaatagcagtaataaattcaagaattatggtagtcatgagtggttagttttagttgtcagctctctctgtttgctggttctgtgtggggttttcagatggtgacaaccaggagaagtgctgctacaggtgaaggcagtcaccccgaaggcagcaaccacaacaaccatggcagcccacctccacctcctcctccgcttccaccaccaccaccagacaccaacgccatcctcacccaaatcctcgcccagcaggccaacatgatggctgctttcctccaccacatccaaaacccgccacaacataatgctccaccaccacccccacaacactctaaactcgccgagttcctccgcatccgtccgcctaccttctctagctccaataaccccgtggatgcgttggattggttgcatgccgtggggaaaaagttagacatcgtgcagtgcagcgatgaggagaaagtcatcttcgccgcccaccaactgcaggggcctgcatctctgtggtgggaccatttccaggctacgcagctagaggggcaacctattacttgggcccgcttcaccacgtctttccggagaacccatgtgcccgccggagtcatggcccttaagaaaagggaattccgagagttgaagcaaggcaaccgctccgtgatggagtacttgcatgagtttaacaacctggcctggtacgccccggaggatgttcgtgaagatgaggagaagcaagagaagttcttggcaggaatggaccctgagctgtccgtgcgtctggtctccggggactatccggatttccagcgtttggttgacaagagcatccgcttggaagccaagcagaaggaactggagtcgcacaagcgtcgcttggcgaatttccgcaaccaacggggggctaaccaaagggtccgctacaccaatccctatccagggggatcctcctcgcagcagcagcagcagcagcagcctcgctccgcgccccgacctcaattcgtggtgcgcgtcccacagccgcagcaacagcagagtcagcaagggactcgtgcgccccgtccccctacgccagctctgcagcctggtcaaggccacagggacgctcaaggtcagcagcgtctgtgcttcaactacttcgagcccgggcactttgcagctaaatgcccaaagacgaggcgccagcaaggccaagcgcctccccgctctaacaacggtggtaaggatgtcattcggggtcgtgtgaaccacgtgacggccgaggacgtgctgacaactccagacatcatcgttggtacgttcctcattcattccatccctgctaccattttgttcgactctggagcttcccactcgtttatatctgtgccattcgtggggagaaatcggttgggggtagaaaggcttaggaaccctctgctcatcaccacccctggaggggttatgacagcaaagtattatagccctgccgtttctatagaaattcagggaattcattttccctcggatctgattcttctagacaccaagaacttggatgtgatccttgggatgaattagttggctcaattccaaggagtagtgtattgtgcaagacgcactgtcactctgtaccgagggccggaacaaccggttgttttctttgcacccccaacctctgttggcagttcagaacttcatcagataagactgtcggaaatccccatcgtcagggagttcggtgacgtgtttccggaagaactacccggtatgccgccgaagcgagagattgagttccggatagatcttgctccaggaaccactcccctgtacaagcatccctaccgtatggcagcaaatgaactggccgaagttaagaaacagttggaagagttgaaagaaaaggggtatatacggccgagtacttccccctggggtgctcctgtgatttttgtggagaagaaagacaagacgaagaggaggtgcgttgactacagagctctcaatgaagttactatcaaaaacaagtaccctcttccccggatcgatgatctgttcgatcagcttaaaggtgccacggtattctccaagattgatcttcgttccggatatcaccagttgcgcatccgtgaagaagatatcccgaagaccgcattcaccacgtgatacggactgtatgaattcacggtgatgtcgttcggtttaaccaatgctcctgccttcttcatgaacttaatgaacaaagtgttcatggaatacttggataagtttgttgtggttttcattgacgacattctggtgtactcacaatcagaggaagaccatcagcaccatctccgtctggtgttgggaaagttgcggcaacatcaattgtatgccaaacttagcaagtgtgagttctggttgtccgaagtcaaattcttagggcacgtgatatctgctaaaggagttgctgtggaccccgaaacagtgaccgccgtcactgattggaagcaacccaagacagtcactcaaattcgcagtttcttgggtttggcaggatactaccggaggttcatcgagaacttctccaaaatcgctcgacccatgacccagttgttgaagaaagaagagaaatttgtgtggagcccacaatgcgagaaggcgttccaaactctcaaggaaaagctggtttcctcgccggtgttaatcttaccggatactcgcaaggacttcatggtgtactgtgacgcttcacgccaaggactggggtgcgtgctcatgcaggaaggtcatgtggtagcctatgcctcacgccagctacggccccatgaaggcaactaccctacccatgatttggagttggccgctgtggttcatgctctaaaaatctggcggcattatctcatcgggaatcgctgcgaaatatatactgatcataagagtttgaaatacatattcactcagtcggatctgaatcttcggcagagaagatggttagagctcatcaaggattatgatgtgggaattcactatcatcctggtaaggccaacgtggtcgccgacgctctaagtcgaaaaagccattgcaacactcttgaagtccgtggcattccacccgaacttaatcaacagatggaagccctgaacctaagcatagttggtcgtagattcttggcaacgctggaagccaagcctaccttgctcgatcaaattcgcgaggctcagaagaatgatccggatatgcgtgaactcctcaagaatatgaaacagggtaaagccgctggtttcacagaggatgaacacggaaccctatggaacggaaatcggatatgtgttccagacgacagagaacttaaacagctgatacttcaggaagctcacgaaagtccttattccattcaccctggcagtacgaagatgtacttagacttgaaagggaaatactggtgggttagtatgaagcgggaaattgcagagttcgtggccctttgtgatgtgtgccagcatgtcaaggcagagcaccaacgaccggccgaacttctccaacctctccaagtaccagaatggaaatgggatgaaattgggatggatttcatcaccggacttccaaaaacccaaggcggatatgattctatatgggtagttgtggactgactaaccaaggtagctcggtttattcctgtgaagaccacctatggaggtaacaaactagccgagctctacttcgctaggatcgtgagtctccatggcattcctaagaaaattttatctgataggggaagccaattcacctctcacatttggaagaagctccaagaagagctgggtacccgattaaatttcagcaccgcgtatcacccgcagacagatggacagaccgagcgtctaaatcaggtcctagaagatatgcttcgcgcatgtgtcctagatttcaggaagacctgggataagagcctcccctatgccgagttctcctacaataacagctaccaagccagcatacaaatggcaccctatgaagcgttgtatggacgcaaatgccggacactgctattatgggaccaagttggggaaagccaagtgttcgggactgatatcctgagagaagctgaagctaaagtcagaaccattcgggataatctaaaggtggcacagtcccggcagaagagttatgcagataactgacgccgtaatctggaattcgcagtggacgattttgtgtaccttcgggtcacgccattgcgaggtgtacacaggtttcagacgaaagggaagctcgcacctcggtttgtgggtcctttccgtatcattgctcgacgcggggaagtcgcttaccagttggagctgcccgcctccttgggcaacgtgcatgatgtgttccatgtgtcgcaactcaagaaatgtcttcgagtgccatccgagcaggccgattcagagcaaattgaagttcgcgaagacttgacctacgtggaaaggccagtgaaaatgctggacaccatggagcgcaggaccaggaactgggtaatccgtttttgcaaggtccaatggagcaaccacgctgaggaagaaactacttgggagcgtgaagacgagatgaaagcaacccatcccgatctcttcgccagttcttccgaatctcggggtcgagattccgtttaaggggggtagctttgtcgcgtcccaaaacgactctaaaatacatcctctaaattatgcctagaataattaaaatccgtgtaaaagcctccaacaattaaaatgtgcaaagttaaaagtcaaataaggcttggaggatttttgtatatttcctaaaagcctaaaatgcgtaaataaattttagtggaattttcagagcacaaataataattattaagaaataaacaaagttaaaatgattttataaaaagaaaaactctaaaaagtccccttcccctccctctctctctttggccggctcggcccatctccctccccctccctctcctctccccgcggcccatccggcctctccccgcacgcgcgccgctgacgggtgggcccgcccgccaccctcgctgacgggtggggcccacctgtcatccccttcctcccgccgctcccgccgcctcgcccgcgccctagcgccgccgccgtcctccccgcgtgaaatcaatagggtggaattattccccgtgattccttccccctttccccccaattttccctccctctctcccttggattcgtttgaaaaccctcccctaatcccgccggcgccattgatggagcccgagagcgccgcgccggtttccttcccctccggccgccctctcccccttccaaccctatataaaccctccccgcacctcctccgttcgtttccgcctctcgccgcccttcctcctcaccggaatcgatctcgcgccgtcgctctctctctccgccgtcgacgccgagcaccggtccgccgccgtcgtcgccccggaccacctcccacctcggcgccgcctccttcggcttcgccgcatcctcgccgacctcgtccacccctccgtttcgctcgtcgaccgccggagcaccgtcgaccccgtcgacccgagccgcaccgccgccttcctccgctccggccgcctttttcgtcgtcgccgtcgacctagggtgagccgtggaccgccgcttcttttcccccttcccttcccctctctcggccgccactccgccgcgccgcctcccgccggctgcgccggcttggccgccctcgggcgcgccgagtggctgccgcgtggggcccggccgtcagccgcccgcgcccttaggtgcggctgacgcgtgggacccacggcgccggccggtgtgagcccgggtgcacccggtccaccgtggaccgtaaggctgccgcgtgggtcccacccccatggacccggtccgcgtgccccctcccctcggctgacgcaataaacttttttttaaattaaaatttaaatgaggaaattcgcaaatattcatttaaagagcatataaacttcaaatggccataacttggccatatgaactcggaattggaccattcaagtctctaatttttccttaagaagtcaagaacccatttttgtgctttgttcctgcttgttatatggagttttttagagtaaaagacttttcttttccgttggtcatgtagacgctgcagcttcggaagatccgcttttcgtggaagttgaagccgacgtttgggaaagcgagcaaggcatgtcgcatcatccttgaacatattgaatcccagtttataaaattatgttgatttaaattattgcattatcgctttatttaaattcccgcgttatcactgttttatctagccatgcctatttacctttgttatgaccttattattgttattgttattatttccttgttcaccctagagtaaacaaaaccccaactagtggatactctactcatggtaccactagtatcattttaggtagacgcttcgccgcttaattaggcaacattaggtggttttataactctagactttgggatactcttatcacctggacactatggaatggttggactattgtggaattagattcacacctcccccactattcaaaatcttcaatggttttaggctgggctcggggtgcatggttttgatagtagcacctcggccatataaggaccggtcttcgggcctctgttgcaaagcactaccgtacttccacatgtctagtgggtaaggcttagtttgtggctcagtctggttataaacaaaagtacacggatggagatggacgaagtcgggggtcgatggacatctctagggcaaatgaaggctacacgagctgcggcccggtagtcgagatgtcatggcacagggctggtgtcctgctgctagggggctcaatcctgcctgcctgtcccgggggttccggccgtaggtggggttgggtcggtactcttgtttatggctaggatgggttgggaactatgtcacgtcttccgtccgtataccgtggtggtatgtggcacgtggttacacgtgaggaagatgtgtcttgtgggtaaagatgtacacctctgatcagagtataatctattcgaatagccgcgccctcggttatgggcaagccgagcaatgtacccaagttagtgttttaattctcaaaacctgcttaacaactaaaatgtggaatggttggcctgggttggcttgggacgagctgggacccagcgtcgggttgccagttcggtctgattcatcgtaggccttgggttaaggcaggttcgtgtgggttcacggccttgtttaataatatggtatagctctaggaccgtatttacaaaatagctttgagcaactaagtgtcttttaatgctgtttactgcaaaccctaaccctttatattataacccccttgtactcccttgcatttattctgcacttgtgggtgtgtcttgttgagtacggtggttgtactcagtgtcacgtcctgataaattcatcccgaaataaaaatcattttctaaaaggaataatagaattaattaaaattcggaaagaaattggcaaacactaaaatacgtacaagaaaaattcaaatgtggcccggagaatttttgttaaattctccttggtctaaaaagagccctcaaattttagtggaattttcagagcacaaataataattgagaagaaataaacaaagttaaaataattttataaaaagaaaatccctaaaagtcttctttccccccctttttccctcttgggccggctcggcccaactccctccctctctctcctctcccccgcggcccatcggcccctccccgcgcgcgcgctgctgacgggcgggcccgcccgccaccctcgctgacgggtggggcccacctgtcatcgcctacctcgcgccgcgtccgccgcccgcccgtgccctaacgccgccgccgccgccgaatctgccgcatcccgccgtccccgcgtgccataaagagggggaaatcactccccgtgattccctccctctttccccccactttcccctctctctctccctcggattcgcccggatttattcccaaaatcctcgccggcgtctttgatggagccgagatcgccgcgccggtttccttcctctccggccgccctctctcactctcgacgctatataatcgttcctcctgcttcgctcctccgtttccgccactcgccgcactctctccccgtcggattcgagctcgcgccgtcttcctctctctccgccgtcgccgccgagctccggttcgccgccgtcgtcgccccggacctcctcccgtctcggcgtcacctccttcggcttcgccgcgtccccgtcaacctcgtccaccccttcgtttcgcccgccgaccgtcggagcgccgccgtcctcgtcgatccgaaccgcgccgctaccttcctccgctccggtcgtcgtttccgccgtcctcgtcgtcccggggtgagccgaggaccgccgcttcgcttccctcttccctcccctctctcggccgccgctccgccgcgccgttggtcgccggcggcgaccatcggggcgcgggtgcgccgcctcccgtcggccgtgccggcgaggccgccttcgggcgcgccccgcggctgccaggtgggcccggccgtcagccgcccgcgcccgtgggtgcggctgacgcgtgggacccatggcgccggccggcgtcagccgcgtgcacccggtccaccgtggaccgagaggctgacgcgtgggccccactcccgtggacccggtccgcgcgccctctcccccggctgacgcaataaatgagtttttaattaaaatttaaatgaagaaattcgcaaatatccatttaaagagcatataaacttcaaatggccataacttggccatttgaactcggaattggaccgttcaagtctctaattttttccttaagaagtcaagaacccatttttgtgctttgtttctgcttgttatatggggtttagtagagtaaaagccttttcttttccgttggtcgtgtagacgctgcagcttcggaagatccgctcttcgtggaagttgaagccggcgtttgggaaagcgagcaaggcaagtcacatcatccttgagcatattgaatcccagtttacaaaattatttttaatttaaattaatgcattatcgctttatttaaattcccgtgttatcactgttttatttagccatgcctatttacctttgttatgaccttattattattgctattgttattattaccttgttcaccctaggataaacaaaaccccaactagtgagtattctattcatggttccactagtatgaatttaggtagatgcttcgctgattaattaggcaatattaggtggttttataactttagactttgggaattctcatatcatttggacactttggaattgttggtttatggtggaattggacatacacctctcttcctctttcaaaacccctaaaacctgttttcggtggggtttgggtgcatgccagttgtgggaagtagcaccccggccactataaggattaagctcgggcctctgttgcaaagcactaccgtacttccacatgtctagtgggtaaggcttagtttgtggctcagtctggttataaacaaaagtacacggattggggatggatgaagtcgggggtcgatggacattctccagggcaaatgaaggctacacgagctgcggcccggtagtcgagatgtcgtggcagagggttggtgccctgctgcttggggctcagtcctgcctgcctgtcccggaggttccggccgtaggcgggattgggtcggtactcttgtctatggctaggatgggttggaaactatgtcacgtcgtccgtctgtataccgtggtggtatgtggcacgtggttgcacgtgaggaagatgtgtcttgtgggtaaagatgtacacctctgatcagagtaaaacctattcgaatagccgcgccctcggttatgggcaagccgagcaatgtacccaagtcagtgttttaattcttaaaatttgctcaacaactaaaatgtggaatggttggcctgggttggcttgggacgagctgggacccagggtcgggttgccagttcggtctgaatcatcgtaggccttgggttaaggcaggttcgtgtgggttcacggccttgtttaataatactgtgtagctctaggatcgtctttataaaatggctatgggcaactaagtgacttttaaatgctgtttactgcaaaacttaacccctatattattatccccttgtactcccttgcattaattatgcatctgccggtgtggcttgctgagtactgtggttgtactcattcttgctcaatctttcccctcttcagtaagagaagctttggagaagatgtcttaggtggagtcctggcttaaaccccagtggagcgcctgtgaagatggagccgtaggcccgctagtccgctggtgtttatttttgattgtcaggcctgaagcgcctttgtaataatgtaaatattatcgatataataaagatgtgtcttttatatcatgtttgtgtggtgtaccccggcttttcctgggacggggattaatacactagcgttcgggaaaaggcaattttcccggtcgcgacaagctggtatcagagccatctcgactgtaggataagccaagtggataaaacctaaggacatattttacaaataaaactatttgcgaaagttcctttttctccttcccgtaatgctatttgcaaaatggtttactcttttcttccttcttcaaatttcaactagtactagatggtcagctttgcgaagaagaagatgtcgtcagttgtttgccgaagctccagaagactgcaggatctgctagcgaagtataggaagcagtgaagccagctgtgaaggagtgaagatcttgggaacccatcgtagaacctaagccaccctatagggtagtgttgttagtcgtgtgttccttgcttgtgtgtgtagcgcgtggtttgcatcggtgggttgtgatgtaaccatgctaggttgtttgcttaatcaacttgcagaataagcctaacatacatcataacagcaaaagacttagatctgttaaggtcctatccttagttcctaatctgtctctcccctttgttttccctctctccctctccaaacctttgcaacagatggctgacaatgagaaaggcaataaggtcagaagtcaggacattggtacctcaagctcccgagtgaatgaagcaccagacaccagttgtgtgacactggtccaacacctgattaaccagaaccgattgcttatagagatactacagcagcatcagacgccaattctgaacctgagtcagatacaacctcaagtgcagttggaggcagtccaagcactcacaccacaagtcagcatgccgccagcatcccgaaggacccatggtgacgtgccacatgttgactcaaaagaagcaagtatcatttgttttatgtgtgatgagcaagggcactatgcaagggagtgtcctcagcagaaaagaaaaacaccaatgcgaaccgaagatgaagtccgtaagatgatcattaccagcacagaatggcctccaccaggaatgacaaaacgtcagagaagaaataccttccgaggtgcaccacagttgacagagcatcttttagctaatggaggtagagtgtctgatagtgaagattcagatcaagtctcctcggatgatgaagatgagaagtctccccaaggtttcaaccagaataaaatggaacgtaaggcatgctctcgttgtggagaaatcggtcatgttgccagctcgtgtgccactacatgcgttcattgtgaggaagaccatccacccgacaggtgtccaacgagcaggatcacctgtttcttctgtgaaggaactgatcatgtaccaaaagattgtcaatccagttttctgctgacgaagaagatggccaaccaacccgccagttccaacggagagaagcatcaaggcaacacaaatcctcgccaagattacagtttcagcctaactccagtgccaggacagaggaatcaaaatgagaaaagaaaatgccgagtccgggaagatatctgttgcttcaattgtcaaggaatgggtcatttcaccgacaagtgcccaaaaccgagagacatagctgccagcacgtcagtccacgcaactccctgcaatcagaagcttgctcctcagcgaattgtcatccatgcatcccgaagcagtcctatagcccgcgttgcaacagctccaactccagcgagtgcattaccacaaggtgtcaatgctcaatttcagccccagccaccggttgacaagacagaggccagtatcggcattgtacctttggatgttccagcacagccgccaagaaatcaagtacaagatgaagaacccgagcgtaagaaagttatttacaactgtagtacctgttaaggaagcagacatgccaatcgccaagtggtcactggagcaaatgcagtacctgttaagcctagcgctagtcagaagcaaccataatactcttatatcagtgttcaaatacttttgttttatagttgttccccgtcaatcatgtaatgacagagaaacatgagattatgaaggagtttgataagtttatgaaggatccatgttaagattgcaagtgctgtgagttgtgtacattttgttgttgattagggagacctagggtctcatttccgtaaactcataatctattatgaatcaaataacctagcgattgatggcgaagaaaatcaagtgattaacccaagagacatttgtttggactaagagtttcagatgtgtcttcttcggatcaaaggcctgcacccgttgtggagaaattggacacgttgctagcatgtgtctcacactctgcactcactatgaagaagaccatccaccaggggagtgtcccactcgcaaggtgacatgttttctgtgcgaaggaacaaaccatgtgcccaaggattgccaactcagtgtgttgttgaccaagaccgcagaaatccaacgaacaaccctacgattgtctcgtcagctagtcagctccaacaacaacatcgatgatatcatccacagcaccaatgctcctcttgctccacctaactctgcaataaatcatggcaataataccttcagcactaaccattctctgcaccgacggcctcagcaaagaattgtcgtcgatggaagaagttgtgtctctccccgacctactccaggccgagcgaagggcaatcaacctcaggagggtgataccaagcagaagaccgttattcgcctcaaccagcaatcagaaggaagcttctcctgtgaatgatagcaatatgcagtcccatcacatcatcacagaaccaatcaaggatgatgcagtcactagaacaatgccagctatacctctccagaatcagaatgagtagccatgtttgtgattttcagttcgctacttatcactgtaatcgaaagtttgcagcaatcatgtaataaataaatatattcatgtctataaacagtgagcttgctatgtttatggataattcctgttgaggatacaatgtaccgatgttaagcaccttccctttttgtttaaggcagggccttgtattcgtataataagggagaaatgtgtaatacagacaagttctaagaggattcttttggaagatgcggatatgtgatcatgtgtataattgtttactgacaaaggagacctagggtctcgtgtcagaggaactatattctaacctcgagttaataaccaacctgttgatggaaaagaaaaccaattaaactgtgttgggttaaaaagccaatgagacagtagttggggataggagtttggatacgccttttacagatcaagataaggattgttggatgaaacccataagggtatccgccatgcctctacattgataagttcggatatacctgcaaacagttaagaagatccaggagacatcaatatttgagaacatagtagtcgatggttggtgattagtctatcaggtatcagaaaaggggtcaaaggtgatatggcagaagaacaatttggatgctccccatctcgaggaagcactaaagatgatcatcggcaattaaaccctagtggcatagatacagatagcaagcaatgtatttccctgaaggtagtcagtgcagctttttgacaaaccacatcaaggtttcactgaaaggcagcaagccaaaggacgtcatcgtccccagaagcgtccgcaatccacattaaagaataccacctgttagagataagccgaaagaagattgataaaagagattggcaaagatgttctctagcatgaaagaagtaggccgaaagg

SEQ ID NO: 10392 - DNA, 10764 bp, Oryza sativa
agcagtgtgccgcaacaactagccatcctcgagccatacattgagggacacatgaacgagataagagcatgcaaccctagaagaccggcgacttggatctcaaaggaacagaagcgcaaatttcctgaatgcctgaaggaaaaaacatgtcgttcggtgaatcgcttgcacaggttggcaactggcccaagtagcctcatgaactcatggcaatggtacgacatcggcggatatacattttacacgataggcaagaacaagaaaagtgcagctcataatagtggagttcgtgtggaggcgttggacgcaataggcgagaagaagtcatactatggataatacaagacatttgggagcttgactatggcattaacatccaggtcccggtgctatgatgccagtgagtcaaagacacaacaggcgtatccatcgattactacggccttacggttgtggaatgtagtaaactaagccacaaggatgatccatgcgttctcgctgaatatgttggacaggttttctatgtgaaggacccatccaacgagcggatggacattactgtagtgggaaagcaacacattattggcatcgataacactaaagacgtgtcagattacaaccaatatgacgacgtcccattattcacagatattcctaaccagatcaagcgaattgagacaacccttgacgaagagaagttttcgtctgtgcggaaggatggtgctgcgaaaattgtgaaacattagtgtgtatatatatctatatatatatatatatatatatatatatatatatatatatatatatatatatatatatatgttgttgtgtacaacctgttttgaaaacgattaatgtatccaacttatagcctcttcaaacgattaatgtataaaacttatggttccatgtttatctgtactatatgtcgttctcaagttatatggttgaataattaagatgtggtttgatcaatatacaagcgatttaattagatgcgattgaaattcatttgtggttaaataattatatttctatggttgaataatttgttggcattaatcatatggatgaataattatattgattaattaattaagttgtggtttattaactataaccctttttagttatagttaaagaattatagttaaataatttatgggtttaattaactataactatatttaatttgtggttgaataattatattgattaattaactatatttagataggatttattaatttatctgcatttatttttgcgtccgggtggcttaagccgcccgcatgaaataatatcatcccgtgcgggcaacttaaaccgcccgcatgggaatatcgattacccgcaggtgataatatggttacataagcacggggcgggtgggcgaaattaccaccgacgctgcccagttgtttgccgccaccgccgccgcctcctcgctgagcccgaaacgccgccggtggcctcctcgcctcaccagcctccacctctgctgtcggctcctctcctcctcgcccttcatgctggcgacgtcctctccggccaccacctctgcctcctcctctactcctctcctcctctcgccatcaagatctgggccgctgccgcctcctctcctcctcgcgctcacgccggcctccccgacctccgccgcggccgtcgtcctcctgaaacaaccggcctccccaacctttgccgccgccgacctcctccccaagccgctggccttaccgacctctgccgccggccacctccttcccaagctgccggcttccccaaaatccgccgccagccacctccaccccaagccgctagcggtaagcgtgttttaggttttttgtgaaaatttgtgatatgtgcaatttgtgatatgtgaaatttgggacttagggtgatatttgtgaaatttgtgaaatgacaatttgtcaattttgtgcgatgtcaatttttattaaaaaatgtagatgcattttttttatatgtcaattttgtgatttttgggacttaggatatgtggtatatatgtaattttttttgataattattcatttatatatggatttagttcctaggttattaaatcatcacagaatatgaggtgctctaggtgccatgttggtttcgtcgagttagtgcattgacggagccaaccaagacaccttgggacgccgaggatcatattatgtcttttataggaaatatatatgtttacggttttttaggggtttagtgcaagtatgaaattgggctcgaataatttatatgtaactttacaattctaaaacacacacacaaaaaaaaggttaaagtgcgtagatatttccaaacggctagcatgattaattgagttacaattattacaaagatagaaatagatttatctaatatttttaaacaacttctatataaaaaaatttcacattaagtattttaaaattttgttaacataaatcggggtaaaaccaaagagtggggcagcggtcgttacatgggcttcaacgactagtacaatgcagaactattagttgctacttccttactagctagacctcacttcaccatgtttgttctgacaataggtataggtgcaactgtacaagctagtgcaataagcatggtccgcatgcctgcatgtccctgcattatatccatctacataatccaaggaagcaaatttgtataggtgataatatatatgcacgagatatgcatacacatattatattatcatcgatcagagagctagcacttagatatttttatactggaatttaattagtctattctttacatcactcagctgatagtacatatccgatcacaatcacatgcggcgagatcactctacgtaccattcgaatattgacctatcacgtgccgaccgactgataaactaatgaaccgaattgtatgcttagtacaccattagtcgatcaccccacaaaattagtctatcatccatctaataaatacctataaaaatgaaaaatccttggctcaaatttattatccatacacaacaataaactagcataccttcaattgaatgcatataaattaatttatgcatatattcatgcattcgtttttcaacttaaaatttttaataacacctatatatctgaaaaattctaagagctagaagcacattacatacaagaaccaatacaagcctaaaatcccacattgggaggcctaaaatttggggaaaaaaaaagaagtttttagggttactctccaatctctaaatttgaccaattaaatcgaaaaaaaagaggaatggtgtagtatatactgctcttcaacttccatgagaggatttgaggaggagaggtataggtgctacttccttactagctagatcacctcacttcaccatgcttgttctgacaataggtataggtgcaactgtacaagctagtgcaataagcatggtccgaatgcctgaatgtttctgcattatatccatccaaggaagcaaatttgtataggttataatatttatgcacgagatatgcatacacagattatattatcatctatcagagagctagcacttagatatttttataatataatttaattagtctattctttacatcactcagctgatagtacttatccgatcacaatcacatgcagcgagatcactctacgtaccattcgatcattgacctatcacgtgccgaccgactctgataaactgacgaacctaattgtatggtttgtacaccattagtgtatcatcccacaaaattagtctatcatccatataataaatacctatgaaaatgaaatatccatggctcaaatctattatcaatacacacgaataaactaacacataccttcaattgaatgcctataaattaatttatgcatatattcatgcattcatttttcaacttaaaattttgaataacacctatatatctgaaaaattctaagagcttgaagcaagttacatacaagaaccaatacaagcctaaaatcccacattgggaggcctcaaatttggggggaaaacgaagtttttagggttactctctgatctctaaatatttgaccaattaaaccgaaaaaaaagaggaatggtgtagtatatgctgctcttcaacttccatgagaaattccgagaaaaataggtccaaatcgactggaattgaggaggagaggagagggaggggagaactgctcctattcgggcacggactggggggaaggagggagggcgcgcgtgactaagtcctattcggatagtggtaatgatgctggtgctgcaagagaggaagggcgccaatgaggttgatgccaaaaagggtctattccagcaattagtttatggaggggtctacttaattatcctctacctcaactctggtcatcactgaccagctcatgagctacactgtattctggcttctcaagtccttgccagtaattttcgcatgtggtcctctttagaccttgccagtaatttaacatttttttgcaggcgaggacttaagacgttcgccagtaaatataggagcggcttaaaaaaattggatcacaaccaacgagcgcaccttgcccctcccacaccctaactgctcgacctctcagcccctcacccgtctcagctctctccctcaccttttccacttccctttccaccacagcccctccactctcttcctagtctggccgaaggggcggaagctggcggcggctgcacttcctttccctccctgtccttgatctagttggagggaaggagggtgtcagtggcatcgactagatgcagctaattaggtgtaacctcaactatgtgattagatgaacaaactaaacatatagtcaaagagcaaataaatcaaccagccgagtggttttattaaaaaaaattaaagcatatgtgatgtcaaatctgacttaacaatactcatagtcactcatacaaaatatcaaataggtgttgccactataggtaacggaagtgattaaaccggtacctatagtgcttttcccaccttcataaaatgaaaaaaaaaaaactaacacctttaaacgaagataggtgtcagttttacagaaaaactggcacctatattttaggtgtcggttcacctataattaattataagtgccggtttttaaaaaaactgaaaccgataaaatcgagccgaaccagctaggggagatatttttcctccagatggggcccacacccacactggcaggagataaggccgagcccttctctcggcttctcctctctctctctgcggcagcggtgggagaggtagcgacgcttctcctctctctctctctgcggtagctgcaggagaggtagcgacgccctcccgtcaactagatcggggggaggggaggtgcagcggcggcggacgacatggaggcggcggcccggaccccccctccccccgccagatcgagcgagagaagaggtgtagcggtggtggcgggttggacctcgcctccgccagatccggtggcgtggaggcagcaagttcacactaacttcactcagaccatcacacaatagcatcatatacgaatagaaatcatctagaagtcatatccataaagcactgtagaaatcccatgaaaacaatccgaaactgactccaacctggagtctgctaatctgaccgttgggcaacccggttagaccggtccaacaccactggtctgaccggcagtccccgcctggtctgaccagccaccaagagccgactaccgaaaacactattcaccgtattttcacaaagcactcacctttgacaattgttcatcaccacgattaaatcatcacatgattctacacatatctagagagaggaggcaagagaaggcaataatatatgttggtaaggacatagctacagtgacagaaagtgatgatgaactccatcggtatcgttagatttgtgctgatgtatatgtttcttttttcacaacagcttagtgccgttttcttttgatatgtcctccacgtgtgttgttgctgtcaagtggccatcgacttaaatttgctagtgtgtgaaataatcactgctagtatacaacattaactggcagcagtactattatcgattggatacatgcgattctaaaatttgggtgttgtaaacagctatacccataggttagcctaatgtgtagtagcgacattttttttagtaaaatttttaacagccacctagctaccaggccagtactactagctatagatgctagtaaggcagaagatgccatgtgattaagcttctatttctcatcacgttcaccacatgggcagcaaaagttttgcatgaaatgggatcagttgcagtctacagaacacagtacacactcggtcttctatatttcgctggacgatagcagttaagcatgtaccaagccatccatatacatgtgtcatgcaataaagtagcttggtctctaaacaaacaaatacagagaacatatcatcaatataactattgtgaattaaaataacataatcatctctatcatgcaggtgcagcttgggcatgatgttggcttcaactataaatagacgcgtcgcactctccaatcagatgcacaaccacaagaccaaggaagcagtagcctttcagccctcttgctttagtttgttgatccccgactaaatctcattggaaaacaagctagaaaacatggaaggagtgaagagtttgatcatgtgtatgctagtgctaggcttagtcctgcaacaagagaagatccaggtggaagcaaagagttgttgcccatccaccacagcaagaaacgtctataactcatgccgtttcgcgggtggctcaagagacacctgtgctaaactttctggctgcaaaattgttgatgggaattgcaagcctccttacgttcaccatacccttcaccctgaagctggtaaattagaaacattaactctccttatctatatttctatcttgcattcaccacgcccttcaccccagctaacctaggcaaattaaaacatattaactctctttgtgtaaacttttgggctattaattttgtaatatctattggtacaagcatttattcatgcatatacatgattttgcagaggaatcggaggtacttgacttctgcaagctgggatgtgcttcgtctgtgtgcagcaccatgagcactcgtaagcaagaaaaaacatcatattaaattaccattgattttcaaccaaaaaaataaagattctttgttgtatatagctaatgtatagattgaatcatttgttttccttttcagtttctagcaatgaagaagcgaattatgccgtcgatcgttgcaacgatgcatgccaccgcttctgtaccaaggaagctgagactgtcaccgttgtttcctaagcaagtgcaacatgcaagcataagggcttcacacatcgaagcccatggaaggctatgccactctggagtactcattaataaaacggatatcatgatatccaagccagtgtgccatcgatcgatctatcttgatttctgtcactctttattttcaataagctatgataatcacgatctaccatcatatattatcttttcttgaggatgggagcatacgtagagtgatgatatcattgcctaataaataaatctttatcccttttgttaaaattttataatgcatgctacatatatcggaactgaggtggcaatgaatatacatgatcaattgagctggatagtccattacaggttttatacacatatacatggtgaagaaaataaattattttccttccttaattaaaaggatacttgaccaaaacacaatgaatgattaattattataaattgacctcatgaacagatggttaaacacacagttaataacgcataatgacttacttctcatctcttctatatgcttgaggaccatccaaaatattcaaatgttttcttggcgacaacacaatgagctcaacaattaccaggtaaccatatttatattcgccatcagaacttacagattcaacctggcaacctcttgtttattatatgcctaaggcctccttgggcattataaaactattacacctacaaacctgcaatgaacttacacctgtatttagatatacacctaatgttgctcagtacaagccaagttgatggaagtactgatgcttattaccttgaagaacaatatatacagtcattgtttaattgttttttgtactgcttgtttgggtaagcgcttatcaatcgtggtgggcagctggtaggtattttgctataacctcaaaattaggaattagggatggggtcgatgtatattcagcctgactgacttcgtcccgactccgagcaacactataacaagatgatggcagggatgtgactgccattcgagctacacgaaagatgagcagaaactactatgagagatgttggggtggggggctttgcagaaaaaaaaaagaaacaggccggaacttcatgcgaacaaagatgaagaattttaaaatcctcattaaaagactattgaagctaaaaattgagcaaattgtcaaaccaaatatcgttggtcttgcttttgggctgttaacaaatatgcaaaagaggtttgttattcctattatatgttttgatgaagagctagctgcaagtaattgctaactccctgccttgtgaggtgaaggacttcccttgatcttatttggttctccctttgacagtaaagaagccttctaaagcggactttctatcccttactgacagagttgctgatgaactccctttgtggaaggcctcactcataaacagtgccagtcgcttagttacggtgaaagcagtgctctcaactatacaagaggtaaccaaacctatagacaagagaaggagcttcttatgctcagagcaagagaaggccaatggtggcaattgtttggtcgattggaatagagtgtgccgactgtttacacccaaatttgacacctatggacaaaatagaggaaaattgccaatgtttggaaagtgctgggtttcctttacagggccggtcagaccatgggtatatgggctgtctgaccgactagtagggccggtctgaccgcaggtatgtgtgcagtcaaaccgtcatggtccaagtctgagtctgttttcgttgggcctcgggtttccttgctcgggaagactatgtttcgtgtttcctttggtcactatcccgagttgaacgtggagaagggcctgtacagggcaagaccaactcctatttaagggacaaggccggttcattgtaaacccccgaatacaatatatttgaatttttcttttaccatgttttctattttaacctaggtttagtccatctttgtcgatttgcgtcgtaaatcatccgccaccgctgcgacagtgcgacacctctatgtaggtttgtcctgaaaaccttccgttttgcccacgagatgggcagttatccccatatcgatctaaatcggcctagaggctgattttgatctctaaatcgaccccgctagtcggtttagctgtttttcgacaaaacccatcttgatttggctgtttgactagatcgaggtggttgacgactccatatcaccaggcgtttaggtgttgcaatcgtgcttgtcgacttatcacaaaaagttgccaacgcgatttttggtgactccattggagaacgatctaatcggccatatcacggtcgaatttcgtttaatctagtaatttctgtttcgtcaaatcgagagtttcggctaaacagccgaaatcaatctatctatctactgccactgtacatatctattgatcattgtgttgattgattcagatcggtgacattgttcttgtactaccgatctggccgcttattttgccggtctaaccgacatatttagtccggtcagaccggagaagtggagcagtagcatggccggcagcttctcagctgtacacggccaagagatcagaaacttaatccaattcggtttgtacgtgttaaaaaaaatcaggctatacaaagtcgatttaatcaataggcaaaactgaattggtttctgttagtacatacattagcacatctaccgaggaaaattacaaaaaatcaaagccgattcatattcggctgttctgtcaaaaattccaaatatttgctaggcctacacggttgattaccaaatagatcaaatatttttgataagtacagtaccatatcaagaaaaatcacgatcgtatattaatttattcggtcaaatatttcggttatgagctatgtggcccaaattaatcaaggaatttcttcatcaaccatggcgagcgggaacgagatcgacatggtcacattggacgatcttgatgagggagcacgcaaggccatataggaacatctcaaggcgtatagccaggagatattgatgaagacgtgcactaggacccgtcaaggtgtggttctcaagcctggttctctttacaaacccgtatttgacgataaggtaacctccaattcgcctgatccatgtcttgccattctaaaacatattgatcattgtatagatgcatcttttagtgcttattttgataaaaatatggtagaagatgcttgtaaaacttattctagtaagaaaattggctctaaaatagccagttgtcaacaatatcatgctacttctacttttgcgtctacacaacatattcataatactatggatggatcagcgggtgttcacacagccgattccacaggaatcggttatacgaa

SEQ ID NO: 10393 - DNA, 5198 bp, Oryza sativa
acggcggaaacgacgaccggagcggaggaaggtggcggcgcgtgtcacgtcctgataaattcatcccgaattaaaaatcattcgctaaaaggaataatagaattaattaaaattcgaaaagaaattggcaaacactaaaatacgtaccagaaaaattcgaatgtggcccggagaatttttgttaaattctccttggtctaaaaagagccctcaaattttacttgaattttcagagcaccggaaataattattaagcaacaaaaacaattaacaaagtttattaaaaagaaaaacctaaaaataaccttccttcctcctttgggccaagtttggcccaaagtcctccctctctcccctcggcccgcggccgaagtctccctttcctccctctctttctctccctctccttctctccctgctcttgggcccctcttcccctcccggcccactccctcctcctccctctttctcccaggccgccttcccccctcctctcctcctgggccagccgcccggcccaaaccgcgccacccagccgccccggcccaagctgagccgctcccctcccgcgcacgtgcgtcgcacgcgcgctgagcgcgcgcctggccgcgcggggcccacacgccaggccgccgtcgtcttcttcctcctcccgcacggccctctctctctcccgtgaaaaccctacttcgttcctccctcgaatccgcgcgatttaagcgttggattccaaaattaattgggggcttttaatccccattgaatcctcttcaattccccccaatttcccccttgaatggtgcccccaatcgccgggaacgcccgcgccaactccggccaccaaccatggccgccggccgtgcttcctgccgccgttcccgctcctcccgtggccggctccctcccccatcctataaaatgcaaccccctccgtgcgttctcttgttttagccccttcccgagctcccccacggccgcagcacctctccccgccgtcctcctctctctcccgtgccgccggccgcctccagccgcctctcccgcctcgcccgagcgccgtccggtcgcgccgtcgcctcctacagcatcgcagccgcctcctctcccacggcctaccctccgtttcgcgcggtgaccgccggaggcgcgttcccgccgtcgccctcctctttccttcgcgccggccgcctccagccgcctctgtctccctgcctgagcgccggtcgacgtcgccaccacctccctcggctccgcgacgccgccctcatccccggcatcacctcctcctcgcccgattttcgccggaacaccgtcgcccgcgccggcctcaccttcctcctcgtcgacgtctcctccggcaacccctttcgccatgcccgtgcatcagccggcgctgccgtcccctccctcggcacggtgacgtagccctccacctcgtccacccctcggtttcgcccggaagccgccgcacatcgccgcgaacctctccatccgcctcgccggagttgttcggccgcccgtccctcctcgcccgtgcaccggtcggccacacctccaccacctccggcatcgcagcggcaaggtcgtcctcggcatcgtttcccctccatccaaacccctccgcggtccatcatcgtcgtctccgatcgttctcgtcgtcgacgtcccgtcggtcgcccggctcgtcgtctcgcggcgccacctccgtcatcgtcgttgtagcggcgtgttccacgtcatcctcgtccccgtgcagccgctgccggctgtcctcgtcgcctcctcgccggtcctggtcatcgtcgtcgtcgtcgtcctctcgtcgttcccggtcgtcgtggcgttcgtccctccgtcgagccgttctcgtccgtcgtccgcgttcgtcaagcgagccgctgcagccccgtcctcgtcttcgtcctcggctccgcgtcgtcaagccccgtgccggccgcgtctcgccttcgttcaaggatcgccgccgaagccgtcccctcgccgttcgtctccgttgtgcccgtctgtctccgctgcgcccgttcgtcgttgtcgttcccgcgcctcgtcgcgtggtggtaaggatccctctccctcgctgccccgtcctcgtcctttcggtgtcgcccgtgctcgttgtgcggttgtcggccccggtacccgtgtaccggtgtcggtagtcgttcacgcgtgcgggtggtgaccgtgtagtgtccgcgttagtgtgcccgctcggtagccgcgtggtttccacgtgtgcaggccgtgtggtgtctagtggagtccgtttgtcggccactcgcctcggttgacacacggggtccgcctccgtcgacccgtggaccgtctctgtgtacccggtctaccgcggtccttttggttgacatgtggggtccgcatgtcaacggcgcagccttcctgtcttttccaggctagcgcttacacatgttttataattgcaaagcttaattataataatccgcaaatctccatataacagcattaaacctcggatgatcatatcttggtcatacgaactctgaatcgacccgttcaagtctcctaatgtttgttataacctaaagaaccctgtgcgttctttttatgtattgttattgcttctttataggcttgtagctttgcttgtgtgcttcgcgtagctttcgtcgttccggaggttcccgaagcgtggttcgcggtcgtcgctgaaggttcggaaggccgttctctctgagcaaggcaagtcacatcatccttgagcatattgaatcccagtttataaaattattttgatttaaattaatgcattatcgctttatttaaattcccgcgttatcactgttttatttagccatgcctatttacctttgttaagacattattattgctattgttattattaccttgttcaccctagaataaacaaaaccccaactagtggacactctatttatggttctactagtatgaattagggtagatgcttcgctgattaataggacaacattaggtggtttttataactttagactttgggaattctcatatcatttggacactatggaatggttggcttatggtggaattggacatacccctctcttcctctttcaaaacccctaaaacctgtttttcggtggggtttgggtgcatgccagttgtgggaagtggcaccccggccaatataaggattaagctcgggcctctgttgcaaagcactaccgtacttccacatgtctagtgggtaaggcttagtttgtggctcagtctggttataaacaaaagtacacggattggagatggatgaagtcgggggtcgatggacattctccagggcaaatgaaggctacacgagctgcggcccggtagtcgagatgtcatggcacagggctggtgtcctgctgctagggggctcaatcctgcctgcctgtcccgggggttccggccgtaggtggggttgggtcggtactcttgtttatggctaggatgggttgggaactatgtcacgtcttccgtccgtataccgtggtggtatgtggcacgtggttacacgtgaggaagatgtgtcttgtgggtaaagatgtacacctctgatcagagtataatctattcgaatagccgcgccctcggttatgggcaagccgagcaatgtacccaagttagtgttttaattcttaaaacctgctgaacaactaaaatgtggaatggttggcctgggttggcttgggacgagctgggacccagggtcgggttgccagttcggtctgaatcatcgtaggccttgggttaaggcaggttcgtgtgggttcatgaccttgattaataatatcatatagctctaggatcgtgtttacaaaatagctttgggtaactaagtgacttttaaatgctgtttactgcaaaacttaacccctatattattatccccttgtactcccttgcattaattatgcatctgccggtgtggcttgctgagtactgtggttgtactcattcttgctctatctttctccccccttcagtaagagaagctttggagaagaagtcttaggtggagtcctggcttataccccagttgagcgcctgtgaagatggagccgtaggcccgctagtccgctgctgtttatttttgattgtcaggcctgaagcgcctttgtaataatgtaaatattatcgatataataaagatgtgtcttttatatcatgtttgtgcgctgtaccccggcttttcctgggacggggattaatacactagcgttcgggaaaaggcaattttcccggtcgcgacagcgcggttcggatcgacgaggacggcggcgctccgacggtcggcgggcgaaacgaaggggtggacgaggttgacggggacgcggcgaagccgaaggaggtgacgccgagacgggaggaggtccggggcgacgacggcggcgaaccggagctcggcggcgacggcggagagagaggaagacggcgcgagctcgaatccgaccgggagagagtgcggcgagtggcggaaacggaggagcgaagcaggaggaacgattatatagcgtcgagagtgagagagggcggccggagaggaaggaaaccggcgcggcgatctcggctccatcaaagacgccggcgaggatttcgggaataaatccgggcgaatccgagggagagagagaggggaaagtggggggaaagagggagggaatcacggggagtgatttccccctctttatggcgcgcggggacggcgggatgcggcagattcggcggcggcggcggcgttagggcacgggcgggcggcggacgcggcgcgaggtaggcgatgacaggtgggccccacccgtcagcgagggtggcgggcgggcccgcccgtcagcagcgcgcgcgcggggaggggccgatgggccgcgggggagaggagagagagggagggagttgggccgagccggcccaagagggaaaaagggggggaaagaagacttttagggattttctttttataaaattattttaactttgtttatttcttctcaattattatttgtgctctgaaaattccactaaaatttgagggctctttttagaccaaggagaatttaacaaaaattctccgggccacatttgaatttttcttgtacgtattttagtgtttgccaatttctttccgaattttaattaattctattattccttttagaaaatga

SEQ ID NO: 10394 - DNA, 11929 bp, Oryza sativa
  unsure (1)..(11929): unsure at all n locations
atccctttccttatcaaacctgcatgctaatcaaataagacaagcaataacaaggtagataacaactcaattgcataaaaatgattaaacactcgaattaggggttccacaaaccgaactagcgatgaaatttcaatggcagaaataatccaagcaaaacccaactctagactattatggctacataataaatatgattagggatgtcctagggttgccgcacacccccctaggtttagcctacgacacaattacaaggccaaaggcccaaatcagattcggactggatgaggtacatggcttgttttgtcgattccagacaacaaattaggaatattgacgtgtgaccaaaatcatataaaagtagactccattagctttccatcaagttatcatagaccccaaaattccttcctgaacggcagctaggtccgtttgaagttgatgctgtcaggaggctcaaattcaaatcccactagtacagatccttccatctgtgacggcccctaacaagactggaatttgggggccgtcacaagtaagtaatctcaatcgagccgaagtttcgcccgattgagatatggtcgcacagccatggtagatcggcataaaactaaagcccgtcacggatgacacttttctgtgatgggccatagttgaggcccgattgagatgagggttccatatctcaatcgggccctaaaagaagcccgtcacagatgacagtcatctgtgacgggcaccaactgtaacgccccgattttcgttcgggattaaaaatcatttaataatccatttcctagatattaaataaaagttagagaaatttaatcaagtaaattatagagggaattaaaaatttcctttaaaaatcgttggctgggaatattttgtaatattctttgtgccctaaaatactctctgaaatttcccgtgaattttcggagctcaagaagtaattttaatagcccaagccctcctctctccttggcctgtttccccctccctccttcctctcgggtaggcctctctccctcggcccgctcgtccttgaagtctaaataacccccggctccctctctctctcaggccgacaagtgggaccgcgggacccactgacgtagccgccatgccgcccatttgccgcccacgtcgctaccgattctggctcctcccgctcgcaccctcgcgcccaaactgcatgaaatcggttcccgtccacctcctctacactctccccacgtttcccccgaaaatcgcactgggatcgagctccacttcacccacgatgtcgcccacgtcgccggccgttgccgctccaaattctccactccccggcctccccgttgctccctcgcgctataaaaagccttcccgtgctctcctcttccgtttccccttcctccctgagctcctcgtgccctttcccgtgctccccatgcgagcccaagtgccgccgctcgccggggaccctccagccggccgctgccgccgtccccgcgccgggccgcttgcgccatcgcgttcgccgctctttgccacaccccggcagccactccatattccccaatagccaccggaaagccaccccaccgngccaccaacctcncgcgctcgccgtatcgttcagccgcccaccaccgccattctcgtcgccgccgtgctgtgccgtttccaccgatggcttcgccgcatcaagctccaccccgacctccacttcgaacccacaaaaccaccgccaaacgccattccaccgtgcatccgagccaccaccgcctcccgtcgcgtccagccggccaccactactaccctaatggccgctgcgctgcgccgccgccgccgtcagcatcgccatgccgagctccaccccggcagccgctcgtcttccttcaaccaccaccgaaaaaccacccccaccaccaacctgaggccgccgccgcatttgccgcctcctgttgctgtcccagaccacctcgcgatgcgccgtcgcctccttcggctctgcaatgacgaggagtcccttggctgcctcctcaccatcgccatcccccaccggaacgccatctgccccgcgcgaggtgagctccgtcgccgtgcttgttgcctccggctgcccaccccgcgctcgcctaacccatccatcaccttcctcaggtcacggcgccccttggccgcccctctgttggcgccgcccgtcgccggagcgccgccgccccctctccgcccgagctctgtcgtaccgtcaccggcgccactcggtgaggaccccctccgtctcctctccctttcccctctttccgccgctgcgtcgcgccaccgccgccggtggccgtccggccttgtgccaccgacgcctggcaagccagctccctccgttgccgattttgggcgctgcctgtggaccgcccgtgctcttggtccacggcgccgcctaggccgcggtggacttggtccaccgtgtgccctccccttggagccgctgacgtgcggggcccgcgtgtcggcgccggcttcccctgctcacatcagcggcagcccttttcctttgcgaaaatatttaattaatgcgtcataaaccgataataattataaaaattcatttaatggctcaacaacttctaaaattcatatctaattcattcgaactccaaatagggcgattcaacttgcaaaattcatctaaaattgagctgtacgtgtttgtttactttttatgtactgttttcttggtttttattagagtttttcctcgttttgcatgctagagtgtagtttctgccgttttggaagtccgctgttgtgaggaaaggagtttagaagatcaaagtgaagaagtaaggcaagtcacacattccccttgagcattttgatcctactttacaaatgttttaccgtttggaaataaaattgcatgtcttgctaatacatgggatcagggtttacctatcttctcgcttgtgccatgtttacttgatatctatcctttgtcaacattgggtaataaattgactagctcatgttacttttgtgacctagctagaactatatgcttaaccatgcttaattaccactagcctagttgatgggataattgcagtattagaccttgttagtatcagaacgagctgcgtgctcgagacacccggacatgtttaattggtcataattatccaactaaaatgcgactgaatggtgggctgtggatgcatggttttgtgagtcgcacccatggcaattaaggaccggttcacgggaaaccctggaagacttacagtgctaccacaagcaggagtggataattgcttgatctgaagtatagctcgaccctttcctaggcaccagtggcgagggtgggcgtaatggagttgggtcggccggggtgtccggttgtccagctgccggattcaccgtggcgcatgaggggactgcccgctgacttgcgaggagtgggggtgaaaccttagcgtggtgtggatggttatgggagagttatatgaagggtcttgtcacaatcactcgacgtggtgacgtgttcgtcatgggcacatgatggcacggtgacatgccagtggattgtgtcttgtgggtatagttgtgcacctctggctagagtaaaactatttgaatagccgtgcccacggttatgggcgatcgaccagattcaccgtgattagtcccacacttaataaatcgacccaatgcactgtagttcaggtgggttggttgggcctgttcaacatggtgtagcgttgatcagtggagattcaatattactataattactcaactgttttaccagtttgctcaataaaatgttttacaactacctttatgcaaatagccacaagccattcttgaataaaatccccttgcacgtctgcatcagtttgctcaataaaatccccttgcacgtctgcatcattggtgtggcttgctgagtacggtggttgtactcagccttgcttttattccccccttttcagaagtgtagtgcttctgagctggagatgaagttagaagaccaaggctccgaccccagttgagttttgcctatggagtggagctaaagtcccgctaggatcacctttttccactgctgctgctttcttttcgatgtgaggactaagagcctcttctgtaagtatttacgctttatttacatttggaactgtttattacttgtcattttgtgtaccctggctgattcctggacagggatttaatacacaaaatagtctggaaatttgggctaaatttcggggcgtgacaaactagaggcccgattgagatatctaatgcccatcacagatgacactcttctttgacgggcttttattaaggcccgatagatattacttgtatgcccgtcacggttgattgttttagggccgttacagatatttgatgcacggtataaataccccccaccacctagtgtaactgtatcccactgttcactattttggtgggaggatgtagggggcgattttttgtcttttttccaaggaaaacacaaaatttccaaaagtgatcaaaatggagcaatcaagttagtaatattaatcattaattgagcaatttcatcatgtcttgcttttgcaatactgatcttataagatgtgcctctaatttatttttttttattttgtaattgatcacgtcttacttttacaattgatcgaagttggatgtatgcgaaaaatttgaaacatcattctacggagtacagaaagggcgtaataatttttatgaacgccgcggaggaggatcggaaaagaagaaacagtgattacatgtgctcatgtgcagattgcaagaatgagaatatgtttgatagcggagaggattcatgaagggctatacatgttgggttaaggatggagagcaagaatcaggaagtggagcagtagcagacagaagtggtgcgcataatcaggaagatgaagatgagcatgacatgtttataccttgtccattgggcggtgaaatggttgatgtggatcacgatctgctgcaagacatattacgtgacgttgaggacctagcccagaatgagagagattccatgaagttcagcacattggtcagtgattccgagacgtctctgtacactggatgcaaagcaaaacacactaagttgtcagttacgttggacctaatgaagctgaaggcaagtagtggatggacagacaagagtttcactgatcttttaggaattttgaaggctatgcttcctgctgagaacacattgcccgagacgacatacgaagcaaagcaggttctgtgtccactgggcttagaggtccgtagaattcacgcttgtccaaacgactgcatattgtaccacaagcaatatgcggacttggatgcttgtcctgtctgcaaggcttctcgatacaagcgaaagaaaagtgctgacgaaggaaagaagtcaaagaggggtggtccggcaaaggttgtgtggtatctacctatcattgatcgtttcaagagaactttgccaacttgaacgaagcgaacttagtacgttggcacgccacggagagaaggaatgacggtatgcttagacacccagctgattcgattgaatggaggaatatcgatcgaaaacacaaagactttgctgccgaccctagaaacatgaggatatgtctgtgtacggatggcatgaatccttttggtgacatgagtagtactcacagcacttggctagttcttattgcgaactataacctcccgccatggttatgctttaaacggaaatatattatgttgtgcttattaatccaaggtccgaggcaactcgacaatgatatcgatgtattcctggagcctgttatcgacgatcttgagattctttggaaagaaagtatggaaacttgggatgcatattgttcaagctaagagttctattgttctgcaccattaatgactaccctgcactcggtgatctttccagacaaactataaaaggaaagaaggcatgctccgattgcaaggaacatacacaaagccagtagctgaagaaatcacgaaagatggtatacatgagtcatcggaggtgggtcccgctacgtcacgcatttagaagaaagaagaaatattttaacggtaagagagaacttcagcctactcccaaagatttgttcggagatgaggtccacaatatggtcaaggacataagcaatgagtgtgggaagaaaagaaaacgtaacaacacaaaggagaagggtatgtggaagaaaaaatccatattttggcggctaccttactggaaagatcctgatgtccatcattgcattgatcttatgcatatagaaaagaatgtgtgtgagagtttggttggcctgatgttgaatattctcgggaagacaaaggatgggttgaacacgcgccttgatctacaggacatgaatattcgcagtgaactccagcccatatgagatgcagagacaggtagagtgtacctccctccagcctgccacacattgtcgaaagatgagaaaatcgcaatgttatcatgcttgaaggatattaaagttccatcgggctattaagcgaggataagtaagtatgttaaattggacgatctaaaacttgttggaatgaagtctcacgattgccacgtgctaatcacacaaatcttgccagttcctatcagaggcattctaccaccgaaagtgcgtcgcacgatccaatgtctgtgcgccttcttcaatgcaattggacagaaggttatagatccaaaagatctagatgggttgcagaccgatattgtgaataccctctgtcacctggagatgtttttacccctgtctttctttgatatataatggttcatctccctgttcatctggtgaagcaaacaaaactatgtggcccggcttttctaagggaaatgtggccgcttggaaggtacatgggagttctgaagtcgtacgttcgtaacagagctaaacgcaaggggagcatcattgaaggttacacgaccgaggaggctattgagttctgcgtcaattacctgtccgatgccgatcctatcggagttcctgcgtctcatcacgagggaaggttgtcaggtgttggcacaatcggaaggaaaagaattaggcctgatcaagtgtcctatgcgcaggctcattacgctgtgatccaacatatggcggaagttggcccatactttgaggagcacttagcgaaaatccgagatgagaacttggggcgatctgatgaatggattaactgataacataattctcggttcaacgaatggttcaagaatcgtgtgacaatgtccatggatgtcccaaatgtgacaatgtccatgtgtcttggaccgtagacacatggcaaggatatgatataaatggatacacattttacaccgtcaaacaagatgacaaaaacacagtgcaaaacagcggcgtccgtatatccattccaggatcaagttgggtcaaacacatacactacggccgcattgaggagatctaggagctaaacttcgtcaagttcaaggttcctttgttccgttgccgttgggtgaatctacgcgctggtgtcaaagccgacaaggaaggtttcactttagttgatctatcaaaggtgggatacgaaatttcatactaatgcccgattgagatgaaaatcaggcccgtcagggatcactcatctgtgacgggccatcagtaatactcgattgagatagattaatctctatcgggctataactaagcccgtcaccgatgactatttttccatttgaagtatttgtatctatgagtgcaaaatatatagctgttgtgtaataattcattttattagtcataatatatttttggatagtaaaagatttcaaatggaaatatggtcaacaacaaagttgtagagcctttcaagatctacaagttttattttggtcatttttctatataacatttttcccaacagtttgaaattgaatttgaatatatgacaaaactaaatagcaattgtaaatactaaatgatttcaaatggaaatattgtcaacaacaacgttgattctctcatcaagatctacaacttttattttggtctttttctaaataactatggtcaatcacatttctctcatctggtttataaacatcaacacaaatatgtcaattttgtaaacattggtactatcactttgttggatgaagaagtgaccaaaataaaagttgtagaccttgataagttgtacaacttttctttttatggcttttccatttgaaatcatttagtatttacaaatgttgtttaaatttgtcatatattcaaattcaatttcaggttgatgggaacaaagttatatagaaaagtgaccaaaaaaaaagttgtagatcttgttgttgactttttcatttgaaatcatttactatttacaaatgctgtttaaattagtcatattgtgaaaatcaatttcaagctgttgggaacaaagttatctagacaaatgaccaaaataaaagttgtagatcttgataacctctacaattttgttgttgaccatatttcgatttgaaatcatttactatccgaaaatgtattatgactaataaaatgaattattatatagctgctatatattttgtactaacaaatataaagacttgattggaaaaatgcaaaaaaagtcatcggtgacgggccttagttaaagcccgatagagattaatctatctctatcgggcattatcttagagcccgtcacagatgacttatctgtgacgggcctgaatgtcatctcaatcaagcattagtatggagcccgtcaccaatgagtcatctgtgacgggccctacggcaatgcccgattgagatgacttatcactctactataacaagggtttctcatatcggatcgaaaaattttctaagtcctgctacagtttcccgcctccttagaaccctagcgccgccgccttcgtcctccctcgccaccaccgccaccgagcccgccgcttccaccgagcctctacaccgaccagcgtcggccttcctcgtcgtggtcgcctgcctcttcaccgacgcgaatagctgacccccaccgagcccggcgacgtccttcctcatcgtcgtcgcctactcctcaccgacgcccgacgccgacctgcccgaccggcgccgccctccaccgagcccagagctaccgccgcgaactccttcgccgagcccggcaccaccgccaccgagcccagcgccgcctccaccaaccggcgacgccctccaccgaacccggcgccaccaccaccgagcccctcccccccccccccggccgtcctcaggtgagtcctccatcgcgccgccctctgctacctgtggtgaatgatgaaatgtggatgttgggatgaatttagtgatagatgattttagtgattgatgacatgttgatgaatagatgaaatgtggtgcattaatgaatttagttatagatgattttagtgattgatgatatgtggtgaacgaatgattttttttattgatgacatgttgatgaatagatgaaatgtggtgcattaataaatttagtgatagatgcatgatatgtggatgaatagatgatatgaggtgaatttatgattttaggatttgatgatatgtttatgtcgcgtcccaaaacgactctaaaatacatcctctaaattatgcctagaataattaaaatccatgtgaaagcctccaacaattaaaatgtgcaaagttaaaagtcaaataaggcttggaggatttttctatatttcctaaaagcctaaaatgcgtaaataaattttagtggaattttcagagcacaaataataattattaagaaataaacaaagttaaaatgattttataaaaagaaaaactctaaaaagaccccttcccctccctctccctcttgggccagctcggcccatctccctccccctccctctcctctccccgcggcccatccggcctctccccgcacgcgcgccgctgacgggcgggcccgcccgccaccctcgctgacgggtggggcccacccgtcatccccttcctcccgccgctcccgccgcctcgcccgcgccctagcgctgccgccgccgcgaatcccgccgccctcgtcctccccgcgtgcaatcaataggggggaattattccctgtgattccctccccctttcccccaattttccctccctctctcccttggattcatttggaaaccctcccctaatcccgccggccccattgatggagcccgagagcgccgcgccggtttccttcccctccggccgccctctcccccttccaatcctatataaaccctccccgcacctcctccgttcatttccgcctctcgccgcccttcctcctcgccggaatcgagctcgcgccgtcgctctctctctccgccgtcaccgccgagctccggtccgccgccgtcgtcgccccggaccacctcccacctcggcgccgcctccttcggctttcgccgcatcctcgccgacctcgtccacccctccgtttcgctcgtcgaccgccggagcgcccggtccccgtgacccgagccgcgccgccgccttcctccactccggccgccttttggtcgtcgctgtcgacctagggtgagccgtggaccgccgcctcgtttccccctttccctcccttctctcggccgccgctccgccgtgcctatggtcgccgccggcgaccataggagcgcgggcgcgccgcctcccgccggccgcgccgcagtggccgccttcgggcgcaccgagcggctgcctagtggggcccggctgtcagccgcccgcgccgtcgggtgcagctgacgcgtggggcccacggcgccggccggtgtgagccctggtgcacccggtccaccgtggaccgtgaggctgccgcgtgggtcccacccccatggacccgctcggcgcgcccccttcccttggctgacgcaataaacttttttttaaattaaaatttaaatgaggaaattcgcaaatattcatttaaagagcatataaacttcaaatggccataacttggctatttgaactcggaattggaccattcaagtctctaatttttccttaagaagtcaagaacccatttttgtgctttgttcctgcttgttatatggagtttattagagtaaaagccttttcttttccgttggtcgtgtagacgctgcagcttcgcaagatccgcttttcgtggaagttgaagccgacgtttgggaaagcgagcaaggcaagtcgcatcatccttgaacatatagaatcccagtttataaaattatgttgatttaaattattgcaatatcgctttatttaaattctcgcgttatcactgttttatcttgccatgcctatttacatttgttatgaccttattattgttattgttattatttccttgttcacctgagagtaatcaaaaccccaactagtggatactctactcatggtaccactagtatgattttaggtagatgcttcaccgcttaattaggcaacattaggtggttttacaactctagactttgggatactcttatcacctagacactatggaatggttggactattgtggaattagattcacacctccccctctattcaaaatcctcaaaatggttttaggctgggctcggggtgcatggttttgatagtagcacctcggccatataaggaccggtcttcgggcctctgttgcaaagcactaccgtacttccacatgtctagtgggtaaggcttagtttgtggctcagtctggttataaacaaaagtacacggatggagatggacgaagtcgggggtcgatgaacatctctagggcaaatgaaggctacacgggctgcggcccggtagtcgagatgtcatggcacagggccggtgtcctgctgctaggggctcagtcctgcctacctgtccccgag

SEQ ID NO: 10395 - DNA, 2124 bp, Oryza sativa
agtatgaattagggtagatgcttcgctgattaatagaacaacattaggtggtttaataactttagactttgggaattctcatatcatttggacattatggaattgttggattatggtggaattggacatacccctctcttcctctctcaaaacccctaaaacctgttttccggtggggtttgggtgcatgccagttgtgggaagtagcaccccggccaatataaggattaagctcgggcctctgttgcaaagcactaccgtacttccacatgtctagtggataaggcttagtttgtggctcagtctggttataaacagaagtacacggatggagatggacgaagtcgggggtcgatggacatctctaggacaaatgaaggctacacgagctgcggcccggtagtcgagatgtcatggcacagggctggtgtcctgctgctgggggctcattcctgcctacctgtcccggaggttccggccgtaggtggggttgggtcggtactcttgtttatggctaagatgggttgggaactatgtcacgtcttccgtccgtataccgtggtggtatgtggcacgtggttacacgtgaggaagatgtgtcttgtgggtaaagatgtacacctctgatcagagtataatctattcgaatagccgcgccctcggttatgggcaagccgagcaatgtacccaagttagtgtttaattcttaaaatttgcttaacaactaaaatgtggaatggttggcctgggttggcttgggacgagctgggacctagggtcgggttgccagttcggtctgaatcatcgtaggccttgggttaaggcaggttcgtgtgggttcacggccttgtttaataatatggtatagcgctaggaccgtatttacaaaatagctttgagcaactaagtgtcttttaatgctgtttactgcaaaccctaaccctttatattataacccccttgtactcccttgcatttattctgcacttgtgggtgtgtcttgttgagtatggtggttgtactcagtcttgctcaattttttcccaaacccagaagaggagttcctggaagatgaaggctttggtgtctagctcgtgcctgccgtcaagtgcctgtggtagctcgtgcctgccgtcaagtgcctgtggtcgtcgccctagtcttccgctgtttcccgtttgtctttgtgtgtgctgggccttcgccgcccatgtaataaattaactatttacgcttccgcttgttaaactctgagctatatcaacttttggtgttccttgcctcctgggacaaggaataatgcacgcacgtaaggaacgcccgttgggttatttccggtcgtgacaagttggtatcagagcccccccttgaccctaggacgagccgtagatcccaagccttagcaatattttcaaaataaaaatcctttcttatttgtgaaaatcctctagtctctctctgtcctgcttcatttatcgtcaaaatctgacctttaaaatgttgcttttctcttttgtttttgtttgtagatggccggcagcatcaaccgtcgtggtctggacctgactggcttcgttttggagctgcggggcatccgcatggagtggattactgtcgcgaccgagaaaattgcattttcccgaacgctagtgtattaatccccgtcccaggaaaagccggggtacaccatacaaacatgatataaaagacacatctttattatatcgataatatttacattattacaaaggcacttaaggcctgacaatcaaaaataaacagcagcggactagcgggcctacggctccatcttcacaggcgctcaactggggtataagccaggactccacctaagacttcttctccaaagcttctcttactgaaggggggagaaaggtagagcaagaatgagtacaaccacagtactcagcaagtcacaccggcagatgcatgattaatgtaagggggtacaaggggataataatataggggttaagttttgcagtaaacagcatttaaaagtcacttagttgcccaaagccatttataaagacgatcctagagctacacagtattattaaacaaggccgtgaaccctcacgaacctgccttaacccaaggcct

SEQ ID NO: 10396 - DNA, 7045 bp, Oryza sativa
cacttgtcggcaaaatgacccattccttgacaattgaagcaacagatatcttcccggactcggcattttcttttctcattttgattcctctgtcctggcactggagttaggctgaaactgtaatcttggcgaggatttgtgttgccttgatgcttctctccgttggaactggcgggttggttggccatcttcttcgtcagcagaaaactgaattgacaatcttttggtacatgatcagttccttcacaaaagaaacaagtgatcctgctcgttggacacctatcgggtggatggtcttcctcgcaatgaacgcatgtagtggcacacgagctggcaacatgaccgatttctccacaacgagagcatgccttacgttccattttattctggttgaaaccttggggagacttctcatcttcatcatctgaggagacttgatctgaatcttcactatcagacactctacctccattagctaaaagatgctctgtcaactgtggtgcacctcggaaggtatttcttctctgacgtttggtcattcctggtggaggccattctgtgctggtaatgatcatcttacggacttcatcttcggttcgcattggtgtttttcttttctgctagggacagttccttgcatagtgcccttgctcatcacacataaaacaaatgatacttgcttcttttgagtcaacatgtggcacgccaccatgggtcttttgggatgctggcggcatgctgacttgtggtgtgagtgattggactgcctccaactgcacttgaggttgtatctgactcaggttcagaattggcgtctgatgctgctgtagtatctctataagcaatcggttctggttaattaggtgttggaccagtgtcacacaactgttgtctggtgcttcattcactcgggagcttgaggtaccaatgtcctgacttctgaccttattgcctttctcattgtcagccatctgttgcaaaggtttggagagggagagagggaaaacaaaggggagagacagattagaaactaaggataggaccttaacagatctaagtcttttgctgttatgatgtatgttaggcttattctgcaagttgattaagcaaacaacctagcatggttacatcacaccccactgatgcaaaccacgcgctacacacacaagcaaggaaacacacgactaacgactctaccctagagggtggcttaggttcggtgacgggttctcaagatcttcactcctgcttcacagctggcttcactgcttccttcgcttcgctagcggatcctgcagtcttccggagcttcggcaaacaactgacgacatcttcttcttcgcaaaactgaccatctagtactagttgaaattcgaagaaggaagaagggagtaaaccttttgcaaatagcattaggggaaggagaaaaaaggaactttcgcaaatagttttatttataaaacatgtccttaggtttatccacttggcttatcctacagtcgagatggctctgataccagcttgtcgcgaccgagaaaattgcattttcccgaacgctagtgtattaatccccgtcccaggaaaagccgggatacaccatacaaacatgatataaaagacacatctttattatatcgataatatttacattattacaaaggcacttaaggcctgacaatcaaaaataaacagcagcggactagtgggcctacggctccatcttcacaggcgctcagctggggtataagccaggactccacctaagacttcttctccaaagcttctcttactgaaggggggagaaaggtagagcaagaatgagtacaaccacagtactcagcaagtcacaccggcagatgcatgattaatgtaagggggtacaaggggataataatataggggttaagttttgcagtaaacagcatttaaaagtcacttagttgcccaaagccatttataaagacgatcctagagctacacagtattattaaacaaggccgtgaaccctcacgaacctgccttaacccaaggcctacgatgattcagaccgaaatggcaacccgaccctgggtcccagctcgtcccaagccaacccaggccaaccattccacattttagttgttaagcaaattttaagaattaaacactaacttgggtacattgctcggcttgcccataaccgagggcgcggctattcgaatagattatactctgatcagaggtgtacatctttacccacaagacacatcttcctcacgtgtaaccacgtgccacataccaccacggtatacggacggaagacgtgacatagttcccaacccatcctagccataaacaagagtaccgacccaaccccacctacggccggaacccccgggacaggtaggcaggactgagcccccagcagcaggacaccggccctgtgccatgacatctcgactaccgggccgcagctcgtgtagccttcatttgtcctagagatgtccatcgacccccgacttcgtccatctccatccgtgtacttttgtttataaccagactgagccacaaactaagccttacccactagacatgtggaagtacggtagtgctttgcaacagaggcccgagcttaatccttatattggccggggtgctacttcccacaactggcatgcacccaaaccccaccggaaaacaggttttaggggttttgaaagaggaagagaggggtatgtccaattccaccataatccaacaattccataatgtccaaatgatatgagaattcccaaagtctaaagttataaaaccacctaatgttgtcctattaatcagcgaagcatctaccctaattcatactagtggaaccatgaatagagtacccactagttggggttttattttcctagggtgaacaaggtaataataacaatagcaataataatgtcttaacaaaggtaaataggcatggctaaataaaacagtgataacgcgggaaattaaataaagcgataatgcaataatttaaatcaaaataattttataaactgggattcaatatgttcaaggatgatgtgacttgccttgctcgctttcccaaacgtcggcttcaacctccacgaagagcggatcttccgaagctgcagcgtctacacgaccaacggaaaagaaaaggcttttactctaataaactccatataacaagcaggaacaaagcacaaaaatgggttcttgacttcttaaggaaaaattagagacttgaacggtccaattccgagttcaaatggccaagatatggccatttgaagtttatatgctctttaaatggatatttgcgaatttcttcatttaaattttaatttaaaatcggatttattgcgtcagccgaggggaggggcgcgcggaccgggtccacgggagtggggcccacgcggcagcctcacgatccacggtggaccgggtgcacgcggcttgcgccggccggcgccgtgggtcccacgcgtcagccgcacccgagggcgcgggcggctgacggccgggccccacatggcagccacggggcgcgcccgaaggcggcctcgccggcacggccgacgggaggcggcgcaccgagagaggggagggaagggggaagtgaaacggcggtccacggctcaccccgggtcgacggcgacgacgggaacggcgaccggagcggaaaaaggcggcggcgcggctcgggtcgacgaggacggcggcgttccggcggtcggcgaccgaaacggaggggtggacgaggtcggcgaggacgcggcgaagccgaaggaggcggcgccgaagcgggagaaggtccggggcgacggcggcggcggaccggagctcggcggcgacggcggagagagagagcgacggcgcgagctcgattccggcggagagagagggcggcgagcggcggaaacggtggagtgaggcacggggagcgtttatatagtgttgggagtgagagagggcgaccggaggggaaggaaaccggcgcggcgatctcgggctgcatcaatggcgccggcgaggtttgcgggagtatttccaaacgaatccgaggaagagagagagggaaaagtggggggaaagggagagggaatcacggggagtgatttccccctctttattgcgcgcgggggcggcgggatgcggcggaatccgcggcggcggcggcgctggggcacgggcgaggcggcgggtgcggcgcgaggtaggggatgacgggtgggccccacccgtcagcgagggtggcgggcgggcccgcccgtcagcggcgcgcgcgcgggggaaggccggatgggccgcgggggagaggagagagagggagggagctgggccgagccggcccaagaggagaaggggggaaaaaggacttttagggtttttctttttataaaacctttttaactttgtttatttcttaacaattattatttgtgctctgaaaattccactaaaatttgagggctcctttttgaccaaggagaatttaacaaaaattctccgggccacatttgaatttttcttgtacgtattttaatgtttgccaatttcttttcgaattttaattaattctattattccttttagaaaatgatttttatttcgggatgaatttatcaggacgtgacaaatccaccccccttacaagaatctcgtccccgagattcgaggaggctagcaagaagataggttgggcggtcttttcttcttgcctgacttcttccgctccgtcttctataacaaacttgcctagcacaacttctccactctggactgcttcgctcgatctcctgttgcagatggaatcttcttttcacctgacttgaaccagggtgcaccttttagctgacgctgactcggttgcggtagtttaatgatgcttccgttccagaacttctcacgattcatatcttcggcgtcaacctcacacaagttatcaacttcgtgtcatgtgtcgtaacctgcttgtctttactaggataccatgcttgtcatcatgagaataccatgctttgcgtttccttccagcttaccaccatatgctttaaactatgatatcccgcttactaaggataccatgattgacaacttgccattaactgtctcatattagctttcctggtctccggcgctaggtacttctgctattcgctgcaagggtcaaccattctaactatacattatgcttcccaagagaaccaacttatcccacttgacatgctttgacgtcttcccgaatgactttgctgctggacttgttattgtctgatcgtgatcctgccagatttgaagcttcgttgttagatgtgattttgatctgacctctatagattatcttcaaacatatcacttgttccataactgggaatagctctcacggacaagcaactcggattcactttctttacatttggttcacttcccactattctcttcatgttgtcctcagttagcattcaacgtattcctttacacctttgaccttgatgtgttctttcccgatttctcttatcaatcacctttcgacctacttctttgcctggtaataaacatctttttcgatatcttctatcaatcaccttttgacctttgtcaactaagtactcttcactccgagagttgtggatgcttctggtgacgatgtggtacttgagcctgctgcctttcagagaaaccttcaagtggttcgtcaaaagctagactggcggttgttgcctttgatccaaagaggacacatctgaaactctcagtccaaacaaaagtctctttgactttttaatccaacacagtttaattggttttcttttccatcaacaggttggttattaactcgagattagtatatgattcctctgaaatgagaccctaggtctcctttatcagtgagcaattatacacataatcacatatccgcatcttccaaaagaatcctagtagaacttgtctgtattacacatttctcccttattacatgaatactaagcactgcctaaaaggaaaggtgcttgacattggtacattgtttctgctatgggttctgattaacacgaggcctcacgggtacggcgcttgctccagtgaccacaatatgattgggaggtctgcttcgtgtaaattggcagtaatgtggaggtcgactttgccttggttgcaggcagtccctcgagtaatgccctggttctttgcaattgtagcaaatcaacgtcttctttgctgagctatccgtctggggacgatcattctgacttggagttggaattggtggctggaaatccttgctaacattggcatcagtggtaccatagttgctatcaccatcggagtctttctcagagtcacaattgctagggttgtcattttgggtgccatcattgatactatcgtcgacatcttagtgaatgatgttgacattgcacgcttgattcgagtggtcactaatggggcaagaagcatggttgttggtggtatcatcatcatcattagtattgctaatgttgttgtctgcattgtgtccatcttcttggggcggaaactcttgatgcgcaacagaagatccggtgatctgaagtggctcagtgcgctgtctttggttaccacatggaaatactgggattctgacaatccttctcttacagttcttcatccgattatgctcactttcgagttgtatggctttgtccacaagtttctcaaaatcttcataatcctctaggagtagttgcactgcaagctcatcttttaacccctggagaaacttctcttgtgtgtcttcatccgtctccacatcttctggtgcatagtgagccaaacgatagaactcgtgcaggtactctgtgacggtcaaatctccttgcttcaggtagcgaaactctcgttttctcagtgtgatcattcctgcgggaacatgtgatctcttgaatacagatgaaaactcgtcccaggtgatggtatgtccttctggccgtgatgcttcatagctatcccaccactctgaagccggcccaaccagctgaggagttgcgaagccaacccgctcctg

SEQ ID NO: 10397 - DNA, 4562 bp, Oryza sativa
agaccggtccttatacggccgaggtgctactatcaaaaccatgcaccccgagtccagcctaaaaccattttgaggattttgaatagagggggaggtgtgaatccaattccacaataatccatccattccatagtgtccaggtgatgagaatatcccaaagtctagagttgtaaaaccacctaatgttgcctaattaaccagcgaagcacctacctaaaatcatactagtggtaccatgagaagagtgtccactagttggggttctgtttattatagggtgaacaaggaaataataacaataacaataataaggtcataacaaaggtaaataggcatggctagataaaacagtgataacgcgggaatttaaataaagcgataatgcaataatttaaatcaacataattttataaactaggattcaatatgttcaaggatggtgtgacttgccttactcgctttcccaaacatcggcttcaacctccacgaagagcggatcttctgaagctgcagcgtctacacaaccaacggaaaagaaatgggcttttactctaataaactccatataacaagtaggaacaaagcacaaaaatgggttcttgacttcttaaggaaaaattagagacttgaacggtccaattccgagttcaaatggccaagttatggccatttgaagtttatatgctctttaaatgaatatttacgaatttcttcatttaaattctaatttaaaaaaaaatggatttattgcgtcagccggggagagggcgcgcggaccgggtccacgggagtgggacccacgcggcagtctcacggtccacggtggaccgggtgcacccggctcacaccggccggcgccgtgggccccacgcgtcagccgcacctgacggcgcgggcggctgacggccgggccccacgcggcagccgctaggcgtgcccggaggcggccacaccggtgcggccggcgggaggcggcacgcccgcgcccctatggtcgccggcggcggccataggaacggcggagcggcgcccgagagaggggagggaaagggggaaacgaagcggcggtccacggctcaccccgggtcgacggcgacgacggaaacggcgaccggagcggaggaaggcggcagcgcggctagggtggttggggtcgacggtgctccggcggtcggcgaccgaaacggagaggtggacgaggtcggcgaggatgcggcgaagccgaaggaggcggcgccgaggtgggaggtggtccggggcgacaacggcggcggaccggagctcggcggcgacggcggagagagagagtgacggcgcgagctcgattccggcggggagagagggcggctagtggcggaaacggtggtggggagctcggggagggtttatatagggttgggagtgagagagggcggccggaggagggggaaatgggcgcgggagacccggccgccattaatggcgccggcgaggttaggggaacggttttcaaaccaatccgagggagagagggagggaaaaatggggggaaagggagagggaatcacggggaataattccccccactttattgcgcgcggggacggcgggaggcggcgggattcgcggtggcggcggcgctaggcgcgggcgaggcggcgggagcggcgggaggaaggggatgacgggtgggccccacccgtcagcgagagtggcgggcgggcccgcccgtcagcggcgcgcgtgcggggagaggccggatgggccgcggggagaggagagggagggggagggagatgggccgagccggcccaagaaggagagggagggaaaggggactttttagagtttttgtttttataaaatcattttaactttgtttatttcttaataattattatttgtgctctgaaaattccactaaaatttatttacgcattttaggcttttaggaaatatacaaaaatcctctaagccttaattgacttttaactttgcacattttaattgttggaggctttcacacggtttttaattattctaggcatatcttagaggatgtattttagagtcgttttgagacgtgacagcagaagtggccgatgtgggaacaaagtcgtccattaatggtcaatgaaaacaccagtcggcggtgatgacggcagctggtagtgaaggtgtagatgcccaacaacggtggtgtgaccaaccaaccgtataggcgaggtcaccagtcggcggcgatggaggcaagccgacagtgaagtcgttgacgcccaacaacggcagcataataggccagccgtgtaggcggagataccagtcggcgatagatgagacggccggtcggtgaagacgtagacgcccatcaacggcagcataacaggccagccgtgtagacggagacaccagtcggcggcggcgaaggcaaccgcagccatcggcgaaggctgatcccggtgagatgtcctagctgactgccaacatgaataggcagccatgccgaatatatagatgaacatactgtagatagcttgatgtactgcattgttcctcagaaaattgcatggcatcgagtttggcccaattgatctgaacaaagatgaaaccaccaaagagggcgaaaactctgcctctgtgtgcacgtcgtcaaggccgtggtaagtgcagatcatcgtggcaaacaaaaactgcaaaaagtccggcagccgtgaccggcgctcggaaagctatgcatgtgtgattgttgattaagccttgcacgcacgtgagatggaggcgactggcggcgacttctgtggtgctgatgtggaggccccctggtcaactgaatgcatatatatatgcatcttagatagataaatcacttgactaatcaaattccttcctgattacttgatatgttacgtgcaattgctgatgacgtggcagctcgatagacaatgtcttcgagtattgctgatcagggaaatagcacggcgacgactgctctgattagttgcatccctgtgcaggctgactccgatttccgatcaaggaaagaaatctgcggcagctgagattggatccatcgaggtcaccgagattaatccttctgacaagattggatccgagatggagaagaaaagcttggcgaagtcatcggcaggcaagtccggggctcccaaagcggaaagcctatcctggagcgaagacgataccagcgacgtcgaagattggttccatcgcactcgtcgacggaaaactcggcgccacccctacctgacgcgccaactgtcaaaacatgaattcggcctaaaagtggatggatgcggagacaaaggatttagactggttcaggccctctcaataagaggtaataccctactcctatttggggatttgaatccgccgggtgtagtatagatctgacgatcatatgtgctcatgccccctagaggacctcctgcccaccttatataagatgggggacaggattacaagatagaaaccttaaccaatacggtatcgatttcctaaatctattttacaataatattaaattaggactttaggccgcttcataatataaaaggaaacgtaatacccaagtcatgatctgttacatattccatagatataagctaatcccctatgactagttggataaccatgccgtgtgggtatggggtacccataatctccacagataggttgaaggagaaaactgtcagtgagatagccccaaacttgataaactgatcaccaaaaagactatcaggtaatgtacagtggttcaagccttggacaatagaaaatggggcctttaacagtacaagtgattgttgagtatcttcgggtctgggacttggtcaagggggttgatgaggaactagatcctgatcttccgataggtattgataactcccgatttggtggaaacttaatgtcacgcccagaaatttagtcaaattttcggactattttgcgtataaattcttgtctaggaatcaagccagtgtacacaaaacgacaaattaatatatagatccaaatgtaaataaagcataaatacttactaaagtggtaccgaaaagaaagcagcagcaacggaaaaaggcgatgctagcggggcttttgctccactccgcaggcaaaactcagctagggtgtgagccttggtcctcgacaccttgctctatcctagaacacaacatgctcacaaaggttccatttttgcaaaaatatctcgattccgtaacaaatattagtcaccaccttctcaaacacaaagtataggcaccggacggagaaaacctcaaataggtcctgatgggttgccaaagtcagacttatcatggagtcaatctcggtctttacttgtcgtgcacggatgaaccaaaagtgcaaccgatccaatcgacacaactctcgtcctcttcctgcttccttacgtgcaatacaaaactgcaaaagcatatggcataaaccctagcaaccaagcaaatctaaatccgctcgatgaaaacttgtacaaaccataaaaacggaaactcgacgatgattagattcatttttcaaggtccccggcaacaaccaacgag

SEQ ID NO: 10398 - DNA, 7456 bp, Oryza sativa
aatccgtgtgattcgctcatgggattccaaaattaaagtaggggaaattaatccccattgaatcctcttcaatcccccccaatttcccccttgaatggtgcccccaatcgccgggaacgcccgcgtcttcctcggccgccctccattgccgccggccgtggttcccgccgccgttcccgctcctcccgtggccggctctctcccccatcctataaaatgggatcctcatcccccgttcactcgttttagccccctcccgagcctccccgtggtccctctccacctccccgtcgccctcctctctctcccacgctgccggccgcctccagccgcctgtgccgcctcgaccgtgcgccggccggccgcgccgtcgcctcctccagcgtcgccgccacctcctccaccccggcttgccctccgtttcccgcggagacccccggagctgcctccccgccgtcgcccttctcgtttctccgcgccggccgcctccagtcgcctctcccgcctcgcccgtgcgccgtccggtcgcgccgtcttctccctcggcctcgcagccacctcctctccctcggtcagccctccgtttcgcggggaaagcaccggagacgcgtcctcgccggtgtccagtggcgtcgccaccacctctccgtctccggccggctgctgttcgtcgccggtacgccgaccgacgtcgccgtctcctccgttgacgtcgcagcgtcgccctccaccccggctgctcctcggtttcgccggaacaccgtcgcccgcgccggcttctccttcctcctcggcggcatctcctccggctgcccctttcgccatgcccgtgcgtcagccggcgctgccgtcccctccctcggcacggtgacgtagccctccacctcgtccacccctcggtttcgcccggaagccgccgcacatcgccgcgaatctctccatccgcctcgccggagttgttcggccgcccgttcctcctctcccgtgcaccggtcggccacacctccaccacctccggcatcgcagcggcaaagccgtcctcggcatcgtttcccctccatccaaacccctccgcggtccatcatcgtcgtctccgatcgttctcgtcgtcgacgtcccgtcggtcgcccggctcgtcgtctcgcggcgccgcctccgtcatcgtcatcgcagcggcgtgttccacgccgtcctcgtctccgtgcagccgctgccggctgccctcgtcgcctcctcgccggccccggtcgtcgccgtcgtcgtcctctcgtcgttcccggtcgtcgtggcgttcgtccctccgtcaagccgttcttgtccgtcgtccgcgtccgtcaagtgtgtcgctgcagcccccgtcctcgtcttcgtcctcgcctccgcgtcgtcaagccccgtgccggccgcgtctcgccttcgtccaaggatcgccgccgaagtcgttccctcgccgtccgtctccgccgcgccagttcgtcgttgtcgttccctcgcctcgtcgcgtggtggtaaggttccctctccctcgctgccccgtcctcgtcctttcggtgtcgcccgtgcccgttgtgcggttgtcggccccggtacccgtgtatcggtgtcggcagtcgttcgcttgtgcgtgtggtgaccgtgttagtgtgtccgctcggtagccgcgtggtttccacgtgtgcaacccgtgtggtgtctagtggagtccgtttgtcggccactcgcctcggttgacacacggggtccgcttccgtcgacccgtggaccgtctctgtgtacccggtctaccgcggtcctttaggttgacatgtggggtccgcatgtcaacggcgcagccttcctgtctttccaggctagcgcttacgcatgttttataattgcaaagcttaattataataatccgcaaatctctatataacagcattaaacttcggatgatcatatcttggtcatacgagctccgaatcgacccgttcaagtctcttaatgtttgttataacctaaagaactgtgtgctttctttttatgtgttgttattgcttctttataggcttgtagctttgcttgtgtgcttcgcgtagctttcgtcgttccggaggttccagaagcatggttcgcggtcgtcgccaaaggttcggaaggccgttctctctgagcaaggcaagtcacatcatcgttgagcatattgaatcccagtttataaaattattttgatttaaattaatgcattaccgctttatttaaattcccgcgttatcactgttttatttagccatgcctatttacctttgttaagacattattattgctattgttattattaccttgttcaccctagaataaataaaaccccaactagtgggtactctattcatggttccactagtatgaatttaggtagatgcttcgctgattaattaggcaacattaggtggttttataactttagactttgggaattctcatatcatttggacattatggaattgttggattatggtggaattggacatacccctctcttcctctttcaaagcccctaaaacctgtttttcggtggggtttgggtgcatgccagttgtgggaagtagcaccccggccactataaggtttaagctcgggcctctgttgcaaagcactaccgtacttccacatgtctagtgggtaaggcgtagtttgtggctcagtctggttataaacaaaagtacacggattagagatggacgaagtcgggggtcgatggacatctctaggacaaatgaaggctacacgagctgcggcccggtagtcgagatgtcatggcacagggccggtgtcctgctgctgggggctcagtcctgcctacctgtcccgggggttccggccgtaggtggggttgggtcggtactcttgtttatggctaggatgggttgggaactatgtcacgtcttccgtccgtataccgtggtggtatgcggcacgtggttacacgtgaggaagatgtgtcttgtgggtaaagatgtacacctctgatcagagtataatctattcgaatagccgcgccctcggttatgggcaagccgagcaatgtacccaagttagtgttttaattcttaaaatttgctcaacaactaaaatgtggaatggttggcctgggttggcttgggacgagctgggacccagggtcgggttgccagttcggtctgaatcatcgtaggccttgggttaaggcaggttcgtgggggttcacggccttgattaataatactgtgtagctctaggatcgtctttataaaatggctttgggcaactaagtgacttttaaatgctgtttactgcaaaacttaatccctacattatgatccccttgcactcccttgcattaattgtgcatttccggtgtggcttgctgagtactgtgattgtactcattcttgctcaatctttcccctcttcagtaagagaagctttggagaagatgtcttaggtggagtcctggcttataccccagttgagcgcctgtgaagatggagccgtaggcccgctagtccgctgctgtttatttttgattgtcaggcctgaagcgcctttgtaataatgtaaatattatcgatataataaagatgtgtcttttatatcatgtttgtatggtgtaccccggcttttcctgggacggggattaatacactagcgttcgggaaaatgcaattttctcggtagcgacaagctggtatcagagccatctcgactgtaggataagccaagtggataaaacctaaggacatattttataaataaaactatttgcgaaagttccttttttctccttcccctaatgctatttgcaaaaggtttactcccttcttccttcttcggatttcaactagtactagatggtcaggtcagtgaagaagaagacatcgtcagttgtttgccgaagctccggaagactgcaagatccgctagcgaagtggaggaagcagtgaagccagctgtgaagcagtgaagatcttggagaacccgtcgcagaacctaagccaccctctagggtagagtcgttagtcgtgtgttccttgcttgtgtgtgtagtgcgtggtttgcatcggtgggttgtgatgtgaccatgctaggttgtttgtttaatcaacttgcagaataagtgaaacaaacaacacatcagcaagaagagttagttcctttaaggtcctgtccctagttctggtctattcttccctggcttgtttcctctctcacctcaatccctgtgacagatgtttaacagagaaaaaggaaagaatgtcagcaggtatgcctccagtaactcaagttttcaactcaatccaccactggcctcaagagagttaacaagggcacacccttggtccattccaagcatgctgctgagttcacagctaccattggttggaagtccagaccaaaatcagtatgtgtttgatcgagcatttgccacccaggtcgatgagcttccaatgccagaagaggatgtccccttttgtcacgattgtagagagcaaggacactatgccctgaattgtccatgggtatatgccaaagaagccccttcctttggtttagcagggcagacatcgctaaaccagcctcctcgcaccaagtcaagcttgcagcctagtgtacaaaggagagagcctaatggagagaatccattgaatcccgggaattgctctcctcctagcttttcgtaccacgtggggtcacatactaagcaagccaaaggccagaagagtaagaatcagaagagaaaagcaccgatgcgaactgaagaagaagtacgtaagatgactattaccagcaccgaatggcctccagcaaggataactatccctacacgtcaaagaggaaatgcctttcgaggtgcccgtcagttgacccagcaccttctaatccatggtggcagagtatctgatagtgaagggtcagatcaggtctcctcgcatgatgaagatgagtctccccgacatgtctgagaggaagagacggaatcaaaggcatgcccccgatgtggagaaattggacacgttgctagcatgtgtatcacactttgcactcattgtgaagaagaccatccaccaggggagtgtcccacccgcaaggtcacatgttttctatgcgaaggtacaaaccatgtgcccaaggattgccaactcagtgtgttgttgaccaagaccgcagaaatccaacgaacaaccctacgattgtctcatcagctagtcagctccaacagcaatatcgacgatatcatccacagcaccaatgctcctcctgctgcacttgactctgcaataaatcatagcaataataccttcagcaccaaccattctcggcaccgacagcctcagcaatgaattgtcgtcgatggaagaagttgtttctctccccgacctactccaggccgagcgaagggaaatcaacctcaggagggtgataccaagcagaagaccgttatccacttcaaccagcaatcagaaggaatttttctcctgtgaatgatagcaatatgcagtcctatcacatcatcacagaaccaatcaaggatgatgcagtaactagaacaatgccatctatatctctccagaatcagaatgagtaaccatgtttgtgattttcagttcgctacttatcactgtaatcgaaagtttgcagcaatcatgtaataaataaatatattcatgtctataaacagtgagcttgctatgtttatggatgattcatgttgaggatgcaatgtaccgatgttaagcaccttccctttttgtttaaggtagggccttgtattcatgtaataagggagaaatgtgtaataaaaacaagttctatgaggactctttcggaagatgctgatatgggattatgtgtataattgtttactgtcaaaggagacctagggtctcattttagaggaactatgttctaacctcgagttaataaccaacctgaggatggaaaagaaaatcaagtgattaaccaaagagacatttgtttggactaagagtttcagatgtgtctttttcggatcaaaggcaaagacggtcagtacagcttttggcgaaacactccaaggtttcactgaaaggcagcagacaaaaggaccacatcgtcaccagaagcatccacaactctcggagtgaagagtacttggttgacaaagttcaaaaggtgattgatagaagataccagcaaaggtgtttattatcgggcaaagaagtaggtcgaaaggtgattgatacgagaaatctgaaaagaatacatcagggttgaatgtgtaaaggaatactttgaatgctaaatgatgacaacatgaagagaatagtgggaagtaaactgaatgtaaagaaagtgaatccgagctgtctgttcgtgggagctattcccagttatgaaccaagtgatatgttcgaagatagtctgtagaggtcagattaaaatcacatctaacaacgaagcttcagatttggcaggatcacgatcagaccataacaagtccagcagtaaagtcatttggggagacgtcaaagcatgtcaagtgggataagttggttctttttagaaacataattcaaaggcaaagttaccgacccttgcatcgaatagcagaagtagctagcacccggagaccaggaaagctaatatgaggcagttaggggcaagttgccaaacatgatatcctagtaatgacaagctgatatcgacgcataacgtgaagtgggtaacttgtatgaggttgacgccaaagatatgaattatgagaagttctggaactgaagtcccatcttcaagtgccacaatccaatcgaagtcagctagaggtgcaaccagggaaaagtcaggtgaagagaagattccatctgcaacaggagattgagccaagcagtccagagtggagaagttttgctaggcaagtttgttataaaagatgcgacggaagaagtcggacaagaagagaagaccgcccaacctatcttcttgctagcctcctcgaatctcggggacgagattcctgtaaggggggtggatttgtcacgtcctgataaattcatcccgaaataaaaatcattcgctaaaaggaataatagaattaattaaaatgcgaaaagaaattggcaaacactaaaatacgtgcaagaaaaattcaaaggtggcccggagaatttttgttaaattctccttggtctaaaatgagccctcaaattttacttgaattttcagagcaccagaaatatttattaaacaacaacaacaattaacaaagtttattaaaaagaaaaaacctaaaaataatctctcttcctcctttgggccaagcccagcccgaagtctccctttcctccctctctttctctccctctccttctctccctccttctcttgggcccctcttcccctcccggcccactgcctccccctcctctctctcccgggccgtttcctccccccctcctct

SEQ ID NO: 10399 - DNA, 4071 bp, Oryza sativa
atgatataaaagaacacatctttattatatcgataatatttacattattacaaaggcgcttcaggcctggcaatcaaaaataaacagcagcggactagcgggcctacggctccatcttcacaggcgctcaactggggtataagccaggactccacctaagacttcttctccaaagcttctcttactgaagaggggaaagattgagcaagaatgagtacaaccacagtactcagcaagccacaccggagatgcataattaatgcaagggggtacaaggggataataatatagggattaagttttgcagaaaacagcattcaaaagccacttagttgcccaagccattttataaagacgatcctagagttacacagtgttattaaacaaggccgtgaaccgtcacgaacctgccttaacccaaggcctacgatgattcagaccgaactggcaacccgaccctgggtcccagctcgtcccaagccaacccaggccaaccattccacattttagttgttgagcagattttaagaattaaaacactaacttgggtacattgctcggcttgcccataaccgagggcgcggctattcgaataggttatactctgatcagaggtgtacatctttacccacaagacacatcttcctcacgtgtaaccacgtgccacataccaccacggcatatggacggaagacatgacatagtttccaacccatcctagccatagacaagagtaccgacccaaccccacctacggccggaacctccgggacaggtaggcaggattgagcccctagcagcaggacaccagccctgtgccatgacatctcgactaccgggccgcagctcgtgtagccttcatttgtcctagagatgtccatcgacccccgacttcgtccatctccatccgtgtacttttgtttataaccagactgagccacaaactaagccttacccactagacatgtggaagtacggtagtgctttgcaacagaggcccgagcttaatccttatattggccggggtgctacttcccacaactggcatgcacccaaaccccaccggaaaacaggttttaggggttttgaaagaggaagagaggggtatgtccaattccaccataatccaacaattccataatgtccaaatgatatgagaattcccaatgtctaaagttataaaaccacctaatgttgtcctattaatcagcgaagcatctaccctaattcatactagtggaaccatgaatagagtacccactagttggggttttattttcctagggtgaacaaggtaataataacaatagcaataataatgtcttaacaaaggtaaataggcatggctaaataaaacagtgataacgcgggtatttaaataaagcggtactgcattaatttaaatcaaaataattttataaactgggattcaatatgctcaaggatgatgtgacttgccttgctcagagagaacggccttccgaaccttcggcgacgaccacgaaccacgcttcgggaacctccggaacgacgaaagctacgcgaagcacacaagcaaagctaccagcctataaagaagcaataacaatacataaaaaggaagcacacagttctttaggttataacaaacattaggagacttgaacgggtcgattcagagttcgtatgaccaagatatgatcatccgaagtttaatgctgttatatggagatttgcggattattgtaattaagctttgcaactataaaacaggtggaagcgctagcctggaaaagacaggaaggctgcgctgttgacatgcggaccccacatgtcaacctaaaggaccgcggtagaccaggtacacagagacggtccacgggtcgacagaagcggaccccgtgtgtcaaccgaggcgagtggccgacaaacggactccactagacaccacacgggcagcacacgtggaaaccacgcggctaccgagcgggcacactaacacggtcaccacacgcacacaaggacgactaccgacaccggtacacgggtaccggggccgacaaccgcacaacgagcacgggcgacaccgaaaggacgaggacggggcagcgagggagagggatccttaccaccacgcgacgaggcgtgggaacgacaacgatgaacgggcgcggcggaggcggccgggaactacggagacgaacggcgaggggacgacttcggcggcgatccttggacgaaggcgagacgcggccggcacgaggcttgacgacgcggagccgaggacgaagacgacgacggggctgcagcgacctagacgaaacaccgaggacggacgagggcggctcgacggagggacgaacgccacaacgaccgggaacgacgagaggacgacgacggcgacgaccggggccggcgaggaggcgacgagggcagccggcagcggcagcacggagacgaggacggcgtggaacacgccgctgcgatgacgatgacggcggcggcgccgcgagacgacgagccggcgaggatgaacggtgaaggcgacgacggacaccggcggtgttcggtcggaggggaggcgaggccgaggacgacgttgcggctgcgatgccgaagatggtggaggtgtggccgaccggtgcacgggcgaggagggacgggcggccgaacaactccggcgaggcggatggagaggctcgcggcgatgtgcggcggcttccgggcgaatccgaggggtggacgaggtggagggctacgtcaccgtgccgaggggggggggacggcagcgccggctgatgcacgggcgcggcggaagggggctgccggaggagacgtcgacgaggaggaaggagaggccggcgcgggcgacggtgttccggcgaaattcgggcgaggaggaggtgatgccggggatgagggcggtgtcgcggagccgagggaggtggtggcgacgtcgatcggcgctcaggcagggagacagaggcggctggaggcggccggcgtggaggaaagggaagggcgacggcgggaacgcagctccgggggtctccgcgggaaacggagggcaagccggggaaggggaggcagctgcgatgctggaggaggcgacggcgcgaccggaccacgctccggcgaggagggagaggcggctggaggcggccggcggcacgggagagagaggaggacggcggggagagggctagggaccacaggagatcgcgggagggggctaaaacgatagaacggagcgagggggttgcattttatagcggagggaagcgagccgagcacgggagagggcggaacggcgacgggaatggcggccggcggccatggttggtggccgggaaaagcgcggccgttcccgacgattgggggcgccattcaagggggaaattggggggaattgaagaggattcaatggggattaaaaccccccaattaatttggaaagaacggttggattcggggcggatttgggggagcaatggcgctaggtttcccggagagggagaggaggctgagcgggaggaggaagaagacgacggccggcctggcacgtgggccccacgcggggcgcgcggcgtcagcgcgcgtgcgacgcgcgtgcacgcgagaaggaggggcggctcgggcagggggcggcttgggcctggcggccggcccaggaagagaggagggagaggcggcccgggggagagagggaggaggagggagtgggccgggagggggaggagaggcccgggagagagaggggaaagagagggaggagagggagacttcgggctgggcttggcccaaaggaggaagaggatttatttttaagtttttctttttaataaactttgataattgtttttgttgtttaataattatttccggtgctctgaaaattcaagtaaaatttgagggctctttttagaccaaggagaatttaacaaaaattctccgggccacattcgaatttttcttgtacgtattttagtgtttgccaatttcttttcgaattttaattaattctattattcctttttagaaaatgatttttactttgggatgaatttatccggacgtgacaataggcacggc

SEQ ID NO: 10400 - DNA, 5175 bp, Oryza sativa
gctccggcggtcggcgaccgaaacggagaggtggacgaggtcggcgagaatgcggtgaagccgaagaagtcggcgccgaggtgggaggtggtccggggcgacaacggcggtggaccggagctcggcggcgacagcggagagagagagcgacggcgcgagctcgactccggcggggagagagggcggcgagtggcggaaacggtggtggggagctcggggagggtttatatagggttgggagtgagagagggcggccggaggagggggaaatgggcgcgggagacccggccgccattaatggcgccggcgaggttaggggaacggtttccaaacgaatccgagggagagagggagggaaaaatggggggaaagggagagggaatcacggggaataattccccccactttattgcgcgcggggacggcgggacgcggcgggattcgcagtggcggcggcgctaggcgcgggcgaggcggcgggagcggcgggaggaaggggatgacgggtaggccccacccgtcagcgagtgtggcgggcgggcccgcccgtcagcggcgcgcgcgcggggagaggctttcacacggtttttaattattctaggcatatcttagaggatgtattttagagtcgttttgggacgtgacaaacctaccccccttaaacggaatctcgaccccgagattcggaagaactggcaaaaagatcgggatgggctgccttcagctcgtcttcacgctcccaagtagcttcttcctcagcgtggttgctctattggaccttgcaaaaacggattactcggttcctggtcctgcgctccatggtgtccaggattttcactggcctctccatgtaggtcaagtcttcgcgaacttcaatttgctctgggtcggcctgctcggacggcactcgaagacatttcttgagttgcgacacatgaaacacatcatgcacgttgcccaaggaagcgggcagctccaactggtaagcaacttctccgcgtcgagcaatgatacggaaaggacccacaaaccgaggtgcgagcttccctttcgtctgaaacctgtgtacacaaaatcgtccactgcgaattccagattacggcgtcggttatctgcataactcttctgccaggactgtgccacctttagattatccgaatggttctaaccttcgcttcagcttctctcaagatatcggtcccgaacacttggctttccccaacttggtcccacaatagcggtgtccgacatttgcgtccatacaacgcttcatagggtgccatttgtatgctggcttggtagctgttattgtaggagaactcggcgtaagggagactcttatcccaggtcttcccgaaatctaggacacatgcgcgaagcatatcttctaggatccgatttagacgctcagtctgcccatctgtctgcgggtgatatgcggtgctgaaatttaatcgggttcccaactcttcttggagtttcttccagaaatgagaggtgaactggcttccccgatcagatacaattttcttggggacgccatgcagacttacgatcctagcgaagtagagtttagctagtttgttccccccgtatgtggtctttactggaatgaaccgggctaccttggttagtcgatccacgactacccatatagaatcatatccgccttgggtttttggaagtccggtgataaaatccatcccaatttcatcccatttccattctggcacttgtagaggttggaggagtccggccggtcgttggtgcttggctttgatgcactggcacacatcacaaagggccactaactctgcaatttcccgtttcatactaacccaccaatatttctctttcaagtccaagtacatcttcgtgctgccagggtggatggaatagggactttcatgagcttcctgaagtatcaactgttttagttccctatcatctggaacgcagacccgatttccgttccatagggttccgtgttcatcctctgtgaaaccagcggctttaccctgtttcatgttcttgaggagcccatgcatatccggatcattcttctgagcctcgcggatttgatcgagcaaggtaggcttggcttccaacgtagccaagaatccacgaccaactatgcttagattcagggcttccatctgttgattaagttccggtggaatgccacggacgccaagagtgttgcaatggcttttttgacttagagcgtcggcgaccacgttggccttaccaggatgatagtgaattcccacatcgtaatccttgatgagttctaaccatcttctctgccgaagattcagatccgactgagtgaagatgtatttcaaactcttatgatcagtatatatttcacagcgattcccaatgagatagtgccgccagatttttagagcatgaaccacagcggctaactccaaatcatgggtagggtaattgccttcatggggccgtagctggcgtgaggcataagctaccacatgaccttcctgcatgagcacgcaccccaatccttggcgcgaagcgtcacaatacaccatgaaatccttgcgagtatccggtaagattaacaccggcgaggaaactagcttttctttgagagtttggaacgctttctcgcattgcgggctccacacaaatttctcttctttcttcaacaactgtgtcatgggtcgagcgattttggagaagttctcgatgaacctccggtagtatcctgccaaacccaagaaactgcgaatttgagtgactgtcttgggttgcttccaatcagtgacggcggtcactgtttcggggtccacagcgactcctttggcagatatcacgtgccctaagaacttgacttcggacaaccagaactcacacttgctaagcttggcatacaattgatgttcccgcagttttcccaacaccagacagagatgcttctgatggtcttcctctgattgtgagtacaccaggatgtcgtcaatgaagaccacaacgaacttatccaagtattccatgaacactttgttcattaagttcatgaagaaggcaggagcattggtcagaccgaacgacatcaccgtgaattcatacagtccataacgcgtggtgaacgcggtcttcgggatatcttcttcacgaatacgcaattggtgatatccggagcgaagatcaatcttggagaatacagtggcacctttaagctgatcgaacagatcatcgatccggggaagagggtacttgtttttgatggtaacttcattgagagctctgtagtcaacgcacatcctcttcgtcttgtctttcttctccacaaaaatcataggagcaccccagggggaagtactcggccgtatataccccttttctttcaactcttccaactgtttcttgacttcggccagttcatttgatgccatacggtagggtcgcttgtactggggagtggttcctggagcaagatctatccggaactcaatctctcgcttgggcggcataccgggtagttcttccggaaacacgtctctgaactctctggcgatggggatttccgacagtcctatctgatgaagttctgaactaccaacagaggttgggggtgcaaagaaaacaaccggttgttccggccctcggtacagagtgacagtgcgtcttgcacaatccactactccttggaattgagccaaccaatttatcccaaggatcacatccaagttcttggtgtctagaagaatcagatccgagggaaatggaattccctgaatttctataggaacggcagggctataataattcgttgtcataacccctccaggggtggtgatgagtagagggttcctaagcctttctacccccaactgatttctccccacgaatggcacagatataaatgagtgggaagctccagagtcgaacaaaatggtagcagggatggaatgaatgaggaacgtaccaacgatgacgtctggagttgtcagcacgtcctcggccgtcacgtggttcacacgaccccgaatgacatccttaccaccgttgctggagcggggaggcgcttggccttgctggcgcctcagctttgggcatttatccgcaaagtgcccaggctcgaagcagttgaagcacagacgctgctgaccttgaacgtccctgcggccttggccaggctgcacggctggcgtagggggacggggcgcacgagtcccttgctgactctgctgttgctgcgtctgtgggacgcgcaccacgaattgaggtcggggcgcggagcgaggttgctgctgctgttgctgctacgaggaggatcccctggatagggattggtgtagcggaccctttggttagccccctgttggttgccgaaattcgccaagcgacgcttgtgcgactctagttccttgtgcttggcttccaagcggatgctcttgtccaccagacgttggaaatccggatagtccccggagaccagacgcacagacagctcagggtccattcctgccaagaacttctcttgcatctcctcatcttcccgtacctcctccggggcgtaccgggccaggttgttaaactcatgcaaatactccatcacggagcggttgccttgcttcaactctcagaattcccttttcttaagggccatgactccggcaggcacatgggttctccggaaagcggcggtgaagtgggcccaagtaataggctgcccctctggctgcgtagcctggaaatggtcccaccatagagatgcgggcccctgcagttggtgggcggcgaagatgactttctcctcattgctgcactgcacggtgtctaactttttccccacggcatgcaaccaatccaacgcatccacggggttattggagctagagaaggtgggcggacggatgcggaggaactcggcgagtttagagtgttgtgggggtggtggtggagcattatgttgtggcggattttggatgtggtggaggaaagcagccatcatgttggtctgctgggcgaggatttgggtaaggatggcgttggtgtctggtggtggtggtggaggcggaggaggaggtggaggtgggctgccatggttgttgtggttgctaccttcgggttggttgccatcaccggtattagcattcctcctggttgtcaccatctgaaataccccaaaacaaaccagccaac

SEQ ID NO: 10401 - DNA, 45405 bp, Oryza sativa
atgcgacttgccttgctcgctttcccaaacgtcggcttcaacttccacgaaaagcggatcttccgaagctacagcgtctacacgaccaacggaaaagaaaaggcttttactctaataaactccatataacaagcaggaacaaagcacaaaaatgggttcttgacttcttaaggaaaaattagagacttgaatggtccaattccgaattcaaatggccaagttatggccatttgaagtttatatgctctttaaattaatatttgtaaatttcctcatttaaattttaatttaaaaaaaagtttattgcgtcagccgaggggagggggcgcgcggaccgggtccacgggggtgggacccacgaggcagcctcacggtcgacggtggaccgggtgcacccgggctcacaccggccggcgccgtgggtcccacgcgtcagccgcacctaagggtgcgggcggctgatggccgggccccacgcggcagccactcggcgcgcccgagggcggcctagccggcgcagccggcgggaggcggcgcgcctgcgccccgatggtcgccgccggcgaccactagcgcggcggagcggcggccgagagaggggaagggaagggggaaaagaagcggcggtccccggctcactctaggtcgacggcgacgacgaaaaaggcggccggagcggaggaaggcggcggtgcggctcgggtcgacggggtcgacggcgctccaccggtcgacgagcgaaacggaggggtggacgaggtcggcgagagccgaagaaggcggcgccgaggtgggaggtggtccagggcgacgacggcggcggaccggtgctcggcggcgacggcggagagagagagcgacggcgcgagctcgattccggcgaggaggaagggcggcgagaggcggaaacgaacggaggaggtgcggggagggtttatatagggttggaaggggggagagggcggccggaggggaaggaaaccggcgcggcgctctcgggctccatcaatggcgccggcgggattaggggagggtttccaaacgaatccaagggagagagggagggaaaattggggggaaagggggagggaatcacggggaataattcccccctattgattgtacgcggggaggacggcggcggcgctagggcgcgggcgaggcggcgggagcggcgggaggaaggggatgacgggtgggccccacccgtcagcgagggtggcgggcgggcccgcccgtcagcggcgctcgtgcggggagaggccggatgggccgcggggagaggagagggagggggagggagatgggccgagccggcccaagagagagagggaggggaaggggactttttagagtttttctttttataaaatcattttaactttgtttatttcttaataattattatttgtgctctgaaaattccactaaaatttatttacgcattttaggcttttaggaaatatacaaaaatcctccaagccttatttgacttttaactttgcacattttatttgttggaggctttcacacggattttaattattctaggcataatttagaggatgtattttagagtcgttttgggacgcgacaatcgccgcctcgagccgtgccgctgccgcgccacgcgccgtcccgtcgcctcacgtcgtgcgcccaccgcctcgcgccccgcgccgctgccacgtgctgcgccgccttgcgccccgagccgcgccgcaccgtcgccatctccgccagcgcgccacgcgccgtcacatcaccgccgttgcctcacccccccaccgcccttcccttctcttccctctcccccttatcctctctttcccctataaaagcccaccattctcccctctccccactccatcccctcctcctctcccttttccctccccttctccacgcgtcgccgtcgtcgtgctgccgcgccgccgccttcgagccgccgcgccgccgccacgaagccgctacgctgtgccgcgccgtgcgccgtcgtcgccgccaccgccgtcggtgagccgctgccccccccccctgtttgtcgccgtgccgccggatagagagagagccgagagagagggaggaagggagaagccgagggagagaaagaagaaggaaggaggagagaaaccgggagggagagagagaaggaaaaagaaaagaaaagagagagagaaagaaaaaagaaaagaaaaagaaaggaaggaaaaagaaaaagaagggaagaaaaagaaaaggaaaataaataggaaattagagggagattagggaagtttagaaaatttaaaaaaattagaatttagttatagattagttatagtcatagaattgcgtaatttaatataaattatggattattcttggtaatttctacaagaaatcaattcgcggtagtagtttaaatgtaattaagaactaaacgattagatgaattcttatagactattatagattatgttgggtaatctctataagtaatcgattcacggtagaaattcggatttaatgactatgaattttagacgtatattatatttagtcgtttagtcctagactaaaattaaatcgtataatattataagataattttaggattccgtccgatatttagcttgcgatagaaatttccaacctattatatggatataatgctcgggtagattaaattaaaaacttatgatgacaaaatatttatacccgcaaaatagtttaggatatataaatcgaaattgggtttgccctagttcgcgaatagtaaagttaatataaaagaatcgactttcgcgttcgacttccatttggatttatttggatttttatttgaattttaaccgaattcaaatcaattttcgcacgtaactatagagcccgagggagttgcggatccaagtgaaggctaggacccgcaagactttgagcaaggcaagtcatcactattcttgaacatattgatcccaattgcgaaattgttttgtttacaaataaaattgcatgcaaagatgaacatcctacttgcgattatgccatgccttgattattgtttaccccttattccttcataaccatgtttacgtatgagtccctagtcaactatgacaaatgcttagaaatgctattctagaatcatgcatactcatatttgtcaaatgttatatgcttgggcaattacctttgggaaggtaattgagatgcggcatgtggagacatgagcgccacattgccatgatattgaggacatgatttgtgaaaggagaaataaactaaataactgttttcgactggggcggacggaggatttgggtggtatctggaaaaggctagtaccgtccccggtcaattaaggaccgagccatgaagttaagcatgaaacgacccccgtacaaccgcacttctcgtatgggtatagacctagcagagtagatagccgagcggaggcagtatccctgcatagatggttcacccctgagtgaggcaggtgcgctacggtgggacagccgttgaggtagggccgagaggcgtgccctacatcggtgtcaccattggtaggactgccatgagtgtgtgagagagagaacttaacttgaaccataatttaatatgtgtgcgagacttctctttcctgggagcgccagaactcctctcactgctagaaacatggatgcctagagtgcatgaggatttaagttcacggagcgggtactgccaattcgaggttatcaaaaggctttgccgtggcgcgtctcatgtgttgggacgaggctcatgtgttgggcagtcacgaagtgcgggtaaagtgtacatccactgcagtgtgagtaaaccaaatctattcgaacagccgtgctcgcggttattgagcaccgggacatgtattacacttggctatactctaaattcttaacctgtgtgggatgggatattgcatgttgatttttatgctgatggagccacttcctgagaggagggaaggtagacgtcctcagaaaaacatgaggactcaatggcgggaagctatccttgggatcacaatggatggtggacagaaccgtcgttgtttaatgtgaacactggtattaaaacttgatcagtctatgctaagtcttaggtttgtgaaaagaattacaaaactggcttagcgcaaaagagccatagccatcctttgaaatacccctttcatatgcattgttgctgtggtggcttgctgagtacagttggtactcacccttgcaaatataaaattaatcagaaacgggagatgaagcttcggaggatccctatgcctactaccaggagggagatgaagacgatggcgctcagtaggtcttagtacggtcgttgcctgtggcaatggcatgccgctgcctgaattccgctgccttatctattgctgcattttggatgtattccggaccgctcggtccgatgatttaagacaatgcctgcgggcttatgatgtaataattagcactagactctcgtgtatgtgcttttggtatttcagctatgaactcgtgtgtacaagactacttgatccagggaaatggtactgtttacacgaatgattcctattataaaaacgggggtccacacctggactataggaatctcttccaaagtcatttggttcagacttgaccttaaagactcagaagacaatgcatgaacagttacaactcgaccatcattgctggtgagaattacttttctgttggcgcagtctatcacacctttatatctggctaaccagtccatccctaggataacatcaaggtctttggcttctaacagaataagattggcaagaaatggtactccttgaatttctattctgacagaggggctatgttgcaaagagagtgcttgattactcggggtactaaccatcaaaggacgtctaagatcttctacttccatcccatgatttcccgcaaaactcatagataagaatgaatgtgtagcaccagaatcgaaaagcactgttgcaggaactgagttaacaaggaacgtacccaaaatcacatctggagcaccttgagcttctgcagcagcaacatgattgacacgagcctttgatgctggtgcggtagagttgctttgggcagggacaaccttcacgcgtcggggctttggacgcttgtcagagtaatggcctggttcaccacagttgaagcacaccccgggcttgctgccttgctccctcttggcaggctgttgctgtgtcaaagctgcaacaaggcgtggagcttgattgcggatgttgttgcccgtgttgttgttgaagaactgacgctggggacgaacaacagacgaagaacctccctgtgacattgactgaggtcccaaagtaagatgcggcctctgactattcccctgttgtgccttgaagtgagcaatccggcatttcttctgctccatgcggttgtacttgtcctcctggtgaatagccttatccactaacttctggaaatcatgataatccccagtcatgagtgggtaagaaagctcatcattaagtccttccaagaacctctcctggcgctcttcatcagtgcgcacatcttccggagcataacgagcctgacgattgatctcgtgcagatactcggtgaccgtgcgagatccctggatgagcgacctgaattccttcttcttgagagacaccactcccgatggtatatgcatctttcggaaagcagcggtgaaatcaagccaagtgataggttcagcaatagtcctgttaaggcggaagtgatcccaccactcagaggcagggccatgcagttggtgtgatgcaaatgagaccttctcctgatcagtgcactggagcaaatccaacttcttctctatggcatccagccaatcaccagcttcaacaggattagtggtgctagagaaagtgggcggcctcacacgaagaaattctgctaacttgttctggggaggtgcatggttatttccctggttctgctggttctggagttgctgcatcatcatgttcataagctgtgcctgttgagctaggacttgggcaagcgtgggattctctccattgttgttgttgttgatgatgttgggaccattcccgttgctgcgagtgagcaccatctggcatgggcaggatcacaagaagagaaaccgaggaaaaactacttaggacagagaattaatctttctactaacttaacttttattgatcttaactgagtttcattattacagaactgaagactctcacaccactaaactcaccaactacctaacactcgaaagcaaacaaacacatgcgcttacatcccaccactgatgtaaatcacatgcgagacacacacaaccaaacttaaaacaagcaaactaacacaacgatcaaagacaatggcttgacaaggcattctaggtcttccgggcatcggagttgattgaaggctcgttcggttcgtctccatcatcttgagttgctccccactcgatcttggaatgggtgcgcttggattcttctttatcatcattacttacattgacgaccggaggatccgctagggctggggtaacttctttctccaccacacgaacctttggcgccaattggtagcgagggacgaatagagctctcttccttgcggtaagacgaaccctggccttctgcggtggtgcttctcccttcaacgcggctagttccttctccaaatgatccaccttgtcctctagcttgcaaatcttaccacgattctggtcttcacgatcttgagctgctaacacagtctccgcgcgggtctcatccatagctcacagcatctcaaccaaatgccttgtggtagcatcattctcaatccccacagtctcaaggtaactgccacggtcacttccctggggttggcgaggatggtagcgatactcagtgtcggccaactgatcactgtagcgatcgcggagctctcctatggccatccttgccacctcctgacatgcatgaatgtagtttcctcctccagcttcgaacatcactgatgggatatcttcactattactgttcatggtgactttgactcggcacttctcttcatcacgatcatgaggaatctgggcatacaaaggggcagtcccaaatcctatggcaaaggacatcgtatgcaactcctggacaaatccctcaacaccaaacaagtactcaggcttgaagcgcggcatcaaaagacaagtgaaaggagggagttaagacattttatccaattaatagcacaagtttttggattaatttgaataaagttagaaaatcaaagtaaaaggtaagtaaataaagtaaaccaagcttgcaagataagttgaaacagttggaaacaagatcacaaattttgcacttttgaacaacaggcttcaaaagaaataaaataaaagaaagttataaaatcaacacgctaagtttatttcattgcagcaagattaaataaaacaatgttgtaaaacttttgctggtaaatgagccattagtacagtaatagatgtacagtactaataacattggaataaattttgaatgagaaccactaaaagagattatgaaatgcatgtgctattagtttggtttaattaaaagagaaagggaggagaacagttctacttttccaatatttttagagggcttctatgggtaaccatttggcataacctagggtcaaggaggctctgataccaacttgtcacgcccggaatttctatccaaaattccaaacgcttacatgtgtgtgaaccatcgtccaggaatcagccgaggcacacaataacaaattgataatagagtacaattactactctaattaataagtgaataaaatgtcattacagaggtagatagttcctctcaatcaataaagatctaagcagcggaaaaataagataaacggcgcagacgactccactccacaggcagcttgaccagggctacacctaatcctccacaccatcagcatccctgtagaactcctcctctgatgaatgattgcaaggtgagtatatgacatactcagcaagccacgcagcaaatatgcaagtgcacaggataacaaaggatggcatagtagggtttcatttgcataaacagcatttaataaacatttcagaatttaataaaacagttaagtaataattaaacaatattaacccaacgctttacaacataccctgttgcataggcccaaccattctgaacaaccatcccggctgcacagttctatctccaaactaggaattaaccattccaaaccaggagctaatcaaattattaccagttatagcatcttttattatgatgagaagtgtgagactaatcacgaaagacattgttagacccgcccttaaccgcaggcacggctattcgaatagttttactctggccagacgtgtaccactgtacccacaagacacagccccacaacatgtcaccatgtgcctcaataccagcacggtacctcggaaagaagctgtgacagtacccctcgcacaacacaatccaccacagtgcaccgttcctggatcataatcacccccttataaacaaggcatggactccccagcgacccccgtgggcttatctccgccacttctcagtctggtgctccgcaatgaaccatgctatacaaaaggtaaagccattgcccacgctggcttgtggttggcatggttaatgtttcacaaccgaaactcgtgaaccggtccttaattatcatgagcacgaccatcaaaaccatgtgctcacaacccaccattatcaagttttagttggcaatttaattaattaaccaatcacgattgaccatcgtgagctatcattaagccatcattaaataatagtgaattataagttatcccaatagtgtgctaaagtttctaagcatggctaagcaatcatatctaatatcaagctgaaccaatatataaagctcaactagtcacatgctaatttattttaaaatgattaaaataaatatattgtgctaacacatgctaatttattgtgtaaatagatacatacacacacacatatatatatatatatatatatatatatttatctattagtttattatattaaagaggtgaacatgcaatataaactatacacagtcaagctcggccaggctcggtagaagctcgagctcggctcggtaaagctcgcaagcttttgcttaggcttgggttcagctcgtttggtgctcgggccaagctcaaatcgagcctaggatgagccaagctcgagctgctcgcgagcctcgagcttttctgatagccctaattctgattgtatctgttgtgttattagttgaatctgagatggtatctattattaggtttgaatctgagatggtatgaaaaattggattgaatttggtgggctcaaatttaatgggcccgtttagtgggctttgaactgatagttcgttaaaaatatgggccagttttgaattgggcctagttctaaaatgaacctattttaaaatgggctagttctaaaaaataatgggccgctgttaaataattaatggaccaatgtaaaaaattaatgggctgttaaaaaattaatgggtcgtcaaaaaaataatgggacgtttgaaaatatttgctgacgttagctgctacgtcatcagtgacacgtcatcacacatgtgtcaacgaccacgtcacctgccatgttggccgccacgtggcaaccatatgtgacgtaaggtcgggcctggctggactacacgagcccaaaaacgttttatgacggttaaaaaacgtcatagattgtactaatccgtgacaatttcggagaaaacatcggcagatttaatctgtgacgctcaatagatgatggtaagtagaattgtcacagacaaatttctgtgacgaattttcagtgatccatgatgaatttttttgtcatagataaaatagattcttgaagtgaaaaataacgattcgaaaaccggcatgtttagactttatcaagccctagatcgattgattgatacaggtaacaatctggatctttattgcatacagttgaacaaggctccaaaggggatttctttacataaaataataggggaatttacaagcttgtggctaactaatccaactgaagctatagagggactcaacatgaatgttttacttagacttaaaccatctaactaatctagacttgagaactaggttgaaatgagactaacttatatgattgaactcccggcttcggcaagaatatcaaattgactctgaaaaggaggggttgaagcaagagttgtactcagcaagctattatattgagtaatgaatgcatgaaataatagtaattgagtagggctatattaagttgtagaaagcagagaatgtagaagaagaaagcctgtgatgtttgaaatgtgtcagtatttaataaaatcttgaattaggtttctaaccaagatgccatagtgagtcccaatgcccgataacaacgagcacggctattcgaatagttttagggatactcatactgcagtagatgtgcgcttgccaaacacattagccttgtcatgacaaagcttttcggtttctaacatcagtggtacctgttccatgtactctagtgtaacgccccgatttttgttcaggattaaaaatcattaaataatgcattttttaggaattaaatcaaagttaaagcaatttaatcatgtgacattattgagggaattaaaaattttcctttaaaaatcatggccgaggatattttgtaacattctttgtgccctgatatattctctggaatttccctctaatttttggatttcatttaatcaattaaataaaaagaaaacaaataaaatttcccctctttgtctttgggccactcccggcccaatccccctccttttcccctttttccacttcagccatgcctccctcctcccttctcctcttgggccggcccctctccctcgtcccgctcggcctccttcccctagagtcttttttgcctccgtctcccgtctcctctctctttccctcgccgacaggtggacccgtggccccacctgtcagccccatccccaacctccagccgccatggcatccaccccacatcgccaccaatcccgcgccaccctacccacctcctccacttcgcgcggccgcacccgaccgtgggacctcgtcgcccactttccgtcctctcctcccccactccttcccgcaaaatcggcgccgaagcaccgccacttcgccgaagtcagtgcttcaccccgtcgccggtgccccgcctctccccaccactgtcgtgccctccccgaccctataaatgccgccctcgacctcctccctcctttttcccctatttcccgagctcaccatgcccctactgtggtccccacgctgaactgagtgccgccgctctccggagccctccaaccatgtgccgccaccgctcccgccgtcgccgtgctgcgccactgccaccgctagcttcaccgcgtggtgccgcaccccggcctcagctccgtttccctattccatcaccagaaccaccaccccattgccaacccgaaccaccaccgtaattcgccgcctccagccgcccaccaccaccgcttcaaccgacgccgcggctcgccgcttgcgccattggcttcgcggttgcaagagcaaggccggccgccacctcgtttgcccagtctactgacggaaacacctctttcgccatcgaccgaaggccgccgccgcgtttgtcgcctccggcagcactgtgtcgcctctccggtcgactccgcaccatgtcgccgcctccttcggcttcacgggagcgagggccagctcggcgtccacctcttttagccagaaacctgctagagctccctcaccctctctcgtcggtaagctccgccactcttcaccgtccttggcattgtttcctcgctgctccgatcatccatttccctccctaatgcctccaatcgattccccaggtcctgtcagctctcggccgcccctcctccttcaccaagagcctcctaatcgccgttgtcgtcatcttgctctgcaccggccgccacttctggtgaggactcctactccctcctccttttcctcttcgctggccgtgccgcgccgccgctttcccgcgtgcgctgccgccgctcgtgagcaccgccgccctctagccgctcgccgccgtcctgcgtcgccggctgccaccgccgcatcgccgtttggtcagcccgggcggcgagccggcctctgcttcgctgtggcctcctgatccccttcaggctgatccgggccatccacgtggcgtccgccgtggccgcccgtggccccgccgcgtcggcaccacatcggcgccacctcgtcttgccttgccaccgtggccgccatgtggccgtccacgtggtgcgcccacgtctatgttgcggtggaccgagtccaccgtgggttgcgcttcttgcgcagctgactcgtggggcccgcccgtcagcaccaccctttgatgatgtcaacaacgacccttttcctttgtaaaaataattattaattgcgtcataattcggatttaattatagaaattaatttaaatggctcaaaacttaaaaaattcataactaattcataagaactccaaattgagccattcaagttgcaaaattaatctaaaattgagctctacatgtttgtttactatttatgtattgtttacttggtttttattagagtttttcctcattttgcgtggcagcgtgtagtttcattcgtttcggaagatcgcggtcggaaggatcagagttcagaagattgttttgaagaagcaaggcaagtcacacatccccccttgaacatattgagcctactctacaaacgttttaccgtttgtaaataaatatgcatgttttgctaattacatgggaatagggtttacctatctactcgcttgtgccatattacttgatatctgtcctttgcgaaccttggatgataaatcgactagcttgtgttatttgtgttaacccaggtagaattatttatgcttagccatgcttaattaccactaaaattaagtggccatgtttcattggtcgtaattatccaattaaaatgcgactgagtggtgccttgtggatgcatggttttactagtcgcacccatggcaattaatgactggttcgcgggatgcagtggaagatttaccgcgcttaccacaagcgggaatgggtaactgcttgatttgaagtatagctttcctctggttgacgtaccctggctagggtgggcgtgatggagtttggatgggccctgcgacggcctttgcggcttccggatcgaccgtggtacgaggggggctgcccgttgcctgctggggacgggggcgaaacctgtggtttggtgcgattggttagaggtggttatatgaagggtcttgtcacaatcactcgacatggtgacgtgtccggccaggcgcggtgacatgccggtggattgtgtcttgtgggtacagttgtgcacctctagccagagtaaaacaattcgaatagccatgcctgcggttttgggcaatcgaccagaatcaccgtgattaatctcaccaaataaatcgatccaatgcactgtgtggttcaggtgggatggttgggcctgtacaacgtgctgtagcgttgttcagtagagatttaatattatcttaattaaccaactgctttactgttttgctcaataaaatgctttacaacttcctttatgcaaattgccacaaacctctctttgtatccccttgcacaagtgcatcatttgtgtggcttgctgagtacggtagttgtactcagccttgctatttctcccttttttagaagtgtagtacttctgagctgaagtcgaagttagtagaccaaggcttagaccccagttgagttttgcctgtggagtggagctaaagtcccgctaggatcgccttttccgcggctgtcgttctctttcggtgtgaggactaagcgcctcttatgtaagtatatatgctttatttacgtatctatctgtatattaatttatcattttgtgtgccctggctgattcctggacagggatttaattcctcgaggacgagctgctcaaaaagaggggagtaatgtcatgggctttaggccgggcgtcctaggcccattggataggcttagggtttgttaggattagattaagtggccctccatctatagaaggagggatcctatcgtaggtcaattaggcattagatcaagatttaatttagtgcccatcggcctgccttctcagtgcgacggagagcgtcccgccgtttaggtttacgactgttccttgtcatttcatctactataatccaatctatccccactcatcacgattcttctccacataatccttgctcgtgacatgttcctttctttttttatttaattatttagtctaagtaagttatatttccatctttgcaggttcattgtttagtatttatactaagtgctctagtactaggactccggatagagaaggaagttcttgcgcaagtattagagtagtaattaataacttaggcgtggtgtctaggttagagattacctgtgtttgttgtgtatcccacggatttgtcagaggtaggcggcaggtggtgacagccctgaattccgtcctagtaatcctccactgtcacgtcctgataaattcatcccgaaataaaaatcattccctaaaaggaataatagaattaattaaaattcgaaaagaaattgacaaacactaaaatacgtgccagaaaaattcgaatgtggtccggagaatttttgttaaattctccttggtctaaaaggagcccttaaattttacttgaattttcagagcaccgaaaatatttattaaacaacaacaacaattaacaaagtttattaaaaagaaaaagctaaaaataatccccctcctctctttgggccaagtctggcccaaagtctccctctctccccctcggcccgcagtccaagtccctctcccctccctttgtttttctctctttcctcccgggcagcccactccctcctcctccttcctcccggcctgcctcggcccagcagcccggcccaagccaggccgagccgagccagccgcgtgcacgcgcgccgcgcgtgcgctgattgcgcgcgctgaccgcgtggggcccacgcgccggtcgtcttcctcctcccacacggcctcctctctctcccgtgaaaaccctagttcgttcctccctcgaatccacgggatttaagcgttggattccaaaattaattggggggaattaatcccctttccttcctctcccttttccccctaatctcccctttaatcgtgcactattttgaccggaacggctgccgttccccgctcctcccgtgctcggctcgcttccctccgctacaaaacggaaccccctcgctccgttctctcgttttagccccctcccgcgccctccccgtggctgcaccacctctccccgcctcctccttctctttcctcagtgccggccaccctccagccgcccctaccgccttgcccgagcgccggtcggccgtgccggtgccttctccagcgtcgcagccgcctcctctgcaccggcctgccctctgttgcccatggagacctccggaagtgcatccccgccggcaacagtggcgttaccgccactgttctgtcttcggccggctactgttcatcaccaatacgccgaccgacgtcgccatctcctccgtcgacgtcgcagccgcctcctctcccccggtcagccctccgtttcgcggggaaaccaccggagacacgtcctcgccggtaaaacagtggcgttgccgccactgtaccgcctccagccgcctgtgccgccttgccggtgcagcggctgtcgtcatcgccatcctccctcgacgtcgccgcgtcgccctccaccctggcctgccctcggtttcgccggaacgccgtcgcccgcgtcggtctcgccctccgcctcgccggagttccttcggcaaccccttccgccgtgcctgtgcgccggccgacgtcgccatctcctcctccggcatcgcagcgtcaaggttgccctcggcctcgcctcccctccatctgaaccccgccggtgttcgttatcgtcgtctccgttcgtcctcgttgacgactcctccggtcggtcgttcgtcctcgccggctcgtcgtctcgctgcgctgccaccctcgtcatcatcgtagcggcgtgttccgcgccgtcctcatctccgtgcagctgctgccggctgccctcatcgcctcctcgccggttcctgtcgtcgtcctctcgtcgttcccggtcatcgtggcgttcgtccctccgtcaagccgttctcatccgtcgtccgcgtccgtcaagtgtgccgctgcagccccgtcgtcgtcttcgtcctcgcctccgcgtcgccaagcattgcaccggccgcgtctcaccttcgtccaaggatcgccgccgaagtcgtcccctcgcctttcgtctccgtcattcccggccgtctccgccgcgcccgttcatcgttgtcgttccctcgcctcgtcgtgtggtggtaaggatctctccttcgctgccccgtcctcgtcctttcggtgtcgcctgtgcccgttgtgcggttgtcgaccccggtacccagctcatcagaagggatcaataataatggggtacacaactgaggaggtggctggttgaatgctgtatagattacgtgaaggacgccacacccattgttataacccccgttgtacatgagggtcggttacttgggaagtggaccgtaggcaagaaaaggttctatgataacgactacaaagctgtagcggaagcttttagcagcgtgccgcaacaactagccatcctcgagccatacattgagggacacatgaacgagataagagcatgcaaccctagaagaccggcgacttggatctcaaaggaacataagcgcaaatttcctgaatggttgaaggaaaaaacatgtcgttcggtgaatcgcttgcacaggttggcaactggcccaagtagcctcatgaactcatggcaatggtacgacatcggcggatatacgttttatatgataggcaagaacaagaaaagcgcagctcataatagtggagttcgtgtggaggtgttggacgcaataggcgagaagaagtcatactatggatagagaaaatcccttatatacccctgaaattttacctaatcccttctatacccctgaattttgcttacttccttgtatacccccaaaatttgattttgatcccttgcatacccctcccatcagttgaccgttagttgaccgtctattttccataaaaatgaccattttacccttggatgaacaaagaaattcatgaattacattattaaaaatataaaagcttctcgcatgagactattatagttatgagtttgttgtgcgatgcattatttatcccaaaaatatttttagatcatgaaataaaaaacacgtatttatttttttaaaaaaagtcataaaaatgaggagcattcatataaagataggactaccaatgttcacaacattttttttatgaatgttcccgataaaaaaatccattgtcctattaaaatttgaaataaaaattttaatttattacatttattttattttcaaaatttatgtcaaaattttctgcactaattatttagtttcattagtcttataaaatgcacatactgtgcacccaaacaaaattttttcaattgttttttaagcttatatttaaacctaaagcatctagggcaaaaaggatatttgcaaccaaacgtaacagtgaaatgatggaaaatgtaacggtaggggcatggaagggatcaaattgaattttcaggggtatagaagggattgggtaaatttcaggggtatgaaagggattgagtgagttttcaggggtacacagggaatttactcctatggataatagaagacatttgggagcttgactatggcattaacatgcaggtcccggtgctatgatgccagtgagtcaaagacacaacaggcgtatccatcgattactacacccttacggttgtggaacgtagtaaactaagccacaaggatgatccatgcgttctcgctgaatatgttggacaggttttctatgtgaaggacccatccaacgagcggatggacattactgtagtgggaaagcaacacattattggcatcgataacactaaagacgtgtcagattacaaccaatatgacgacgtcccattattcacagatattcctaaccagatcaagcgaattgagacaacccttgacgaagagaagttttcgtctgtgcggaaggatggtgctgcgaaaattgtgaaacattagtatatatatatatatatatatatatatgttgttgtgtacaacctgttttgaaaacgattaatgtatccaacttatagccccttcaaacgattaatgtataaaacttatggttccatgtttatctgtactatatgtcgttctcaatttatatggttgaataattaagatgtggtttgatcaatatacaagtgatttaattagatgcgattgaaattcatttgtggttaaataattatatttctatggttgaataatttgttggcattaatcatatggatgaataattatattgattaattaattaagttgtggtttattaactataaccctatttagttatagttaaagaattatagttaaacaatttatgggtttaattaactataactatatttaatttgtggttgaataattatattgattaattaactatatttagatgggatttattaatttatctgcatttatttttgcgtgcgggtggcttaagccgcccgcacggaataatatcatcccgtgcaggctacttaaaccgcccgcacaggaatatcgatttcccgcaggcgataatatggttacataagcaccgggcgggcgggcgaaattaccaccgacgctgcccagttgtttgccgccgccgccgccgcctcctcgcggagccccaaacgccgccggtggcctcctcgcctcaccagcctccacctctgccgccggctcctctcctcctcgcccttcatgctggcgacgtcctctccggccaccgccgctgcctcctcctctactcctctcctcctccatcaagatctgggccgctgccgcctcctctcctcctcgccctcacgccggcctccccgacctccgccgcggccgtcgtcctcccgaaacaaccagcctccccgacctctgccgccgccgacctcctccccaagccgctggccttaccgacctctgccgccggccacctccttcccaagcagccggcttccccaaaatccgccgccggccacctccaccccaagccgctagcggtaagcgtgttttaggttttttgtgaaaatttgtgatatgtgcaatttgtgatatgtgaaatttgggacttagggtgatatttgtgaaatgacaatttgtcaattttgtgcgatgtcaatttttattaaaaaatgtagatgcaatttttttatatgtcaattttgtgatttttgggacttaggatatgtggtatatatgtattttttttttataattattcatttatatatggatttagttcctaggttattaaatcatcacagaatatgaggtgctctaggtgccatattggtttcgtcgagttagtgcattgacggagccaaccaagacaccttgggacgccgaggatcatattatgtcttttataggaaatatatatgtttacggttttttaggggtttagtgcaagtatgaaattgggctcgaataatttatatgtaactttacaattctaaaacacacacaaaaaaagggttaaagtgcgtagatatttctaaacggctagcatgattaattgagttacaattattacaaagatagaaatagatttatctaatatttttaaacaacttctatataaaaaatttcacattaagtattttaaaattttgttaacataaatcggggtaaaaccaaagagtggggcagcggtcgttacatgggctacaacgactagtacaatgcagaactattagttgctacttccttactagctagacctcacttcaccatgtttgttctgacaataggtataggtgcaactgtacaagctagtgcaataagcatggtccgcatgcctgcatgtccctgcattatatccatctacataatccaaggaagcaaatttgtataggtgataatatatatgcacgagatatgcatacacatattatattatcatcgatcagagagctagcacttagatatttttatactggaatttaattagtttattctttacatcactcagctgatagtacatatccgatcacaatcacatgcggcgagatcactctacgtaccattcgaatattgacctatcacgtgccgaccgactgataaactaatgaaccgaattgtacgcttagtacaccattagtcgattaccccacaaaattagtctatcatccatctaataaatacctataaaaatgaaaaatccttggctcaaatttattatccatacacaacaataaactagcataccttcaattgaatgcatataaattaatttatgcatatattcatgcattcgtttttcaacttaaaatttttaataacacctatatatctgaaaaattctaagagctagaagcacattacatacaagaaccaatacaagcctaaaatcccacattgggaggcctaaaatttggggaaaaaaaaagaagtttttagggttactctccaatctctaaatttgaccaattaaatcgaaaaaaaagaggaatggtgtagtatatactgctcttcaacttccatgagaggatttgaggaggagaggtataggtgctacttccttactagctagatcacctcacttcaccatgcttgttctgacaataggtataggtgcaactgtacaagctagtgcaataagcatggtccgaatgcctgaatgtttctgcattatatccatccaaggaagcaaatttgtataggttataatatttatgcacgagatatgcatacacagattatattatcatctatcagagagctagcacttagatatttttataatataatttaattagtctattctttacatcactcagctgatagtacttatccgatcacaatcacatgcagcgagatcactctacgtaccattcgatcattgacctatcacgtgccgaccgactctgataaactgacgaacctaattgtatggtttgtacaccattagtgtatcatcccacaaaattagtctatcatccatataataaatacctatgaaaatgaaaaatccatggctcaaatctattatcaatacacaccaataaactaacacataccttcaattgaatgcctataaattaatttatgcatatattcatgcattcatttttcaacttaaaattttgaataacacctatatatctgaaaaattctaagagcttgaagcaagttacatacaagaaccaatacaagcctaaaatcccacattgggaggcctaaaatttggggggaaaacaaagtttttagggttactctctgatctctaaatacaagagaggaagggcgccaatcaggttgatgccaaaaagggtctattccagcaattattttatggaggggtctacttaattatcctctacctcaactctggtcatcactgaccagctcatgagctatactgtattctggcttctcaagtccttgccagtaattttcgcatgtggtcctctttagaccttgccagtaatttaacatttttttgctggcgaggacttaagacgttcgccagtaaatataggagcggcttaaaaaaattggatcacaaccaacgagcgcaccttgcccctcccacaccctaactgctcgacctctcagcccctcacccgtctcagctctctccctcaccttttccacttccctttccaccacagcccctccactctcttcctagtctggccgaaggggcggaagctggcggcggctgcacttcctttccctccctgtccttgatctagttggagggaaggagggtgtcagtggcatcgactagatgcagctaattaggtgtaacctcaactatgtgattagatgaacaaactaaacatatagtcaaagagcaaataaatcaaccagccgagtggttttattaaaaaaaattaaagcatatgtgatgtcaaatctgacttaacaatactcatagtcactcatacaaaatatcaaataggtgttgccactataggtaacggaagtgattaaaccggtacctatagtgcttttcccaccttcataaaatgaaaaaaaaaaaactaacacctttaaacgaagataggtgacagttttacagaaaaactggcacctatattttaggtgtcggttcacctataattaattataagtgccggtttttaaaaaaaccgaaaccgataaaatcgagccgaaccagccaggggagatatttttcctccagatggggcccacacccacactggcaggagataaggccgagcccttctcccgccttctcctctctctctctctgcagcagcggtgggagaggtagcgacgcttcttctctctctgtgtctctctctctctgcggcagcggcgggagaggtagcgacgccctcccgtcaactagatcggggggaggggaggtgcagcggcggcggacgacatggaggcggcggcccggaccccccctccccccgccagatcgagcgagagaagaggtgtagcggtggtggcgggttggacctcgcctccgccagatccggtggcgtggaggcagcaagtttacactaacttcactcagacaatcacacaatagcatcatatatgaatagaaaccatctagaagtcatatccataaagcactgtagaaatcccacgaaaataatccgaaactaactcctacctggagtctgctaatctgaccgttgggcaacccggttagaccagtccaacaccactggtctgaccggcagtccccgcctagtctgaccagccaccaagagccgactaccgaaaacactattcaccgtattttcacaaagcactcacttttgacaattgttcatcaccacgattaaatcatcacatgattctacacatatctagagagaggaggcaagagaaggcaataatatatgttggtaaggacatagctacagtgacagaaagtgatgctgaactccatcggtatcgttagatttgtgctgatgtatatgtttcttttttcacaacagcttagtgccgttttcttttgatatgtcctccacgtgtgttgttgctgtcaagtggccatcgacttaaatttgctagtgtatgaaataatcactgctagtatacaacattaactggcagcagtactattatcgattggatacatccgattctaaaatttgggtgttgtaaacagctatacccataggttagcctaatgtgtagtagtgacattttttttagtaaaatttttaacagccacctagctaccaggccagtactactagctatagatgctactaaggcagaagatgtcatgtgattaagcttctatttctcatcacgttcaccacatgggcagcaaaagttttgcatgaaatgggatcagttgcagtcaacagaacacggtacacactcggtcttctatatttcgctggacgatagcaggtaagtatgtaccaagccatctatatacatgtgtcatgcaataaagtagcttggtctctaaacaaacaaatatagagaacatatcatcaatataactattgtgaattaaaataacataatcatctctatcatgcgggtgcagcttgggcatgatgttggcttcaactataaatagacgcgtcgcactctccaatcagatgcacaaccacaagaccaaggaagcagtagcctttcagccctcttgctttagtttgttgatccccgactaaatctcattggaaaacaagctagaaaacatggaaggagtgaagagtttgatcatgtgtatgctagtgctaggcttagtcctgcaacaagagaagatccaggtggaagcaaagagttgttgcccatccaccacagcaagaaacgtctataactcatgccgtttcgcgggtggctcaagagacacctgtgctaaactttctggctgcaaaattgttgatgggaattgcaagcctccttacgttcaccatacccttcaccctgaagctggtaaattagaaacattaactctccttatctatatttctatcttgcattcaccacgcccttcaccccagctaacctaggcaaattaaaacatattaactctctttgtgtaaacttttgggctattaattttgtaatatctattggtacaagcatttattcatgcatatacatgattttgcagaggaatcggaggtacttgacttctgcaagctgggatgtgcttcgtctgtgtgcagcaccatgagcactcgtaagcaagaaaaaacatcatattaaattaccattgattttcaaccaaaaaaataaagattctttgttgtatatagctaatgtatagattgaatcatttgttttccttttcagtttctagcaatgaagaagcgaattatgccgtcgatcgttgcaacgatgcatgccaccgcttctgtaccaaggaagctgagactgtcaccgttgtttcctaagcaagtgcaacatgcaagcataagggcttcacacatcgaagcccatggaaggctatgccactctggagtactcattaataaaacggatatcatgatatccaagccagtgtgccatcgatcgatctatcttgatttctgtcactctttattttcaataagctatgataatcacgatctaccatcatatattatcttttcttgaggatgggagcatacgtagagtgatgatatcattgcctaataaataaatctttatcccttttgttaaaattttataatgcatgctacatatatcggaactgaggtggcaatgaatatacatgatcaattgagctggatagtccattacaggttttatacacatatacatggtgaagaaaataaattattttccttccttaattaaaaggatacttgaccaaaacacaatgaatgattaattattataaattgacctcatgaacagatggttaaacacacagttaataacgcataatgacttacttctcatctcttctatatgcttgaggaccatccaaaatattcaaatgttttcttggcgacaacacaatgagctcaacaattaccaggtaaccatatttatattcgccatcagaacttacagattcaacctggcaacctcttgtttattatatgcctaaggcctccttgggcattataaaactattacacctacaaacctgcaatgaacttacacctgtatttagatatacacctaatgttgctcagtacaagccaagttgatggaagtactgatgcttattaccttgaagaacaatatatacagtcattgtttaattgttttttgtactgcttgtttgggtaagcgcttatcaatcgtggtgggcagctggtaggtattttgctataacctcaaaattaggaattagggatggggtcgatgtatattcagcctgactgacttcgtcccgactccgagcaacactataacaagatgatggcagggatgtgactgccatcgagctacacgaaagatgagcagaaactactatgagagatgttggggtggggggctttgcagaaaaaaaaaagaaacaggccggaacttcatgcgaacaaagatgaagaattttaaaatcctcattaaaagactattgaagctaaaaattgagcaaattgtcaaaccaaatatcgttggtcttgcttttgggctgttaacaaatatgcaaaagaggtttgttattcctattatatgttttgatgaagagctagctgcaagtaattgctaactccctgccttgtgaggtgaaggacttcccttgatcttatttggttctccctttgacagtaaagaagccttctaaagcggactttctatcccttactgacagagttgctgatgaactccctttgtggaaggcctcactcataaacagtgccagtcgcttagttacggtgaaagcagtgctctcaactatacaagaggtaaccaaacctatagacaagagaaggagcttcttatgctcagagcaagagaaggccaatggtggcaattgtttggtcgattggaatagagtgtgccgactgtttacacccaaatttgacacctatggacaaaatagaggaaaattgccaatgtttggaaagtgctgggtttcctttacagggccggtcagaccatgggtatatgggctgtctgaccgactagtagggccggtctgaccgcaggtatgtgtgcagtcaaaccgtcatggtccaagtctgagtctgttttcgttgggcctcgggtttccttgctcgggaagactatgtttcgtgtttcctttggtcactatcccgagttgaacgtggagaagggcctgtacagggcaagaccaactcctatttaagggacaaggccggttcattgtaaacccccgaatacaatatatttgaatttttcttttaccatgttttctattttaacctaggtttagtccatctttgtcgatttgcgtcgtaaatcatccgccaccgctgcgacagtgcgacacctctatgtaggtttgtcctgaaaaccttccgttttgcccacgagatgggcagttatccccatatcgatctaaatcggcctagaggctgattttgatctctaaatcgaccccgctagtcggtttagctgtttttcgacaaaacccatcttgatttggctgtttgactagatcgaggtggttgacgactccatatcaccaggcgtttaggtgttgcaatcgtgcttgtcgacttatcacaaaaagttgccaacgcgatttttggtgactccattggagaacgatctaatcggccatatcacggtcgaatttcgtttaatctagtaatttctgtttcgtcaaatcgagagtttcggctaaacagccgaaatcaatctatctatctactgccactgtacatatctattgatcattgtgttgattgattcagatcggtgacattgttcttgtactaccgatctggccgcttattttgccggtctaaccgacatatttagtccggtcagaccggagaagtggagcagtagcatggccggcagcttctcagctgtacacggccaagagatcagaaacttaatccaattcggtttgtacgtgttaaaaaaaatcaggctatacaaagtcgatttaatcaataggcaaaactgaattggtttctgttagtacatacattagcacatctaccgaggaaaattacaaaaaatcaaagccgattcatattcggctgttctgtcaaaaattccaaatatttgctaggcctacacggttgattaccaaatagatcaaatatttttgataagtacagtaccatatcaagaaaaatcacgatcgtatattaatttattcggtcaaatatttcggttatgagctatgtggcccaaattaatcaaggaatttcttcatcaaccatggcgagcgggaacgagatcgacatggtcacattggacgatcttgatgagggagcacgcaaggccatataggaacatctcaaggcgtatagccaggagatattgatgaagacgtgcactaggacccgtcaaggtgtggttctcaagcctggttctctttacaaacccgtatttgacgataaggtaacctccaattcgcctgatccatgtcttgccattctaaaacatattgatcattgtatagatgcatcttttagtgcttattttgataaaaatatggtagaagatgcttgtaaaacttattctagtaagaaaattggctctaaaatagccagttgtcaacaatatcatgctacttctacttttgcgtctacacaacatattcataatactatggatggatcagcgggtgttcacacagccgattccacaggaatcggttatacgaaaagcttagccaacagttagaccgcgcatcacgctggtcagatagcaatctttgccggtcagaccgcgccaaccatagctggtcaaaccgtaccttatcttggccagatcgtgcctcctgtggccggtctgaccgcatcattgaccaccggtcagactgggccattggccggtcagaccgggttatccatagccggtcagaccggcaccctgggacctcttccagagttttgtcctatgactaaaagcactgatttaaattgttatttgcctcatgttagtactattagtcatgctattctacatacacatgctatttgcactgataatatagcatgtatagccgaaccaagcaatgatttggattgtgttaataatttgtgcaatgatgccgtaacgagtatagccgaactaagtgttggtttggattgtgttactagtttagacaatgatggaatagccgaaccaagtgatggttcgaattgtgttgctagtttagacaatgacaccattgagagtataaccgaactaaatgacggtttggattgtattacaagcaaaagtgaaatagcattgtcacctaagaccgaatcacaaattggtcatgtggatattggaaaagatgaggacaatgtcttgcgggatagtagtgaaatagaatccaaagaagctatgcatacatattaaaagccgtatcctgaacatgtagattcggtcctatacccgcaaggatttgaggtgcccaacttcacgaaattgacaggtgaggatgctagaacaataatggagcatatcggccaatttattgaacaatatggtaagcccggtactgacgatttgcttaagttaaaattgtttcctcttactttgtcaaactttgcatctacatggtatagtttacttgctcctaattcaatttctacatgatcacaaatggaccatgagtttcatgattatttcaaagatgcaagcttgatggaacaaagaccgattgatacttcatcggtcacttgtgaaactattagttgtactgatttagacaacgaaaaagtagtgattcggcctagtcaagccgaatccacaaaaggaaaaagtgttattattggggatcctcggcttgacacaattaggatcaataatgcaaaggccgaagatcgtaaggttacaaaggatgaattatctagttccataaagaccaaaaagccgaagctcacttttgagatgcctatggctaagtataagaaaggattagccagtcaacgatttcataatcgaactaatgattcaaaaagaccaagatcatcttgtaggaagagatttggtcaaacaccaaaccaatcggagccatcaactataccaactccatacaaacctccggttgcgatgccatggtatccatatccaatgtcaccgtttggttatccttttatgtattacatgccatggatgcctcaattctctacgccatttcatcaaggatggaaggaatcaactaggtcagtaccaaatcattcatctaattcaagacaacactgtttcctactaaagaatcggtccggtggatcaaaggtgaaaaaggtgaagaaggtgtgggtgaggaaagaagccaaagcaccagaggtcgttgctatcaaggaggactctcaagatgttcatgtacctatcatgcaagcaaaggagatcgaagccgacaccgtaattgtcaaaagcggaggtctgaccgaggcattcggcaggtctgactgccaacctgtggccggtctaaccgatcctcctgggcggtctgaccgacggcttgcggctggtctgaccggggggcattggagaagagtgagaaaattgagagcaacacaggagcttccacctcgaccaaaaatatcaagaatcatttcttagctcctggaaaacaaccacagccgaagtggataccttctagcttatctcactctcaaaagtggaagctacagcatcttcgagccataggtcaaaaagaaaaagaagccgaagatgtagggaacaaaacatgtaataatttaaagcctcgaacgacacctaagcgagtgtggagacctaaagaagtaaaagttaagagttcggtgatttcttggagtagtgatggattcaatttgatgagagaagaatcatcggtcattagagataagtctcctccacatgattctatggaagttagtacggtattcatcttgccttcgaaattgtgcaatcaagaaagccgattctgctcgggggacaagacattaatatgctcatgaagagatcaagagtgatgaacggtgatggatagaatatcacatctttgagccgccatttgttggatgctaaggcacggtatgggtttattgtgtttaccattatattatatgcctatgccatgttagaacattgcttgctatctagcacatgtgtgttcttgcttatcaaattgatattattcatacatgttgcaaatgccagttctaagtagtggaattggtaaattggcatataatttgtttaaagtatgatttggctcatgagtctttgatatttattgaaagccaaatcatatgtgtttttatggatcaccatataatttgtagatttcatatttattgcaccatgaaagttttgcttattagtaattcggctaacgtcaatggtcaatgtgatgatttgttctagatttgttttctttaggaacattggcattgttaatattttgcatacatgctcaagccgattacttacatttgtagattattggaatctatgcatgtgacacatatgactttggtgattcattattaatcatacttcaattggctaagtgttttgatgctatgatgattattgtttcaaaagccacttgaattagtattcatctagacatattagttgaatattataatttttcatatatctagagagaaggaattttggaccaacaatttgatacaccaagcatctggctattatgtgaagaaaatttatatagtaaaagctgatgcttgatttccaaagtttggatgaaattggcagaataacagaccaggggtggtctgaccggcattgcatggccggtataaccggtggcgaccggtggtctgaccggctctacatggccgtctgaccgagcagacggggcggtctaaccggcattacgtggccggtctgaccgatcccaggcagagagctgggggccacattataattgattcaaaggccgaattatttgtgaattcgggcatttgtgcccaggagttagaagaaaattggagaatccctttgatagaatatttgaaagatcctggttttagggttgatcggaaaattcggcagcgagcattcaaatatactttgcttgatggagagttatatcgctgaaatatagatggagtgcttttgatgtgtttagacaatggtcaatctaaagttgctaggggagatgtgcgtgaagggatttgtggaattcatcaatcagcccataagatgaattggttgcttaggagagtgggattctaggccgaaagtgattgatgattgtttcaagtactatagaggatgtagagtttgtcaacggatcggcagtgttcaattagtgcctactgctgtattgaatcctatcattaaaccatggccgttccgaggttgggctttggatttcattggtcaaatttatccttcgtcatcaaaggggcatcggttcgtgctaattgcgacgaattgcttcaccaagtgggccgaagccgagccgttcatgaatattacttacacgtaggtaattgactttgttttgaagcatattattcatagattcggtattccttaaactttgatcaaggagcttattttatgttcaaagaggtgagaagttttgccgaatcttatgatattaagttgttgagttcttctctttactacgctcaggctaatggataagccgagtcgagtaataaaacattattgaaattagtcaaaaagaggattgaagaacactcaaagaagtgacatgaggtgctttcggaggatatctaaacaagatgctactaaagtcactccttttgagttggtttatggacaaaaatgttgttttgccagttgaggtaaatgttggctctcttcggtatttcaagcaagacgacttgtcaattgaagattacaagaccttgttaagaggcaattttgaagacgtcatcgacaagcgtttgaagactttgaaagagatggagacacttcaacacggtgttttcagagatgtaacgtcccgccttcccccaggccgggcccgcttacatgtgatagctttcataggtcatagactgccctcacagaccaacacatgtcttttctgcacactttgtcctcactcgtgtgcacccgggaagaatttcccggtcggtcacccatcctaaattgctccaggccaagcacgcttaaccctggagttctttggagattggcttccggaaaagaagttgcaacttgttgatatgagtattctattaatcctattaagccctaggccgggatgttacaccctcacccccttaagagagatcgacgcccccgtcgatcaaccctaggccaggaacgtcctctcttggccacgtccatgtgtccagtgccagcgcatgtgccatgctatgtaaccactcccggtctacaccagccatgcgcaccatgcctgcgcaactgcgacacacgcgccctgaaaccgcgagagtcggctctgataccattttgtaacgtcccgccttcccccaggccgggcccgcttacatgtgatagctttcataggtcatagactgccctcacagaccaacacatgtcttttctgcacactttgtcctcactcgtgtgcacccgggaagaatttcccggtcagtcacccatcctaaattgctccaggccaagcacgcttaaccctggagttctttggagattggcttccggaaaagaagttgcaacttgttgatatgagtattctattaatcctattaagccctaggccgggatgttacaccctcacccccttaagagagatcgacgcccccgtcgatcaaccctaggccaggaacgtcctctcttggccacgtccatgtgtccagtgccagcgcatgtgccatgctatgtaaccactcccggtctacaccagccatgcgcaccatgcctgcgcaactgcgacacacgcgcccgtgaaaccgcgagagtcggctctgataccattttgtaacgtcccgccttcccccaggccgggcccgcttacatgtgatagctttcataggtcatagactgccctcacagaccaacacatgtcttttctgcacactttgtcctcactcgtgtgcacccgggaagaatttcccggtcagtcacccatcctaaattgctccaggccaagcacgcttaaccctggagttctttggagattggcttccggaaaagaagttgcaacttgttgatatgagtattttattaatcctattaagccctaggccgggatgttacaagagagcaatcaatgggaaatatttgaagaaatacttccttagcgtttggcaagatgcttaggaggtcccatggccagtaattggattattggcctaagacaatatgttctatgctattagattcacgacgttcatcaaaaaggctgggggcatgcgtttacacctaaatttggcacctatggacgaaatagaggaaaattgccaaagtttggaatgtgccaggtttccttcacagggccggtcagaccgcatgtatgtgggcggtcagactgtcatggtccgagtccgagtctgttttcgtcgggtctcggttttcgttgctagggaaggctatatttcgtgtttccttgtgtctctgtcctgaattggacgtggactaggcctgtagagggcaagaccaacccctatttaaaggacaaggccggttcattgtaaacccccgaatacaatctatttgaatcgttcttttaccatgttttctatattagcctagttttagtccatctttgtcgatttgtgccgtaaatcgtctgccgccgcagcgagagtgcgacacctctttgtagatttgtcctgaaaaccttctgttttgcccacgagatgggcagttatcctcatatcaatctaaattggcctagaggctgattttgatctctaaattggctccgctagccaatttagctgtttttctacaaaacccatcttgatttggccgtttggctagatcgaggtggttggcgactacatatcactgcaaggcgtttaggtgttgcgattgtgcttgtcgagttgtcacaaaaagttgccaacaccaaccccttgcttatggtaggttaggagttcttaatttagagtatataggttgggctcttcggattcgttggctctggttgtagaagacaaacaatacatggacttcgcatggattacaggaacaagtgtctgcgcattgcgtgagttattcaatatagcagtagagacatgtatcggggatggacaacctaatttggtttgaacggatagtgtcgaaacatgaatttggcaataataaaagggggtagcgcacgagacctaaaagtggatggatgcggagacaaaggatttagacagattcaggccctctcaatgagaggtaataccctactcctgtttggggatttgaatccgtcgggtgtagtatagatctgacgatcatatgtgctcatgccccctagaggacctcctgcccaccttatataagatgggggacaggattacaagatagaaaccttaaccaatacggtattggtttcctaaatctattttacaatattattaaatcagaactttaggccgctccataatataaaaggaaacataatacccaagtcatgatctgttacatattccatagatataagctatcccctatgactagttggataaccatgccgtgtgggtatggggtacctataatctccacagtagcccctgagaccttcacagtcaaaaagataatcttctctcgaactagattacaccaaagccgaatgcttcaatcatctttgccatggtctcccgagtacttttaccaaatctgaagactgtagagggctgaaaaataaagtcaggtacatcgactagatgcacctaataggtgtagcccccaactatgtggttaattgaacaaactaagcatatagtcaaggaataaataatccaaccaactgagtggtttttgataattatagtcaaccaagtaacttgatatcaatatatagcatatgcggtgtgaatccccgaataacatgatcccagtgatatatcgactgctttgtaaaatatgatgcgtgcaacctaaagttgactacatcattgaaaattcacatagcaaaacagctataaaatgacttgaatgctgtgaataaagagatttccaaagtattagacacacaccaggcgcatactgctttaacagatgtgcttaaatccctaaaagacacatggtttcgccacacctggaaatatgacatatgtggtgtaaaatccgagtaaatgaactcataaggatttaccaaccgcctggaaaatgaccataatatacaatcagcctaagccataatattggtcaataaaaatgcacacttacgtggcaaaaagcaacgatattgtatccaatcaattgcttaaaaacccaaacagcaccttgacttatataaaaaagtcagcggggtagctatataaagatttactgtttgacaccttttaagatgcatattgtaccaactcctaaaaagttgagtaactgcggtataaaaggatttttaggtattgggcacttgatcacgcacactttggcctaagcaaaaagtgcgtaagtccctaaaagaacgtgataggccacacttgaaaatgtgggctgcagacatattaggcctaggccaaaaaatatgccttcgacaccctttaaaggatgacgcatgtaaaatgctcccgagtaataaatctcccgggtgatatagaccaagtgtagctcatatgaatagcttctgatatgagtgattatcccttatgggatactccaaaatagatataacaattgaatcccgactggcacaagtattcggttgataacccttacgggtaataataaatagtctagtctttgagcatagaaaatagacccatatcatgaattcatgttgcatgtatccggaacaagtctaaattgaaggtatgatacttgtgtttgagctagtaagcccctgagcatatagcttgtccttctgtcgtagtcacaattgtccattgatggtagctgacgcagttgtcatagagataagatggtagtgaagatagtgataccaatcaaaattgacgaagttgcaagccgtggaagcgaagaaaccagtcggcagcagtcaggtcagccagcaatgaatatgaaggcgaccagcaataaagttgggtagccatggcagcgaaataattagtcggtgacaacgaggttgctggtgaagaagatgaagatgcccattagtggcgacataataagccatccgtgaaggcgaaataacaagctggcaatgatggaagcaaccggaggcgaagatgtagtcatccattagcaacggcacagatgtcagggccgatgaagtagaggtgctggtgatgaagtcagtgacaataatccatcaaactgttgagaagatatcaaagctcaagtaattttcttgatgtgtgcataaggaagattgatgcaacaccccttgatttgtaaagatggtagtagaacttgatgttatagctgttgcagatactccacttggaggaaagtaaatgttgttgcccaactcatcgaaactgagctgattggttgataactctaaactcccggacatgtagatagaatctcaaacttgatatttgagaaatttggagtagattgtgacggcatggagaagccaaaattgccggtgaaataattggagttgctgaagtaaaatgtcggctttgaagcgaagacgaaaataataactcccagagttgactcgttggttgattaattgattgattcggtttgtcaaattttgagtcttgtatctgtgtagcccccgactctttggttagttgagaaacaactgaacatagagtcaagaactgtagcttcttgtcgtcgagtagccatcacttgagtgaagatcgagatgtcgaggctcttggagacgtcgtagttggtgaagtagcaaagcttacaaagtagaggcaatagagtttgccggtgccgaagacaatgaagatgaagtagctccaccatggtgacaaagttgcataaccgtgatgacgttagcaagagtcggcggcaacagaagcaaaccggtggccaagacatgtagttcatcgtcggctactgtggagataaaaacaccagtcggtgacggaagaagtagaatgatgacgaaaatgaagacgtccttgaacgacgtcagaataggccagccgtgaaagtgaagacgccatttgcggcggcaaaggcgaaccggcaatgacgatgacgccagtcaatgatgacgaagacgcgcagccatggaggcgaacaaaccagtcggcgtcagacaaggcggccggcaatgaagacgatgacgtccatcagtagtggtagcggcataaaccagccgtagaggcaagggcactagccagcaacagacgagatgaccgacggtgaagacgaaaaggccaatcaacactggcagaatcatgcagccatggaggtgaagaaaccagtcggtagtagacgcagacagcttgcgttgaagatgatgacgcctattagcggtggtggcgacgtggccagccgtgaagacgatagcaccagttggcagcggcgaaggcaagccggtcggtgaagacgaagacgcccaacaatggcggcagaataggccagccgtgcaggcggagacaccagtcggcgacagcaaaggcaagcctgtcggtgaagacatagacgcccaacaacggcggcataacaggccagccgacggtgaagacgtagatgcccaacaacggcggcataataggccagccggcggtgaagacgtagtcgcccaacaacagcggcacaataggccagcgtgcaggcgaagacaccattcggtggcggcgaaggcaagccggtcgatgaaaacgaagacgcataacaacggcggcataataggccagccgtgtaggcggagacaccagtcggcggcggcgaaggcaagccggtcggtgaagacgaagacgcccaacgacggtggcataataggccagccgtgcaggcagagataccagtcggcggcggcgaaggcaagccggtggtgatgttctgactgatccattcatgaagcgtaggatgtaagcttaaagcaatgaatcccttttatgcatatctggatctggatcctacagaacaaacatatatgggatgagtagtatttaatgtatatataatactcgagaaaaattcaagtattttaaaatattaataaatatgtatttctcctctagtcaatcttgatttcctcgagcagatgattccgtacgtttaaacactctgtctgactagtcatagcccccaaccatcgggagtcagcctaggcacttcccaaacatgcatatgagtgacatgagttcgtcattaatggaacaaagtttcacgaatcagaatttactactcgggtacttttgcaattgtaaagagcagaaaataaatttatcttatctctatgcttttgatttattccgaatagtacttatgtcacgtcctgataaattcatcccgaaataaaaatcattccctaaaaggaataatagaattaattaaaattcgaaaagaaattgacaaacactaaaatacgtgtcagaaaaattcgaatgtggtccggagaatttttattaaattctctttggtctaaaaggagccctcaaattttacttgaattttcagagcaccgaaaatatttattaaagaacaacaacaattaacaaagtttattaaaaagaaaaagctaaaaataatccccctcctccctttgggccaagtctggcccaaagtctacctctctccccctcggcccgcagtcccagtccctctcccctccctttgtttttctctctttcatcccgggcagcccactccctcctcctccttcctcccggcctgcctcggcccagcagcccggcccaagccaggccgagccgagccagccgcgtgcacgcgcgccgcgcgtgcgctgactgcgcgcgctgaccgcgtggggcccacgcgccggtcgtcttcctcctcccgcacggcctcctctctctcccgtgaaaaccctagttcgttcctccctcgaatccgcgcgatttaagcgttggattccaaaattaattggggggaattaatcccctttccttcctctcccttttccccctaatctccccttcaatcatgcactattttgaccggaacggctgcgccattcatggccgccttccatggccgccgggcgccttttccgccgccgttccctgctcctcccatgctcggctcgcttccctccgctataaaacggaacccccttgctccattctctcgttttagccccctcctgcgccctccccgtggctgcaccacctctccccgcctcctccttctctttcctcggtgccggccaccctccagccgcccctaccgccttgcccgagcgccggtcggccatgccggcgcctcctccagcgtcgcagccgcctcctctgcgccggcctgccctctgttgcccgtggagacctccggaagtgcatccccgccggcaacagtggcgttaccgccactgttccgtcttcggccagctgctgttcatcgctggtacgccgaccgacgtcgccatctcctccgtcgacgtcgcagccgcctcctctcccccggtcagccctccgtttcgcggggaaaccaccggagacgtgtcctcgccggcaaaacagtggcgttgccgccactgtaccgcctccagccgcctgtgccgccttgccggtgcagcgactgtcgtcatcgccatcttccctcgacgtcgccgcgtcgccctccaccccggcctgccctcggtttcgccggaacgccgtcgcccgcatcggtcttgccctccgcctcgccggagttccttcggcaaccccttccgccgtgcctgtgcgccggccgacgtcgccatctcctcctccggcatcgcagcgtcaaggttgccctcggcctcgcctcccctccatccaaaccccgccggtgttcgttatcgtcggctccgttcgtcctcgttgacgactcctccggtcggtcgttcgtcctcgccggatcatcgtctcgctgcgccgccaccctcgtcgtcatcgtagcggagtgttccacgccgtcctcgtctccgtgcagctgctgccggctgcctcatcacctccttgccggttcttgtcgtcgtcctctcgtcgttcccggtcgtcgtggcgttcgtccctctgtcaagccgttctcgtccgtcgtccgcgtccgtcaagtgtgccgctgcagccccgtcgtcgtcttcgtcctcgcctccgcttctccaagcattgcgccggctacgtctcgccttcgtccagggatcgccgccgaagtcgtcccctcgcctttcgtctccgtcattcccggccatctccgccgcgcccgttcgttgttgtcgttccctcgcctcgtcacgtggtggtaaggatctctccttcgctgccccgtcctcgtcctttcggtgtcgcccgtgcccgttgtgcggttgtcgaccccggtacccgtgtaccggtgtcggtagtcgttcgcttgtgcgtgtggtgaccgtgttagtgtgcccgctcggtagccgcgtggtttccacgtgtgcagcccgtgtggtgtctagtggagtccgtttgtcggccactcgcctcggttgacacacgggatctgcttccgtcgacccgtggaccgtctctgtgtactcggtctaccgcggtcctttaggttgacatgtggggtccgcatgtcaacggcgcaaccttcctgtcttttctaggctagcgcttacacatgttttatagttgcaaaacctaattataataatccgcaaatctccatgtaacagcattaaacttcgaatgatcatatcttggtcatacgagctccgaattgatccgttgaagtctcctaatgtttgttataacctaaagaaccctgtgctttctttttatgtattgttattgcttctttataggcttgtagctttgcttgtgtgcttcgcgtagtcttcatcattccggaggttcccgaagcgtggtttgcggtcgtcgccgaaggtttggaaggccgttatctctgagcaaggcaagtcacatcatccttgagaatattgaatcccagtttataaaattattttgatttaaattaatgcattatcgctttatttaaattcctgcgttatcactgttttatttagccatgcctatttacctttgttatgaccttattattattgctattgttattattaccttgttcaccctaggataaacaaaaccccaactcgtgggtactctattcatggttccactagtatgaatttaggtagatgcttcactgattaattaggcaacattaggtggttttataactttagactttgggaattctcatatcatttggacactatggaatggttggcttatgttggaattggacacacacctccccctctattcaaaactcccaaaatggttttaggctgggctcgaggtgcgtggttgggttttgttagtcgtacctcgggtactgtaaggattaagctcgggcctctgttgcaaagcactaccgtacttccacatatctagtgggtaaggcttagtttgtggctcagtctagttataaacaaaagtacacggatggagatggacgaagtcgggggtcgatggacatctctaggacaaatgaaggctacacgagctgcggcccggtagttgagatgtcatggcacagggctggtgtcctgctgctaggggctcaatcctgccagcctgtcccggaggttccgggcgtaggtggggttggctcggtactcttgtttatggctaggatgggttggtaactatgtcacgtcttccgtccgtataccgtggtggcatgtggcacgtggttacacgtgaggaagatgtgtcttatgggtaaagatgtacacctctgatcagagtataacctattcgaatagccgcaccctcggttatgggcaagcctagcaatgtacccaagttagtgttttaattcttaaaatttgcttaacaactaaaatgtggaatggttggcctgggttggcttgggacgagctgggacccagggtcgggttgccagttcggtctgaatcatcgtaggccttgggttaaggcaggttcgtgagggttcacgtccttgattaataacactgtgtaactctaggatcgtctttataaaatggctttgggcaactaagtgacttttaaatgctgttttctgcaaaacttaacccctatattattaccccttgtacccccttgcattaatcatgcatctgccggtgtggcttgctgagtactgtggttgtactcattcttgctgaatctttcccccccttcaataagagaagctttggagaagaagtcttaggtggagtcctggcttatacgccagttgagcgcctatgaagatggagccgtaggtccgctagtctgctgctgtttatttttgattgtcaggcattaagtgcctttgtaataatgtaaatattatcgatataataaagatgtgtcttttatatcatgtttgtgtggtgtaccccggcttttcctgggacggggattaatacactagcgttcgggaaaatgtatttttctcggtcgcgacaacttagcaccttgcgttactcggtccatccaacgagcccccgggtgctaggaatcggcccaaaggcaactatccatcgacaaaccaaacggaaagcataggaagatagaactccataactcgataggcacttttgtactcagattatgtcgcaagcaatcaagataaatattatgaaaattgtttaaaaaatatgatataacatctgtagcccccgactcactagtcaacggtgaaccagttgatgtagtgagctaggcagaggaaaaggaaaatgtcatataaagaagaaaattaatgatgacttagctttttggtctttcccttggtgacggcagatgtcacgaccggaattaacccaacgggcgttccttacgtgcgtgtattaatccttgtcccaggaggcaaggtacaccaaaagttgatacaattcagagtttaacaagcggaagcgtaaatagttaattattacatgggcggcgaaggcccagcacacacaaaaacaaacgggaaacagcggaagactagggcgacgaccacaggcgcttgacggcaggcacgagctagacaccaaagccttcatcttccaggggctcctcttctggctttgggaaaaaattgagcaagactgagtacaaccaccgtactcaacaagacacacccacaagtgcaggataaatgcaagggagtacaagggggttataacataaagggttagggtttgcaataaacagcattaaaagacacttagttgctcaaagctattttgtatacacgattccagagctatacaatattattaatcaaggccatgaacccacacgaacctgccttaacccaaggcctatgatgattcagaccgaactggcaacccgaccctgggtcccagctcgtcccaagccaacccaggccaaccattccacattttagttgttaagcaggttttaagaattaaaacactaacttgggtacattgctcggcttgcccataaccgagggcgcggctattcgaacagattatactctgatcagaggtgtacatctttacccacaagacacatcttcctcacgtgtaaccacgtgccacataccaccacggtatacggacggaagacgtgacatagtttccaacccatcctagccatagacaagagtaccgacccaaccccacctacggccggaacctccgggacaggtaggcaggactgagcccctagcagcaggacaccggccctgtgccatgacatctcgactaccgggccgcagctcgtgtagccttcatttgtcctagagatgtccatcgacccccgacttcgtccatctccatccgtgtacttttgtttataaccagactgagccacaaactaagccttacccactagacatgtggaagtacggtagtgctttgcaacagaggcccgaagaccggtcattatacggccgaggtgctactatcaaaaccatgcaccccgagcccagcctaaaaccattttgaggattttgaatagagggggaggtgtgaatccaattccacaataatccatccattccatagtgtccaggtgatgagaatatcccaaagtctagagttgtaaaaccacctaatgttgcctaattaaccagcgaagcatctacctaaaatcatactagtggtaccatgagtagagtgtccactagttggggttttgtttattctagggtgaacaaggaaataataacaataacaataataaggtcataacaaaggtaaataggcatggctagataaaacagtgataacgcgggaatttaaataaagcgataatgcaataatttaaatcaacataattttataaactgggattcaatatgttcaaggatgatgtgacttgccttgctcgctttcccaaacgtcggcttcaacctccacgaagagcggatcttctaataaactccatataacaagcaggaacaaagtacaaaaatgggttcttgacttcttaaggaaaaattagagacttgaacggtccaattccgagttcaaatggccaagttatggccatttgaagtttatatgctctttaaatgaatatttacgaatttcttcatttaaattttaatttaaaaaaaaatggatttattgcgttagccggggagagggcgcgcggaccgggtccacgggagtgggacccacgcggcagtctcacggtccacggtggaccgagtgcacctggctcacaccggccggcgccgtgggccccacgcgtcagccgcacccgagggcgcgggcggctgacggccgggccccacgcggcagccgctatgtcacgtcctgataaattcatcccgaaat

SEQ ID NO: 10402 - DNA, 11248 bp, Oryza sativa
atgagcgtaaatatttgtactttgctttagaaaaaagtacttagctagtagtaattcagtccacaattccagttgatagaataataagaatataaggtgcatgactatactgcgagccaattattagcgtggtcggtgcaacacggagccgttgcgcccaagtgatcgatggcacgggctggcggcacgccccttgcggtgggcgcgcgcgcacggccggctgctcggctgctcctagcgccgtacatagccgggaagagaggccgtgtgccgtgacgcgcgcgagctcgcggtagcggggggagagccccactggccagccacgtgcaaaccccaggcccccccgcggtgccgggggtggggtgcgagggacgcaaatccctcgggatcgttcacgcccattttgttatacactcccctctcgatcgatgcgtcgcgtgcggcgtaccgtcgttcgacgggtacgctgtgggaaccgcgatttcctcacacgcggttaggctctcgcgacgcaaccgcgcatcacggccaccggaccacgacgcgcgcgcgcgcgcacccgctcgatcgcaagttaatttttgcaaccagatccagctgcatagcgggttggcgcgctttgggacttgggatacgcgcgcccgggttacttgcacatgtgcatgcgagtttgcgacgcatagaatcgggccgacctgtatgcagtgtgaatatgtaatttagtttggggtttaagaaagagattagggagctcccaactgattacgtacccctaacaagccgagattgtgtgcagtatagtctctcttaagttgctacagtagtcgtgtcatgtcatcgcataatgatgccacaaccaatgtgctcctgatcgaaggacgttgcttccaccgtttcgggcccctttgaatcacaggaatgaaaaaacagaggaatagaaaaaacgtaggatttttgtaggaatggaaccgtaaaaacagaggattgcaaaacataggaaagttatgttactagccctttgaatgggtataggaatttcacaggaaagagagtgtcaggaatttcacaggaaagagagtgtcaggaatttcacaggaaagagagtgtcaggaagtgtattaatacatgtcactttggccttatccacaatatcgcaatatatattttcttctaaaagaacaacaatgatgcatatgtctgtcatttacctcgatcctacgcacacatgatggaaaaaagaggttagggtggatgttttctttcctatgttttccatgtgaaatgagttccaaaggaaaatttcctctaactttcctatgccctaatcctatgaatcaaaggctgctacagtgcctaatcctaaatcctatatttttcctatgaaattcctattaatcaaaggaggcattcacgtctaaattaaatgacagttctactgagaaatgacagtagtaaaaataaataaaaaaatctacgtccagcttacagtacgagaactgataggtgcaagcagacaacccaatggttcccgcattttatcgctccatgcacgtcgaaagaatttcgatgattctttccacggttagttggtgcatagtgatgcgtggcatggcggtgcccagcctgctacaacagggcctcatagctagccgaattattgttcttttttaccctgagggaaagctggctagccgaattggttcgataaagtgtctcgatacattttgaaaaacatacaaattttatattttagaataaataaagcatcagatcaatttgaatctctccataattacaatattgtttatgatactcatatggatatgtgtctttagtcgaatcatgagaaagtgttttcatcctctaagctgatatctccttgttttttatgtcatcaaaatagtgataacaaattgaaaaatgtttggtagatcaatatataaaatataacactccacaaacatacaaatttaaattcaacatactccctccattccataatataaggcacaaccacttttttagagattctataatatataaggtatgcatgtaggcatgcatgtaagcatgcaattaaccatgacatcttctccattaaattattattttttaaaatcatccactctcatgttacataatcctattggatgcatgcattatatttattaggatgatccaaactacaagacgataataattatttattggtatttgggttaaggtgattgtgccttatattttagaacggagggagtatacaaatagaaacacaattttatattgtataagttatttttgaacttacatatttgtaaagtgatatatctcatattgatctaccttaccatttttcaactttttaaataaattatgagtggcatgcacaaaacgggaggatattccctcaaggatggtatccacattcgaatcttgtgatacgactgcttaagttgtacttcctgtgttctacaatatagcaatatggtataggatgagaagtgtgctcgcgaaaaaaagtataggatgagaagtatccttagtataaatttattgtattagggtgtgtctaatcctatagtagattgttatatttgaaaagaaaacacttagtaggcatatctattcaaggaatggtttattaattgggtatcttcttttctttgatgatgacgattgttttgtgctcggggactccacagcaaaaccgggtcctatttatgtttgtttcccctgatccatcgaactaacaacggcgcccatgcatgcaaggtggtccaaagtacgtatagacaacagtacagtacagggctactgcaggctacacagacaacagcgagatgatgacagattgacgttttgacaggtcggtggccggtccctcgcccaatcatacctcgccaagacacacggccggacaagcgcgcactggtgtgcctggtggtgtgtactctgccgccctccatccgcccccctccccccgccacccgcacggcgcctctgcgacgtacggcacggcgcacgctcgaccgagtcttgcacggtgacatgcctgccatgccatcgccgcctactactactggtactgcctcgtaccatccgatgtctctctgcgtggcccagcctctctcgatcgcgatctgtcgtgtagggcagctagctggtcggagtggtttttgatggcgacagtgagtacattccgactccggccggacgtgtacaacgtttatttgatggacgtacgtaccggtcgacttgcgcggtgctgatcacccatgtggctcgttgaggtacgtcgtacgggcccggtggcatgcatgagcgttccttggccctaatcatacgcaattaagggggaacacggaccatcaaccacaaatttgacttgcttgcgcgagaaagcgatccagctgatgagatagctgcaacaagatgagctcgctctgacaaaagtaatgaggagctctaattttatatgttgaatttgaatttatgtgtttatggaacaacatatctcatattgatctgtcattcgattttaaaaatttgttaataactactactatttgactgtcatacaaaaataagggatatcccattaaggaataaaaagagtttctcaggtaaacgtaacaatgcatctagattaatctattaaatggaaaacaaataagattaaagttacatattttttaagagaatttattccataccactaagtttactctaattcaacgatttgtcatatactttacctccatttataatacaccattgactttgtcaaaaaaattacaatgtatcattgagtagatacttttaaggaaatgactaaaatacccttcaagtcatataagggttgacacttgattgacccactagtagttatttttttaaaaaaaaataaaattttgtgtgtgtatattttaagatatagaagtgtgtgtgtatattttaagattttctttcttgtttttttaaattattatgtagcatatatatgaaagaggtaaccccataaaaaagaattataaagcatatggatgatgatttatgtgaaaggacattaacacaagagtattctattagtacataaattataaattatatttccaaaaataataatacacgcgaaataaaaatcttgaaatatacacacttctatattatgtaaggaggctacataaaaaaatttcatgttttttggaaacttctactatatcaattaattgttatgcctttgtcggtgatatgggcccgggggtatcaggtttagagggaggaggctgccccccgatgccacgtagccctcctccgaggggagtcaggcccgaggtggggtggcggccactccttccctcaaagactagtcggaggaggctgccccccgatgccacgtggccctcccccgaggggagtcaggcccgaggtaagacggcggccactccttcccagagactggatggagcaggctgccctccaatgccacgtggccctcccccgaggggggtcgggcccgaggtagggcagcggccactccctggccgagactagagggagaaggccgccccaggcgccacgtggctccccccccccaggggggatcgggcccgaggtcgggcggcgaccgcccccctcccgtgactaggggtcgggctcccccgaccccctctctaggtcaccacatacggtgggttaggtgtccgcctccaggtacccacctacccgcatttatggcgtcccgagcagtcgcgccacgccgcatttaatgcggcgtgcagtgcactcaaccggtctgtgaccggtcgaatgaccgatgggactggctagtgcgcctgtgcgctgcttgtgtgtcaggcggcgtgcaacctgacatgtcccatcaaatagtgatggtgagaggttctcatcctcttatcccagccggagtcggtcctcctgctctggtcaaagtaaggctcccgtttcccggtgtaataggagcccagaagtcttcacccattaaatggtgactgacaggggcaccccccgtgtcaggcggcaagatttgacaggtcccatcatcaagatgacatgtgcttggctttccaagtcaagagacaagacatgcatttaatgcaaagattataatacttctccaccggagctaggttagattgttgggcccatgtggtaaccccttgaggtataaaaggaggtccaggcctagtgatggaggggggacttccgagcgaactggcgcttgggtctcacaaccccaaacacttgtgttctacattcaatcaatcatacacaggagtagggtattacgcttctcagtggcccgaacctgtataaatctcttttgtctcatcatcttggaggggcctaaccccctcaagatcacacagctccgctcaccaagccctcgaatctcacccactgcccccggccgaactcacaaaggggggcttcacggttccctggtggaggagttcattctccgacagccttaaaggcaattttggtatttttttaaaaaaaatattcaccccaacagcatactattgacgtaaaaagacaaagtcaatgacatatttaaaaaaaaagagacaaagtcgatggcaaatcgttgaacaagagtaaactttcctccaaaaattatattggaggtgtagttattcgtgagtttaggctaatcattgtgctaaagtggattgagaacttaaaataaaatcatgcgaatgacaaatagccaaaaacaataaaaggaaagcgttagtgtcctgattggtccgcgcgaaattatcggctttgtttgtgtcaaagaaaaagatgaggaatcgcaaattcgcaatccaaacaaacgtgcaaggccaaacggcaagtcttgtgagtggcagatcgccagatacatgcactccactcatgcaggtgccaagtcctgagtcctgacagcattctaagttcacggcctgataacacgatatatacccttctgtaataaagtgaaaacattttgaatttgtcgctagatcacaactcgtagatgctgtaactgtgaggtaattaagcactgataacaagtcaaccatggatcagcagatcaaacaggaagtgcttgtacagagcaggaaaaaaaaagagtaactatagaatgttctgttccggggagaatccacaaaggacgagatactgcagtatatactgaactgaatgcttgcagcgtgcccccacactgtaaaagttagagcaatgtatcacgttacttcattaatcggccaaagagtacacatggaactgacgctgttcgtcaccggctgaattgtctttttgatatgcatacacattgggtcaggtactcaggtggtttgtactttcagacgatctcatattcagcgatcgttgatgtctagctacttctattcatgtaacgttaatgctgtacatatacagttttacatgagctaacatgcatgttcttgtctgaaagtaacttatatagtactagtaaaacataaaagtttaacagccgtcttcatttcattgccgcataaataacattttgtctgcgaagtattcctccgtttcacaatataaatcattctagcatttcattaacatcaataggaatgtgggatatactagaataacttacattgtgaaacggagggagtactatgtttcttaggcagcaacagttcagatacctattagattaggctttggggattattgatccactgcattctctctttttcttcccctgttttatgtgattttctgaagatgctttcacaagagttacaggctgcaaattttacctcagaggtgatccagccctctgtggggatcacggcaatgatttagctgggacagacccgctacctaaactgttagagttgcttaagccacactcttccgtttgagctactagtaagcatcagccacacacgcagaggagagtagtatcagcaatcataacatggactattgcaattaattgctctgtgcaggggagaaaatgagcaggcaatgcagtaatgcatgcaggccaggatcatggcgattggcaagggccaagggctagtagacttgaacaaccttacattgataggacagtcgctgtacaaggatggatggatggattggttggaacaaacaaacaagggcaatacgctggcattcgtgcatggaccagggccttgtccaacagactgagaattaagcgtttgtacgtactgggaacagtaggcatggaggatgagctgcatgcacgcaggtacaggtgcagtgcatgagaaagcaaccgttagccttgtgatggaacgacaaagtgggatatggaggatggacgaatattacgtgcaattccgacaaaccagttctatccaatgcatcatatataggctcttctcagttattttattatttattgccaaaaaaaaactaaggttagtgatggcagaattaggaatgaaccatgcttgtgtccaaactccaaagtcgcctcagaaatagtcacggaaaataacaaaacactaccatgtttcctcaaccgtgtattcaatatatctggctgggagcagaggacttgctggatggtaccaagacaccgtgatcaatataatagtatatgctctgcatatgtatgtacttattaccaaaaatttatcacaatttgaaaggcgtaatatattgagcctggagcactgaagtatactttgatccctgttcaatatcctacgccgacagttacactttcgatctgaataatggacttaccagctggtacagatcgattaatgaacgtgcttacccgtacgtgtttggaccagttagtactcattactacgtacttataaatctaccggactaccgcgacaacagccagcaagcttatataggcaatggctgatcaatcaagggtgagagatctatgcagtgtccaaagcctaggcatgacaaagtaagtaacaaaccatgcacatcccctcttcggaaaagttgagaggtgtaaacttgtgataggtagtacgtacaacgtacgaacgtactccatctcggtgcaaactgtacatggtttaccaggccggccggccggccggcccggggaccatgcgatgcatgatgccagcatgcagctgatgtgcacctcacctcataatcccttccttgaaacccaatcaacagagacaatacgcgagcacgacagggctctcgctcagctagcgcaagggcgcgcggcgcgttgacaaaacccctcatgcaccgcgagtcgatcgagaccgagacgcccgcgcgccccggccggccgcgaaccagcgatcgacgactgagccccgcgcgtacggcgcccgcgggggccgcgcggcagggtggggggttgccggcgggttggtgtggccggctggccgcatgggaggagcgcgtgggacgtgccgtaccgtgggtgttctgccgggtggtgaggccgcgggcgcgcgactggcgcgagtcccctatgatgcctgggcctgtggaccacgcggcggagagactcgatcgcggcaactgccgcgcccgtcgcccgatatggtgtacgcgcggggggggtcacatgggttttggatccgtgcgcctgcctccttcaatgcgcgacggcgacgtcggcacgaaccggaactggagggaagtggggcgcggtcttgttggagatgtcgaccgcagcattgtcgtagacgacggcggctgatccagattccgtcgagcgactagcgtgcaggcgtgaatctgcgccatatgatcgatcgagcgcccaagttaacaagcctggcagtcgtgtccgatgcaacaatctagctaggcccagacgccgagtgttatactggtgacggattcgtgaacaaggcgaggtcaggtgagaaaatgacaggtgtgtgttttggcaaagggagtgtacgtgttcgggcctagcccaatcattcatcctgattcctgaatgaaaaaggccgaaaggagcttttcatagtgcgggcctgctcagatctcgtgataaaggcccagttacgacaatacgatcacaccccagaaaacaaccaattaacgaatttgttgtatatttgtcgacaaattttcctccaaaaatttatcaaatgtaattacagtataatcgtagtgtaattatgtaactttcaaaaatctctcggtaacatgttatttcagtaaaatagaggtcgtgggaacaaatcctttcacatatgtgtgtgctgtgattatttttcttcctcactagaacaaatcttgtaaatagatctaacgatcaaaattacgtgaaacttacatacaagttacactgtagttacatgcaagttacagtgtaattacatacaagttatagtgtaattatactacgattatactataattacatctgtcaaatttttagtagaaaatttatcgacaaatatataggtggtcccaccaattaatgttctttcttcatcagaaaatgtcatctggaatgcaaacgaaggaaaaaaaaaaagcaacgccagttcaacaacaatcttgatacattcttccataaagaaccaacaaattcgttgtgttcgctccgggatattgataacttaataactttaggcgtgcgctttttgttcttgtcaatctcatcctcttctctttttctgttgggaagaaacctctccttgctcctgcgttacaagttggacagggacccatcaagctaatgagcgatccgacacgtacatacaggacagtggattctgatcatcaagatatgtgtgctagactgctagtgtagtgcagtggagcctttcgctgtgcgtttttgcacacgtcgagtacgtgtgccttcgcccttcgccgatcgttacgcgacagccgatcgatcacgcgtccaaagcccgtcaatcgagtgggcatgcatgcatgcgctccatctggaaagttaatttaagctatttctgagagtgagatctcatcagatcagatatatactccgtactacattcgtgctagtctcctaatctagaagattagtagctacagggtactatatatctggctcatttttcctgttctagcttgtaacaaaaaattcactgctatgatctgaaacgttgtactccatcaaagtatcaaacgaatccacttggaaatttcggaccgaccggttttagattcccgccaactgagcctgtgaaaatagtaaccgataaaaacgaaataaaaatggtaaaagatatagaaacataaacatatttctcttataccgactgttttcgtattttaccatattccacttggaaatttcggaccgaccggttttagattcctgccaactgagcctgtgaaaatagtaaccgataaaaacgaaatgaaaatggtaaaagatatagaaacataaacatatttctcttataccgactgttttcgtattttaccatattcctattgaaattacctttttataatattgataattaccatatttttaaataccctaatatgtgtggtttgatacatagtttagaggctcgttaattcctcaatcaaatcctaagttgagtgcatggcataagaagggagaaagtttataatttaagctagtgtaagcttgaatttgttttcgcatattatattatatagttatattaagttaaatatattatttttacagcttaatatttccagaatttatatcggtttccgggcgataactctgtttttcctccgtatagtgacatttctgatttcctgatattttttacaccgctttcattttcgatttgaccctttttatcctattttctagaataatatggttaaaaaatgactgagctgtttttcgaccattttcttccctatgagtgaccatgtgtgtagaagatttatccattttctttttattttttgcgtacttttcctgtggctcatgcagaactgaagggctggaagcctggaacatgcatatacagtactctgttgtaaattttacagacgtccattaattattagggtaatttggaaccatgccattataattttgtaaagtttaaaatatatcatcggtatctcaatgacatgcaggacccatatgagtcaatgacatgtaggtcaggatggcatatgtcggtgacatgggatcaggagtatcatgactagaggtttgaggcagacacaatcgcacacgtggcctggtacccccgagggacgtcgggcccgagggtgatgcgttcgccctcctcttagtccccccgagggg

SEQ ID NO: 10403 - DNA, 35953 bp, Oryza sativa
actattctattcaatatatatttgcatctaactgaaccatgcaaattgtaccattactcttgcatagcccataggcatggaaagtcaactatttttgcccatcttcctgaaccaagatgggctaccttacactatagttatgttggcctataaatagtgagcaagagttgcaagaacctttcactagctcttgtattaaatatttgaaataaaattataaaacaatgcaaccaatagaatattaacaaagctgaacatactaataacacaatacgaaccgtagaatcatccatgaagatggctaggaatgggttcctcctatgttcttcttcaggatattgtaataaattaggaagcttttctgaactttatgttaaggatgtgtgtctgagtatgctttggtatacccgtgcatgtgtgtcagcatgtatgtgttcgacataaattaccattatataaggaccaaataccaaattagaccactcatccacaataaaacagattggaatatcaactagatagaacatctaaagatactgtgtgacactgcaactggcttgttccgcctttttacacgcttgcagtattctctagctaacaaattggcctcatgttgatccatgcccaagagccatatgtcaacctgaatacaaaatgtacatgaattcatagatgtacatgaataatgcttttaaaaagttcgatataaaaactatacatgtcaggaaaaatatagaagcatattgagactactaatttactggatatggtggttgcagaatttattatacagacctgcacagtaacagtttagtgaaactgaacacgtgcatcatctaaacaagaaccaacacaaagctatgctatgccatagaaaatatagatcaaatatgcctcgcgcacaagaatctatgaggtccaaaatcaatgggaagcaagcaaggttggactagtctatgactccatatcaatataactacacttggtgacaaacagagatggtgacaaacaaacatcctaaggttcaggggcaacgctacattgtatgaaggtggtacgcatgcaccatggtaaatcaagattttgctagtaaataaactcatatctgtggcatgttacttcgaaattgcataaggttgatatatttctaaagagggaaaaaaaaccttctgaaataatatggtagcacactgaaaagaaaggtaaaatatatcagcagcagtgaattcttcaattagatctctcccacaacacctgtgggtaaacagaaatgaaacgacttgtacattcaaatgatccttcatttgatttgacgaccaaatttaaaggttgacaagtaacagtacacatttttacaaatgatccaaacaggaatatacctttttattatactcacagtggtttttcttgcaacatctatggcaagtggccaatattcatcagcaagccgacttatttcatctgacaaccacactatctctaccctatcaagggccataccagctgctttccacatctcaatattgtacaagccaatagtccgcatttcacttagattgccaccaatattacggttcatctgggcaatccagtctgccattaggattttaactttgtaaccagatttaaccatcttattaacagaaagagtcgttatgatcccctgcagcatgagaatagatcagtgcaaaactcagagtgaacatcgcattacaaacttgagcaatttgtcagtataattggcatgatggcatcatctcaaaataaaaatggttaaatgggtaatttaaaatagcaaatgaattggctgagtaccactcaaacaaaagttaatattttccacagcccattgacctacaacatcagcacaagaaccatccaccctgaaagcttattatcatcaggataaagggaacaacggtatattcacagttcactaaattacacttcgatccaaccgatatttatggtccagggaaatccctcctagctgtatttgaacaccttttgtttgcatgagattgatgatataacagtgtatgccaaaagatactccctccttcccaaaatataagcatttttggacttgtctccgagatgctactttgaccaacaatatctatataaaaataagatgttttaaatgatagtttgcttaatgataaatctagtaacatcaattttacatgattgatctttttaaattttttactattaatagtcaaaattaaaattgtttgacttgacactatactaaacatgcttatatttcgggacgggggggagtagtagagaatctagtactgatggcttcagcagtgcattggcaaaaagagcttgggaaatcattaagaaaaaaattgacaccctgagcaggaaagatttcactagaaagtggatttattaggtaaatcaaatcgtacatacaggtccaaattttccaaatagtgttcgagaaaagatatacaattcagtggtgtagcatgactgcatgaagccaaaccaagagggatccttaacccaataccattacatagttatacaagtgccaaattaacaaccccaccccccacacccaatcaaaaaaaaaaagaagaggaagagcttatactgttggaggaaattagagattgcgaacaaaggcgcggaagcaagtcatcttcttaagagcccctgcctgaatgtcgttagaaaaagactatcaagtagagtgctagatgcaagaacgtcgttaataacaggcatgtagcatcttcaccctacggtattgtcaggccactccaccctataatctttccgaatatttcactaataggaagacttaagaatgttctagaatcgttcagataatcctaagccatcacattttttcaatgaaacatgctagttcaactttactccctgaatccaagtgatgtaaaaaagcaaagttctttagttcttttaaattgcattgcaacccaaatgattgtacatttagtttttctttttccatctccaaagtccaaacttcaagttgttactgttgtgaggggttgtaaggcattgatgattgctccctgaaagataaaaccagtctaaaacatattcattcatgattcatcaaaattttaattttttgaaatccattacagactaaaagtgtattatcttcatcagactatcctcgttcttccttgggaggactacaatacagttgatgtggataattcattcatagaaatttaccagtttcagtatgcagaatttaaaaatgctaccacgaaaaatatattcgttcatatacctgggatatgcgcataaagggggtgggatcacaccaaacatagcaaacgggggcagatttcttctttagcagtaactcaagctcgctgtctttgacacggtcctccccaatgctctttagtgttgcgaacctctgatcaaaactcccctcaacagtatccctggatgtaaacaatcgtaacattacaaagcttgggtcaagattgaagttcagaagagcaaggttacctaatagagtcgacggcagaatcggctgaagtcatagtgttgacattatagcactgcttgctccagttttgttctgagattaagtccagccttggcggagctcctctgttagtagcaaaataatcaggttgcggtgagaaagatgtattttttttccttccccaatttcatcataacaactcatgagatttaacattcttttccgagcatgagtgagtttatctactccaaccacaccgaaaatcgatcccactcctagatgaaacaggcacggagatcttacccgctattattttgtaggtggggccgttcttcgcggaatatttccggttgtgccgacctgctgtggaggcgacgaagcagcgccggtaagtcggagcggcggcgcggcggcgtcgaggccggtgttcgcttccatgctttgcccacaaggccaaacgcccgcgctatcattgtctccgctccacacggtagcgccaaatcatggagcgtcaccgaccggctaatccggtcgcagcctcctccgccgccgccgacgccgccgccgccgtcgaactcccgccgtcgcctaggggtttcgttgggtcggggggcgggccgaactctcgttcgggtggtctctgttgctcggccgtacgctcgcctcggaagttgacaagcggcccatgtacggcccagggtgtgcgttcagccggcgaacgcatcttggcccattacctgctttttcctcacgtgcacgatatggagaaaaggtcggtaataaggtctcgtttgtcacatatctagctccaacttacctggagccggagttgtgccaaacagtctagatcctctgattttaggagcggagttggtagagctgctccacaaaattgtattacgagggtggagctgagtttttctgctccacagcttcactccacccaaaaaacccactaccctttaattttttagtgtatttacactaaaataccccttcctaccccatctcctcccgttctctctcctcctacgtcttcctcggtagacaccaacggcggtagcggcgggcgggtggcgtggcggcaagggccacaggcaacggtgggggtaggtgcacgggtggcagtggcgcggggtcgacgcacgtgcggtggcagccgcggcggcgggtggcgcatgggctgagcgggagcggcggctgcggtccacgagcagcgcacgggtggtggtcagctcacgagcagaccggcgccggcgggacgggcggcggcatcggcagtgcatgggctgagcagcagcagcgacacctatcaggtgtttaacaaaataccaacaagggacgtggtggagtggagctaaccatcaagccaaacactttctattccacttcaactcctataggagccagctctaactggagttggagtttagagtttggagctaaaccatcaatgctatagcttcttactgctggagtactacctgataaaatacagtgtgatagttgttacaaccgggtagtatgcttactactagcaataagttattaaaatacttctttttttgcttttgtatgcataacaatctcctcggataacatttaatgtgaaccccgctttacttaccaatttaggtattaaatattgtgatgtctgctagtaactattagagaaaatttcctatctagcataaaaaaaaattgctcttccctctatagcacccaaacttcaaaagttccctattgttctatattcaacacttccgttagttttaagggtgacggtgttaagtagcatgaggaaagacggttttgcccttctgtatttgaaacattttttccctttatctgttcacagtttttttgttctttatttttttcatttagtgtccagatgtctgtacatctttttttcattttgttcacagtttttttaccctttctacatctaaaaattttacagaaatttgacagcatgtctgcaacaacagcatgtttgcaacacaataatgaaccaaataaattttagagagcatccaaattcacatcctgggattagccggccgagcaggcctagggatggcctcctgtgccgccggcgctggccgtccgggggagcccgccggcgccaatggctgcccagggggtcgccatcctcgccgcccggctgattcgccgtcctcgccgccggccatgggggccgcccgggcgctggcctcccgtgccgccggcgctgccctcccatgccgcgacgggctggcttcccgtgccgccggcgatggccgtccaggggagcccgccggcgccaatggccgcccggggggtcgccatcctcgccgcatggctgattcgccgtcctcgccgcccagggggtcgccatccatgggggcggcggcaatgtagggttttgctgaaaagcgcgcgcgggttgggaaaaccaggtcgtggttgcgctctgtcccggagaaagagcgacgaaaaaaattcctgagggtgggtccatgcttgttttgacggtggaggctaacgggattaacggaagtgttagatagggaacaaaaattttgatggtgcatagatagggaacttttgaaagttgggtgctatagagggaagagcaatttttttttatgctagatagggaattttctctaactattattggttgatattgggattcatcttactattaagttgataaataaacatcgtggttacctttacccatggtggagggtgagatagggtagggaaaacggatggacaatttgttatttatttttgaaaaactacaatttggtatttgtgaagagtgcataatggcaaattctgaagaagtgtgcgacatgaaagaatgaaaccaattagtagtaacaaactttttgtgcatgtagcttttttccttatagaaaacgtagtggtataagtgcaattacctttaaggcatgaacacagatgttttaaaaaaaacatgaacacagaaccgtctcaaaggcagaagcctggctgaaagagcagtagaggctgtatggtgcacgacaatccgtttgccattctgcgtgtagtttgtacgagtcgccagacgatcccaacagggcaacgcaactggcgtgtctctatagtggacagaaacagggcattgctacattcctacactacgtgctaccctgtatagcagcacttgcccatctcattgatattatccctttttattatatataccattgagtttatcaatatttatacaatatgtcatcgggtcaagtctttttttaattttttttccaaaataaccttacaagcatacaagattgacaattgatttttgagaaaatcacgattttttgtgtagccttgttagacaacatagaagaattacaaatttgaaaactacacaaaataaattacaaacatatccttgatgccaaagtcattgatatcgagggcctattataaacaagtttttttttaaaaaataatatatgtttagtcgccagccaatcccaacaggtaatgcaacagccgtgcatgtctctgtagtggagagagaggacgatcaaaagcgctacattcctatactactcctaccccgtcttaaaaaaagattaatcctgggtataaatctggacacatattatgtgtgtttagatttctagctagacttatatttagattttttttttaatggatgctacgctgaataaatagccctttccgatctgagacccaacaccggccaccactatcgaaagatctcgatcgatctcaatccttatctgaagccacacggcatatcctactccactgtccacctcaatcgtcactcgacgacggcgacggcgaaatcaggaatttttactcccccgccacatatgctgatcaacgcaaataaatgaactaacgcctgattagtgcccaagtcaaaggtttccgttaagtttattacacggacccaattcatgcatgcgctgatcgctggtcgaccaaacgagtggaacgatcctcccgggcggctgtgatgactgatgagagatgtcgtcatggcgaggaaacgaacgacgcccatcgccaacttggcgaccactcgccccaccaacaccacacacccaagccagccatgatgcgaaacgagcgggacacccgctcacgctgtcgcctttgctggtgcaggagccaagcaccccattctccttggaccatcacccacgactgtgtttagttcacactgaagtttaaaaatttggttgaaactggtacgatgtaatagaaaaattgtgtgtgtatacaagatttgatgcgatgaaaaattaaaagttaaaaaaaatctttagaactaaacagggcccatgtttcgtttcccctcctctcgccatcggtgaatgatcccaagcgtgcgacgcccacggcgctgtctcgcgatctctctcacgcgtggatcacagcaccacgacggggcggttgcaaaaccgtagctagcctagctagccggccacaaaaacaaaaaattcggtcatattctctcgtgggtcgcatggtgcagtccagctcggaggcaaggtgatacatattcttctcttctcacccgggtcacactcgtgcgtgggtccaggtacactctctccacctttcgctttgttctttcctttgttaccactttctttcctctactagctgtgcctgtagtagtgtagtgtagtgtactgctgctgcaaagacatggcgaaagaacacgaacctaacggcgacgcttttttactcatcaaaaggcaggacaggcacatgtgaggtgatgctcctcccgctgtgcacacaactactgtgtgtctgtctacatctaatgcgccattgaaggggcgcatattgggcgccacttgtgctagtaccaggtaatgattatgtgtacacttgtatgtatatcatgggcgtcgctgtggccactaaaaacattctccagatgagacaaggactggtgatcttgatgaatcttgaggtgagagagagattgatagagacaaaacttacaggactcgagcaagaatgcctggacagtgtagccaacggaatatatatgctggataacagaagaatggagggaacctttcacagttgtgttggcaatggcacagcagatacatcatcacagtatggagtatggatcagtggatgatatgtggctccttacctctatcatgcatgagggcacataaaaacatgctttcctgcatatacgtctagttcaaggctacaacaagcacaattacaaccgagaaaacaagaaaaaaaaatgcaaacatcaactagtaacctatccccagacatctgaactcttttcttgcccttcttcagtttttccttcttccaacaattattcacatgccaatttcgtgtcgaaactgctcaaacaaatagcgaaagcctggaaggcagagagaggatagcggtagtccattgtgaacatatcccttgcaacttttccaaactgcagaataaccttttcggggtcggctggaccaggttgcgaaggagttggagcaccagcaggaggagggcttggtgcagcaaccagctggaaattcttcactgaggcaatggtgacacggccacggaagttcaggcaccagcactgtagctgctcatgccatctcgggggcttgttacggagcactaagggcctctccttgatttcaccattgtcatcaccacccattatagaaccactgatgtcagagaagcgagcactactgaaatccatggatgggtccatgatggacttagagaaggaggtggtgctccggaatgattgagagaaggaggtggtgctgcgaaatgagtcctccagagctcgaggtacaatttgctcaggctggccagggactatgccaccaggctccaccgaggaggcaggtatggagtgcatcatgcaacgcatccgtctaggacctcttgtgccaaggacatttagttcatagctcacctgagctatgttataagtaacagaaggaaccttcggagaaactttcgttgagttaaatctcttgctggtccttccgacgtgagggactacagccccattgtaagggggctgtgtgtcataaattataaattttgtgccaaggaaatttgacctggaaatgacagtgctagggtttatatattatgaaacaagcaaaatggaaaataaccatcttcaatgaacatgataattacctcaattttccaatattagttctgctcgaccttgagatgttgccagaaaccattgaaatagtgtactctgtgcaagttgttttacggtgtcttttagcggctaagacgaatttcccaccttccgcagtaacaactgcacaaagagaatgattcagcaaatttgattaactgaagtcagataatgcgggcacttggtcatttcataagaaaaataaatctcatggttgcaaggcctttgttttgcgggaaatgtggaacaatgactcaatcattcaaacattggaagttctttaagaatgaacaactttcccgtccttaggcatatgcacaaaaggaaagaaagataaagctaataagggatgcaaagtgcgggagagtaacataccgttgctaaggcacagatagagatggtaggtggattttgatctattcctctttatataacattgaatcataccatctcgaggaccaggctgaaaaaacacaaacaataatctatcaagctcaagcatgaaaaaagatagccactgctcatacttagaacctcactcaacaactttgatttaaaatttataaaactgaagggtgagaactaatctttcttatttacctgctttatagagaccggaaaggtaagtttcccacaaaactctgggctcaacacagtctctttacacatttccctccatgtcctacaaacagctgcaaagcagacgacattccttcgggatggccatgtactctcatcagcctccagtctccgtatgacctcacggaggagttcgggcggaagacttgcccagcggctctctgggattatagcaggtgagtcatcgagctcatccaatgagctctgagtcttccctttgtgatgcccagtaagtccataaagacttgcaagggtcacctcaaagctccttcttgacaagcttccaaaaccatcccggacatcgcgaactatgctacgaaacgacatctaaaccagccaatgccagataataaggcatacgatgccctacaaaatatgacctgccaattgcaaataggaaagagtggttaacaatccatttaactaaactttggtagaaaaatgagcaagagtttaccacacctcctttgaaaatggttagaaggttagatactgtacacatagaagcaaccgctactagcagtccctgcaaaaaacaaaagattcttgattagataacatgtgaagtatgtactagatgaatttgactggcacatgcttagaatgatataccgctaaatcaacctagaccttgtaacaaccaacaaccaagtacacctatcctagccagcagttaaaggggaataatcaagtccatcaccagcacatactttcctcctacgtatatacacaccaagcatcactttgggcacaagaaaactatgattcttttcaaattgaggaaattgctatcccaccactgaaattaacacggtttgccaaccacatgacacatccttctgcaactaaaataaagaactttccatggaagaggactgagcaacagaacattattacacatattaaaatcgcctgtagattgctgttgcatttcgaggtggaaatcttgcggtttacatgacaacccataccctagactaggaatataataaagatccattatttatctccaatttttttatagacaagttgataaatttgatatggtctacgcttagatacaggcctaactaaatacgcttcccttcgtcaactactgcaatgcgaccggcaaagaaaaacaagaactgtgacagagacagtgaaggaaggagaaaaagaaaacccgcaagttcacatttcctctcgaaatttctcctgaacaacaccatatctaccaaatcgcacccctacgatgtaccgatccggccagccaagaaggtcccgaaaacccagccctcctccaccgaggcagctactcaccgaacaaccataagccccagaaccgcaaacaaaccaagcccaaatcaggtaagccagacaagagcactcacattcggccgagtgggagccccgccgccgccgcctcaaacctgtccgctgcacagagctctcactctcacaaacccgaagtgcccgctcctctcgggcaaggcaactccacccggcaacgcggcggagggggagacgaggagttgcagtggtgggcgggcgcgagcgaagaacagcaagaggaagaagaagaagaagaagaagaagaagaaggcgaggagtagaggagaagagaggaaagggaaggcgggtgtggggaagaaggctacaggctcgggccgcttttgtttatccgcgctgcggtgcggtgcggtgcggtacggtggtgggggtgggtcaagctgaccgcgccttttccgttccgtcgggggactctctaacggcgttccgtcactccacgacacgtcaggtggcagcgcgtacttggccctgccttggcttggcttgccccggcgctcacgccaccaaaagcggtgggcctggtgcgacggacggacggatggatggggtggatgggtgggtggggggaatgtgtgcgtgcaacgtgcaccgttgaacagatgccaccggaacgcatcgccggaggggagttgaagtattgcaatttgcaaagttttttctctttgttcttaaaaaaaagttttttctcttcaaaacaggacagacacttagtgaaactttcatgtacgagttattctttaggggacaccaaggaggacttatataatgatttaactataagaacaagttggaattttaaaatggtttagttaaggactaagtagtagtagaacttgtatggacaaccatgaaactcaggtctgaccttgttgctaccgatagtagtaggagtacgtactttttttttagaacttaggagtacgtacttggattgcagttgttaatgacgatgtctttttaacagctggatggacttgataacagtatgatgtcatgagcagagtatgacacttcaataggaagattatccgatagcaaatgatcaggtgattagaaaatcttttatttaatgtaataaaacatttcaacctttacttaaagagttacaaccaattattagaaaattcacgaccatagaaaaccctaaaggaccgtgatgaattttagccgaccgttgaggacgcttttaactgcgtttcatgagggtcaattaattgtatgctcgagtatttcaacagtggtgctggtggttagcatccaagtacactttattctgtttttgcttgagttcattgtgttgatcgtaaaggcatgttgcatactcctaatataacggtctctacattttagcctgcgtagaggatcagctgatcacctaatcaaacggcaatcccttgtgcaattgattgttccatcatgatcctattttgagtattttcagtaggcacgctgtgtgacactcgacggcactttgggcgcaaagtagtgagtggcagttgctttcagcattgtatatatctagagaagtatagctaaaacactgcacagcatgtccagtactatagttatatacgcacaggccccagaaaagtacctacagcgacttggaaatcagaatctaaacgtacgcttaaagttgtgacaaagagaagcacacaatacgtcgccactatgccactactccatccaccaaacatttttcatatgcgaaaaaaagaaatccatttttttttctgatcgtaggggaatccaccaaacagcattgtacagtcgactcgtacgtatggcttgtgacttgtctataagagatagcagtacaatgtgcgcatattttctttttgctgacccttgaagtctgaattctgaacactgcactcaagagcgcagaaaaaacgagccggcctagctcactatacggccgtaacatgcgggtacacgttttgactagagaatacacacacggtgagatcgacaaaaattactgggactagcatagctgaggaaaaattggctttgggagcagtaaaaagtaaaaaagcctcccactttttcagtctccggcgaggcgacacgcgctctgttccggtattcttgcctctgaacctttgcagccagtcgatgcgcgggtgagtactccgtcagtgtagtttttttttttttaagaactcggtagtgtagtgtgaggagtgtttgaatggggtggatgggagaaaatactactagtaaaacatgtgaattatggtacgattatttaaatacttattattttaaacttaaaatttaaaatggtatggttatttaatcaatttttaatagaatttgtttggacgggagaagtacgacgtcggttgttcagttcagttcagccggagacagcgaggcggcaagtcgtcacgacacggcgccctcacggcgcgcgcggcgccatcgccgttagctcagcgggagagcacacgggcgcgcgcggccaggaagcttccggccggcgagcaggcctgccgcgcgcgtgcgctgcgttcagtgaccggagatgtcagtcactcactcaggtgaggggccagattagatttggatcaaatgagacggcagtttttaatgtcgcggcccggggcgaggttttggtggcgcgtttctgtcagtgatctgaacatcatggcataatgataaacaaggacaggcctatttaagccttaattcgccgtgtttctgaaaaggaaaaaaaaaacaacagaacttcaggtttcgagaaacagtggcgttgtgcgagacgtgccgtacagaaaaggatttggcgaccaaaggatctgatagattatcagatggttggatgaaatcatcggcttcgtcatttcaaccactacaccatgtaaacaattccatctgcttgcgtctgcgctaactaaaactccttcgaggtcgtcgcacgaatcaggccggggcagacgataagatggccgtacgcaattgccagcaatcctgatggaaattaaaacaggaaaagataaacgcaagcaactggtttatcatctcgatttctcttcattatcttctcttgtagagaatgtagttagtcaaacttcttgtttacaaacaaatgatttggttctggactgctgcagctaaaccctttgctcgtattgtcaaatcttgcagcttgtgtagcatatgctgtcagattaaaagatgcgttggtttcatgcttctgtacccttgcatacgacttttctgcttttaaccgatacgtttgtgtcaagatgaaaagaagaaggcgaaaggcagattgatgcccccatgcttctttttattcaacggcgagatccgtggaagccagggcacctccctactactactacttctacacagcagtataaacgtttgcagcataggcaccacatccacaagaacgtagagctcaccatctctttttctccctttttctgatggcgataaaaggttagacttttggagaagaagaacgaggcaatatataaaacacagagaaagaaaatgccaagaggggcaatacatatattcgtcaggtacaaccacctattcaggctgaggacatctgtgccgaccaaagcttacttttttttcatctgcactgcatcccaattgagtcactgagttgcctttcgcttttgtgaaagctgcgtggttgtaataagcgtcgtagatcatcatcagatggcgtttttcgaatactcaaatgcgtttcgtgtgcataagaaattgccactataacgtcgacgaaagcggtagttcgaattggattcgaacttcttcctatccatgccagcgtccagaacacaagacaacaaaagggtacgtgttactgagaggaggacaaaaggcggaggagggcggcaagatggcgtttcgtcacacataaaaacaaagatcattctaatattactatcagacatgcaaatcaaggataaatcatgtcacgtcaccctataaaatggaagaagcaaagaaggtaaacggaaatggaaggcattagtcatacgaactcctggcttttagacgaaaaggattatttgggtgccaacaaacttggaaatcgtaatgacatatcagttaataatacagctatgttatacttagtcctgttttatacaaacgaataaacgatcccttcatgaggcgttgcttttggaattttgaccgagataggagatttcacgaaaaaaatattttcaaggcctgagcaattttcagaaaattaattgtagatttatagaatttacataggagctaagcctctctctacttgttggcttaagccacaacaacataattaaatattaaaacttaatattagagttgattctaggtttttatttaatcgtaatctattttccagtctttaaatcttaacttttaaaagctatcacagataaataatttacctagaaattaatttgggttgttttgttctttttcccggttaccaggtactctgtctatcccatttaaaaagaatatagtaatacgtatggtatgttacatcctatatttttttttgggggcaattgtaaatttaccgctactttaaatcgttattacaaaactgccactaaaaaattacaaaaataccactagaactgtcatttgagtggcatccttacaatattgaaaaaaccggtgacaaatttgcaaatgccccatattttttgattttgctatatatttgtcgacaaattttttcccaaaaatttgacagatgtaattacagtacaatcgtagtgtaattacactgtaacttgtatgtaattacactgtaactatagtgtaacttgtatgtaactttcaaaaatctctccgtaacatgttattttggtaaaatggaggtcgtgggaacaaattctttcacatatgtgtgtgctataatttgttttcttcctcaccaaaacaaatcttgtaatagatctaacgattcaaaattatgtgaaacttacatataagttacattgtagttacatgtaagttacagtgtaattacactacgattatactataattacatctgtcaaatttttgaagaaaaatttgtcgacaaacatataggtagtcccgatatttttttatgggacagaacagccgaaacatctaaaatttacaatcagcagaaagctgaatcgtgctatcctggcccacctaattaggccacacaagtctgaaagggtccactttgactcccttaaaagtaacctgaatctaatccgtgaccctcaaccgcaaaactggatagaacgacttcccaaactattgaaaccggtgcaatttgacttccttaacggttttggatggtggtttcactgacgtggtgcttacgtggcggtgttgatctagtctggtcttgatgtggcgcttaggtggcatttaattaaaaacatatatgtgggacccatttgtcaaaaaaaaaagtggggcccactgacatgtcatcctctctctttcttcttcctccccctctttctcccttctctctttctctccccttccaccgtccacggggagcacggctggagcggcggcagggcgggggccgaagtgctggcggtcggcgggagctgaagcggcggcaggtaggagctaacgcgggtggtggcggaggagaaggaggcggcgacaagaggggcttgagtggcggcggcggtggaaaccgccccacgccacagacctccaacgaggcagctgcggctgcggctgcctctgactagcgcgctggattattcccagcctccgtcagctccagcccacttccgccaccgctccagctagctcccgtgtcagctcccgccggccgtcaccactctggctctcgacggcggggaggagcctcgacgacgggaacaggtcagcgacgccgaacctaatcgccttcttctgcgcctcgcccagcgtctccaggaactcctcacgccaccggaagccgcactccccatgatggcgcgcagcgtcaagtcggtcagcgtcccgatgatctgcctgctcacgttcagtgccggcagcggcggcgatggcgccaacgagcacacccgccaaagagtatcctcaccgtggtgccgatggagtccctcactgtacgcccagccatagaggtcgaagcccttgggctaggcgccaggagaaggccgagctccatcctcgcctttggccatgatggtatgcatgtagcgatgcctgccttgggatgaaggcgaggcatatcatcaccttctcgacatgatttttgatgagcaggaagtaatcgagctatacagctatacacatcctcttgcttgctcgccttctcctatgctgctacattggtgtgtttgttgtactgctgctcgactctgccgaggctgacccgtggagcattgtgggggttggccggattgccgggctgggttcgtggactgcatcctcggagaccgccgccatcacgcatgcggatacgccgaggtcaaggtcgatggcgatggggaagctggcgcccgcccgctgctaccgcgtcagccatcgccgccgccgccgccgccactccggctcccgcttgccgtcgccgcccttgcatgcagattacgctacgagagagaaggtgaagagaaatgggggagataaagagagagaacgtggagagagggagggggaaggagagagtgaatgacatgtaggcccacatgtcagtggggcccacaatattttttatgtgtgaatcacatgtgggtccatagattttttttaattctaatatcacgtgggacgaaaactaggtcaacatcgccacgtcagcgccacatcagcaaaaccaccctccaaaaccaccaagggagtcaaattgcactggtttcaatagtttagggagtcgttctatccggttttgcggttgagagacatatattagattcgggttacttttaagggagtcaaagtgaacttattccagtctgaaagtagggatctgaaagtctcaatttgtgcaaattaggcctattaataaagcccattgggcttccaggcgattgtcgcgtgggcgccgcaaccgagacacagcaaaaggccttaaggccgcatctcaccaccaggaaaaaacgcgagcgcatctgaagccgaagcgacaccagcggtgttagcctacccgcagcttggcgagttcagttgggtaagctagggtttaggtctcggcgcgcggcggaggggaggaggaggcgatggcggcggcggcggcggcagcggcggctgaggaggagatcgcggtgaaggagccgctggatctgatcaggctcagcctcgacgagcgcatctacgtcaagctcaggtccgaccgcgagctccgcggcaagctccatgtatgtaaacgctcctgcttctcctcctattgtttgttcttcgaatttcgtgctttgcttgtggttggcccttctctgtggaggggaaatacggggaatactctactgttgggaacctgattttgctggcttggtgtgacctgctctcttgtagttacagatgtaaggcgacgactcgctttgtatggggattttggtttgtctggttgataccacggtgataatcctaactagttgtggcaatctatgagccatgtattcatgcggaacaaaattacagtgcctctgtaaaaaaaaaattgtgaggaaggataataagcactcccgtagttgacattgtgtgggaatttgtcgaaattgtgtgtgaactattcaggatagtgggggtagcagtcgagcaggagatgattccaggctttacgtgactctcactttaataaccccttagcatcatggtgaggttgtgcaaatttgtttagattctcatgttggatgtgaatagcaatgctgtatgctgataaaattttcaattgtacattgccttgcaatgtctttggttcatgatactctcaccctttctagtgcatctgtacaatttattctgcattgttgagagctgagatccatattataacataatatggctgggagttgggatggctgttgctgagatgtctttcttgtacctctttatccaggcatacgatcaacatttaaacatgattcttggagatgttgaggagatcgtgacaacagttgagattgacgatgagacatatgaagaaattgtgcgcgtaagtgttttgaccttttgttgcaaattttgtgatcagtacttttgaaagtcatgctataattgttttggttaaccctgaccattgattgatgatggaatatcaatgtggataatatgtttgctttaacccatgcacatgagttgtttggctgccaccttgtgcgtgccactacacatctatattgttgtgcacatttttttctcaaagtacctatggtgcttagactgctgggcatatagtgcttaactgctggtttagtgtaacataattgcggttacatactttttattgggaataatctgatgctttgggacatatttcttactgctatattctgaaatttctggtgaacatgttgatgctgtactaactattgctaaatcgtgtctttttccagaccacaaaacgcactatccccttcctttttgttcgaggtgatggtgtcattttggtttctccacccctccgaacggcatgaagtatgaaggaagctcctgccgattgtcaaccatgagtaatgtgtattttttaatcaatggcatgtgttatgtgctgaagtgctactatttctgatggattctagttttagcatatgatacaattgtgtaacaatttctgatcgaggtgctagtttctactgtcatgttgaatcaaccttttgttaccagattaatcaactcaatcccgaagcactaatatttgttgtggtgatgtcttgcgtaatttttgtagatccacatgccaagaacaccctgttccaatctctattaaaaaagagccagcaagttgtaacatttttacagcgtatatgattcacatcacaacacccagccaaacagggaacgtatcaccgtcccaagacttatcacagccaaacagccaaacagccacacggcagcggtgtctccagggcttgcagaaaagacacattttacatgatcatttcattagctacaaaaagagatctataaactattcactgaccagcaaagtcaatcttcattccagccatgcttgaattcgccccaaatcctcacgcccggtcatgaaattgtatccatctaaagttctaaacagcaagccaacaacacaaaaagttcgacacaaagtattagccaaaaatattcgaatttcttcgggaaacatgaatggatttaactaaatttcaccacatagaaaagaatgaatttagcgaaaattcaccaccatagaaaagagaatgcccgggatcaaaccgaagattcgattcccaatccagcggagagattgggaagaacaaaaaaccttttcatgattcccaatccacatcaagtaggaatatttctggtaactgaaagaggtcaaataaaggagagggtgaaacggccggcgccatcccaagtcgtcttcctccttcgctcaacccgcagaagaacacagattcgaagaggcagaggcggcgaagagacgcgcgagccatgggcgtcaccaaggaggatgtcgaggccgccatcacctcctccctcagcccttccagcctcgtgagtctctcttccctaaaccctcgccgcttatccatcatccttttgccgttctaaaccctaactgccgcttctgctttggttccacggtttcaggtggtgacggatacttccggcgggtaattcctcacccccaaactccaattgttcttcacctttgtataggagtatttaatttgcttgcttccattgttacgaacgaaagagaagagatcttgtgtttggtgactggttgatcgattggtgtgaaggtgcggcgcgagctacgagattgaggtggtgtcggagaagttcgaggggaagcggctgctggagcggcaccggatggtgaacaccgcgctggcgccgcacatggcggagatccacgccgtctccatcaagaaggcgctcacccctgctcaggcgcagccccagccggagccggccgccgataaggcgccccaggcttaagtagttcttgaactcacacctccaaactgttcgatcacatatgcaccacgagtgaaccgatgcacttggtgtagcgtttgtcatgggtgtttgagatgtgcgtcagctctctctgcttgaataatgtgcatacaatggcagaattggaatgatactatgcttgactgcttagaaatttcagtaactttgcgtgcttcccgcgtcatgtgcttggcagttgatcctatttcacaattttgccaataaattgccgtctagataatgatcctatttcgcaactttgccgataaattgtcatctagttaatatttagtcctaggacttggattgttttcccctcgaactaggttgtttgattgtagagataaagtgcagttgcttcatgattgatctagtattgtttattgctgctactataagttgactggctcacagcctgacatagttgctagtatctactaggggttctataatgccacattgttttacttgagcatttagtctctgtatttttggtgaagccgacaaatattaagaataaactattctcactgcttgctggaccaataaaactggatatgatcatacaattgtgtttggtgctaggtgtatgatggcttttagtttatgtgataagtagttctcagctagtttggggacaataaagtggtaactagtttaaaatcatatcgttgtgttgtaagtgcatttgctgcttgcactattaatttcttggagatctgcatgcatgctgacatctgatagaaaatgaaccacttcccttcagcatttgctttgcttctttggtctgtgttggtttcgacttcctttaaagtgaattctatcagaaggcctgtaaaaatgatttttataggttgatgtgttgatactagagatgttcttcactgagatgtttctgtcagaatgctcattgaactgttagatacttctcttagttttggaattggtttcacaattgtttgaaagcttgaagcaataatcaacacagtagatccaaataggcgaaactggtaatgtcagttgggttaatgtgagtccacatgtctctatgttttctgaattcagaagcttatgttcattccttttttttttttggaactgaacttatgttcatcctttgcaacaacttgtagagtgtatgtacggcacctacttgtacatgtgttgtttcaaatgattcgaaactgaaaactttttctagtgtaattctgacttaaaattaattatattttcccctgttctgtttgagcattatatgctatctgtagctttgatgcaaaattccatatggaggctgtcaatctgctctgttcgttaggtttgtacgatccttggtgcttaggacagcatttttttttcgtagacgggttcatctgaaccatatttactgaatggtgtccataaaagaagtccttttttttctttttcgagggaacaacactgatcaccgatcaagtgaacagtataatgcatagtatttgtatttttatagagatgtttaatggcccttacttctggcgacacatatggaggctgcctctatacaaacagtaaaccgaactgtacggcaacactgtttgttctctactgtagcgatctatcttagttcattcgctgcaaatccgacgcctgaaaataccccaaagtcacagatacagtacacctcctaacttcaccgtggatcccaatcccacgccacatcccacgccagcacaggagcgtgagcggttgcagcgagagccgctcgcgtcacttccccgtccatggacggtgctccaagttatggaccaccccgtgcagcatcttcccaaaacgcaccgaccggcacaatattaaccgtgcaaagagccagaatttggccacgaagcgagcaatctcaagtgtggccgggttccgcctcccgcgtcgccagttgtcgatcaggcgcaacggcaacggcaaaggcaaagcagtcgcctccgaggaaaagtccgcatgaactcgcgagaagcggcgggccgtggcggggctacgtggtacgtaccgcctcccgccgcgaccgcatatatgcggtgcgtgcgcgcaaacacaacagacgccgagagcccgcgacacgggagacgggagtacgggacgttcgtgtacacccccacacgtaacacgcgtgcgaaatgagcgaggcggacggaggcgagggggcgaagccgaagcggccggcgccgcggctgaacgagaggatcctctcgtcgctgtcgcggaggtccgtcgccgcgcacccctggcacgacctcgacaccggtgagctcactgagcttttgctctctctctctctctctctctctctctccttctctcacaaacatgcgcccccgcgccgatgaagatcatggcccgccggcctatctgccgatgctaacaccgtggggttttctctgtatttgcaggcgctgacgctccggctgtgttcaacgttgtaagcgccctcgccacatgccacgccacaagggattcttcccttggatttacactcacttgactaacgatgcgtttcttcttggttttgcgtggataggttgtggagatctccaagggaagcaaggtgaagtacgagctcgacaagaaaacggggttcatcatggtctgtaatcaaacactgtatttatacactcacgtcagggaccatatgctctgtggaacttttttaccatttgggctcttgttgtacaggttgatcgggtcttgtactcgtcagtggtttacccccacaactacggcttcatccctcgaacgctctgcgaagacaacgatccaatggatgttctagtgctcatgcaggtgatcatccttcaactgtatatgctgatgctgttataaattgtgcgataatcactgcaacacatgtccaaacgtttaattgcaggagccagtgattcccggctgctttctccgagctagggccatcggactcatgcccatgatcgatcaggtcggttctaccccgcatccattttcaatacaaattcatcgtcaaccgcgactccagcttgaccgattggagctaaatcttcaatgagacagggagagaaggacgacaagatcatagccgtctgcgtggacgatcctgagtaccgccactacaacgatctcagtgagctttcgcctcatcgcgtccaggaaatccggcgtttctttgaagactgtatgttcctactagttctcaaatcgctgcactgaccaatgttttattcttcttcagctaactctgtagtttctgaacttattcagacaagaagaatgaaaacaaggaggtcgccgtgaatgaggtactgcctgtgaccgctgctcgggatgccatccagtattccatgtaagtgatgaactgtccatcagttcagattttagaacgatatattgagtagtttacagtttacacgtgtaacagcaagatgacatctttgcaagtttgcagggatctgtatgctcagtacattgagcacttggggcagtagaccagtagtataacaccagaacaatccttcaccgccattgatcatgtgtttaatagaagtgccaaactaccttgaggtactaaaattttagtgtaaaattttgatacccgcaccgcaggtacactttctgaaggaccgtaaaatatctactcaaaaggggtacccaaaactgaaaaaatattttgccaggaagacaggaagcacaggtttgccttagtgacttgttgtattagtgctttagctgctagagatgcacggtgtatgtattttgtaaataatagtagaaaaggccttagttgctcatgaagctgttccaggcctcaacactattacactgaattttacaaacgtacagtaagacgaataaaagaagtgcctgacgaatcatgcatgttacagtaaggccagggagtccattcgcacgccttgatggtgccagatcgatcaaaccgagcttacttcgcctgtgcagcgtacaaccctttgatctcctccacatcttcgaagcttccaagaaatattggggatctctcgtgaatcttggtaggaacgaggtcaagagcctgcattgccaatgtagcaacaagtttgaacaatgtatcaggattcaagaactcaagatgctaatactaaacatgcatgctgttttaatcaagatgaaatgaatgaagaaataagtacccgttctttgcctgtgaaagactggcctccagcctgctccatcaggaatgacatggggaaaacttcatacagaacactgtaattccaagatttggtgaattcagaattgtttatcaatatgaaattggaagtaccataagcgaagtgagatgccgagagtaggcttaatgtgtaccggagttttccatttgggctcttcttgtctgcagggtacaaaaatactcctccatatagcaacgtacggtggacatcagcaaccatactgcaaatcatcaggaagcaatactgtcactacaatgttaattggtggtgattacatcctattagaaacttttatgaatcacaacagagggtcaaaaaagctcctattaataactacagctaggttatatacattgtcacccaaaaaaaatgatcaccttccaatgtatctcaaggatttaggtgatgaaccatccttagggaacttgcacttctccacaaacctgtaaatgattgttgtagattttagctcaggttcttcaggaagtacactattctgaaaacataagtagcgcgtactttgcggtaggctcgtcccaatttttcgcattcccttcattcactgaataaatcttccctttctttggtatctgcacagagtgaagcatagaacacacatatgagtattttgcccgctcatcagtgtacattaaaagacggaagtatcactactaattgtctcataaacagttagtcaaaaaaaattgtcttataaaccttgatgtctggatgagttaatatgaactccccgagagatggatcaagtgtgaagccattgacaccatttccagtactcagaacaagctgcatcaaattagttacacaggttatattcaggtgagaattatgacatttatagagtaggatggattaggaggtcgattaccgtgcaggaactgccgtacatgcagtatccagcagcaaccatgttttttccaggctgtaacacgtcctcaagagtcacattctccttatctttgatcatgtagatcccaaagatctataaaacaagagaaagaacatgtagtacaggaatccattaaaggtccttctgacgaatcgaatcgagtattgttcgaagacaattcaagttgaccctagagtctagaatccgttaaaagttaagacttgctatcaacttttcactgtcacactcacacaacaccttgctgctgaaattttcagtttttgaaagcagtactcgtgtcctcagaaaagcatgctagcagtaattcacaactgatggaggaatagtatttttcatatgttgctttggccaaaagttctccctttttcacgtcaccatcctagaaggatgccaaaactgcaaattgaacagcgacttgccgttcttccgagttgtcagtgttatcttttcggtttggtggtttcatgtgtacgcaccgttccgatggagacgccacagtcgatgttggaggagccgtcgagtggatcaaagcacacgcaatacctgtaaaaaaaaccggcaccatgcatgtattttgtcaggaaaaacagaacaacagattgctcgaatcaagaagcagagaggtcgcgtttctgatccgaagctacgcacttcccacgcagcgcagggtccacgaacgtcgcttcctcgtcctcctcggagacaagaacgcactgcacgcgatcgcagtgaaaaaccataaatattgagaacactctgagcaaagaaatggtttaaggggagaagagagtgagttcgtacggtgcggccgctgctgacgagagccttgacgaacacctcgttggacagcacgtccagcttcttctgctcctctccctggtcacaccaagcaagtcctcagtcctcactatctcaatctcagagacaagaaactgagaaagatgacagttattgccaggtacacttgcctgaacgttggtctcgccggccagcccgatgagcttggcgagcccggcctgcatgcacaacccgagaagttttgttcagcgtgccaatcagtagagtgagaaccgagagatccgtacgcctaacgatgaaacaacgggaggattcgtgtgaccttgttgacggcggaggcgacgaacttgcagccaagcacgatgtgggagaggaggatggtgaggtcgccgcgtgcctccgggttgcggctctgctcgttcagcacgtaccgcgtgatcgtcatcaggtccgtccggtacgcgtccgcctcgtgatccatctccgcaccactctcctcagctaccgcgccgcgcgctgttcttctcgtctgcttactctgcctcgcgctcttcccttcgcttcgcctcgcctcactctccggctgctcgggtcggctaaaaagcgcgcggtttaagtgttgagtattggtcacacggcgcgggaactgacccggtgaggtgacgtgacgcgggcgcggtgtacgtattgggcgttttttttaggggttttgggaggtagcgaggggagaaagtgaggctgggagccgaggggcgaggagctccaacggaatcggcgcggaggcctatcccctctatccgcgatggctggtagcgcggtgaccgtgtgcgtttgtggtcgtcgcgtttcgccccccaggtgatcgaggcccgagctaagtcgagctactagaggcgagcacggctttgtcctgtaccgccacgtactacggcaacgcagcaagctagcgggggtgtagttgttgttgagcagaggcgccgacgccgacgccgacgtggatggtgcgagattatgaccaagtacgtcgtgttaagctgtgcgcccgatgtgacggcgaaacggttaaccggagagggggtctcgcaaatgggctccaagcctccaactctccaaggtagaagttgtttgcctttaatggcctagcatttacgcgtggaatatggcaccgggttcgacttcgagtgagagctacagggcgggagggggactcgcaggcgactggacgctttaccttcacgctaggctgctcgagcttccggtcagctcggggaagagctgctttaccatggcagtgtttagttttcccctatttctgactttccatcacatcataatacaccaaaaactttactatacataaacttttaactttttttccaaattcccaattttcttcaaacatccaacttttgttagaaataaaacacaccccatttgacttatcctactggattcgtctgcctttcgtatttagtggttcagtgaatagattcatacttttgacaagcatatgcgacggataatccgagtaaaaagtcctgctcatttattgtccgttgaggtaaagcgatggtatatgcaactcagaaagaacttgaaccgaggatttcacacggggctggtcatgaactcatgatcaactcgacatggtacgcaactactatatgcctattaccggcaatgtaatcgagtgtacctttaaaatactgtagtcatagtagagacatcaaataccaatcatatcaataacataaattacgagtagcaaacagagcgtgtactccaacatgctttgagaattcaacaatctatccagtggaaacaagatgttggcgattgctggcgggacatgcagttcaatgaatgtgttagttgctctggaacataaaccctggaaggttccttcatcaccaaagaataatagttttgacagttttactttggcacgattcacggcaattgatcttactgtagaactaaacagtatcggtcggcttctgaaaagggggcaaaaaagtgtggtaagaagtcatacatatggtgaaatttattttacgggaacggacctaaatgaaactagtaaatacagaaaaagtgggttcttatgtccataagcaaaattaacctggagtcttcatcttaaggacaggaaagtccaaacttcagagtatagtacagcattggtttgttttctttgcctgcttgtagaacatctggaagaaaagaaaaacaatatccctcaacaaaattctggagacaaacggtaatcaagataaaacttaacaaacaaaaaatgtaagttaaaaagggtccagcgattctacaactgaaatagacgaatgacagcctagacaaacaggggcttaaggttctatcatattttgctcccgtcacataataaacagactagaattatcataggctacagccaaaaacctggcataagtatagctgtgccataaccaacagattcatatatactatttacataatcaaggatttgcttatacaatatttccatggttggcaatttcttcataatagaaaagaaaaccccactaattcaacagacatatgcgcgtgaaaaatatgtgtagtcctaaacaaatgtacttgaggaatcacagtgagaacaaaaagtaagaagcactcatcaagtaaaaaagcaaacatgaaaacacatgattacctgtgaagcagcactcaggtctgaactcttctcaaccaagctatccaatctttcccctctttggagcacactctcaatagttttatgctgttcaaatattagaacataaacaatgcacatcagcaagcagttttacccatatgaaaaataagttatgagatatcaattcataacagtagataatatgaattcaagtcaatatcgtaagctccagcacaagatcgggtcattgagtttgttagaacaagaagtgttggtatttaccaatatgaatggcagagctattctataatttttttttctggtaagaaatacttactaggataatttttgtttcatccaagtccctctggattttcattaacttgtcagcctctgcagggtcctacaaaataatgaaatcaagttatctcataagaaaacattcatgcaggatgcagtgcgtgtttaagtactggcagtttggaccaacaaggacaagaagaaaatcacaaacaaaagcagttgtcttaataagtcgaaagcatataatatgttcagacaccaaccaaaagcagcaaataacttatcatatggctaatggacatttctcttttcatccaagaacaagcatagcatatttcaattgagatgatggaagaatacattgtaaaacaaatgaacttcttcagttacacttttctttgtttattgtaaggttcggttgtcctccataaaggagatggtaaaatatcccctgaccccaggtcaatagtgtgtaacaatatttgtagaacatttccattacctctgatcaatgaaaccataaacagattgtatttttgttcatggaaagctttacctgaaactttgtcaaagcatctgtcaagaaaggccactgttgggcagcatctgttgcatcttttgtagcagctttccaagagtccccgaaagccttctggtattcgtcaagtaccttcataaaatgaattctatcaataactggataattaggataattcttaactactgatgtgttgcatcatgaaacttactctagcagatcaaagggtcatggatcattaataaattatctaatcacgtattcacatgtatgtagatgtatgaaagatgacgtagagtggttgcatgaaataaatagaactgaactactcattgactaaaacattgattcaggtgtatacttgttatcaggactcaggagtttcggaatgatatagtgtgccaggtttcagcctcgaagatccattatatagctaggtgaatgaaaaggagttcctagatagaagggtaagcttcaaagtatccgaacacaacaagatgtatgttctgttcaacatagaaccaggccatagaaaattgtacataggttgtttctattaattttcaacaaaccactgcagaaacatattgaacagaagtgaagaaaaaggactgctaatgttgggtgaaataagatgcatcagcttagcatcacccttgtatgcacaacataattttttgtgcctgttcagaagatcaaatgttttatcccactgagaatagcaaggagacaatcccttattgcttgtgaatctgatcctaggtcaaatacaaggatatgcaatacaggaatgtcaagaacaaaggctcataccttattcagaagagaaaatgcacttcgtacaggatagtgatcatccataaatgcaactgcgcaaagaccattcctgttgtgtgagtggaccttgtattctgcaaatatcaggacaacttgtttacatgaccgttcattaacaacagcaaactgaattctcctgatcactagaccgaaaatgaacatcgactgcagattgcacaaacaattgcatcataactcgtcataaacgttggaatcaggtcccatattttcaccagatatccttacgacgaacacaaggtcactcttttcaacgaaatccaacagcgcatcagattgaactaacaggcaacactgcctatccacaaacgagttccatgttgaaacaaacccaacagcgcatcagattgtgaactaacaggcaacactacctatccacaaacaagcaaatagttcccatgaagcccaacaccgtatcagattgaactaacaggcaacgctacctactccatccacaagcaagctaatactgtagttccacagcccgctgatgttccaactatgttggactactatcggatcagcggtaaaagtctatatcccacataatccaagtccatgtgaagaccggatctgagcatcgggtcagaaagcaagcaaaccctaagtgcggaggcagatctgaggaggacgatgggttgtttaccttcgtgctggacggactggcgctggcctggctgggtgcgctgggcgacggtgcgcgcgacgaagacgatgaactcccgcgcggcgccccgctggaagaacccgaagtggctcacgtccgtcgcgttcgccagcaccaccgcctcggggccgcccgacccgccgccgccgccggacgaggatgctcccccgccggaggacgacggcttcagcacgaggagcgccgtgatcttcatctccgctggtgggcgcgagatctgcggcgccgccgatctcgcagcagccgcccgctcctgccgcgtcgatgcgtggatttggcttggggggcggcgatcgtagagaatagggtacgaaaaagaagcttcccttcccttctaatgctgggattcggtcgcacccccactaaccacaacgcgcacgagaataacaacactcccaggactgagtgaatgacagtgggcccggccttgtcagacacacggacgcctttgcatttggagcaaaatgcacaaaaggaaagcggccaattcaaatgaatttcgaaggaaatttcctaataaaaaggaaaactaaaaacgtaacaagaacatcatcagccatgccagaagcaaaaactccaggagaattttcggatttggtgataagtagaattcttcacttccatttcattccaacaccatgggatcacataagagtaagacagataaattacatacgcaacaccccaactaggccatgacagatctgagatcaaacaccaaccaaggaaccccatcaaatctctacatgtgcagactagacacaggaaccaccactagaactaccagggtatcacagcctctcgagcagatcacgcctaggccctctcgccacggatgcggcgggcgagctggatgtccttgggcatgatggtgacgcgcttggcgtggatggcgcagaggttggtgtcctcgaagagcccgacgaggtaggcctcggccgcctcctgcagcgcggcgacggcggagctctggaagcggaggtcggtcttgaagtcctgcgcgatctcccgcaccaggcgctggaacggcagcttgcggatcagcagctcggtgctcttctggtacttgcggatctcccggagcgcgacggtgccggggcggaagcggtggggcttcttcacgccgccggtggccggggccgacttgcgcgccgccttcgtcgccagctgcttcctcggcgccttgccgccggtggacttcctcgccgtctgcttggtgcgggccatcggtgatgaggaggagaggctagggcttcttctacaagcttcgaatgctcgggtggatttgggggattgggatgagatggggaattcgagaggatgcgaggtgtttaagtaggggagaggagggcgggagtttgggaaattttgggcggagcggcgcggtttccacgagggaagatgggtttggaccgttggatcggaggggagtggacggcttggattgcgatttgacctcgcgcacgcggatcgtgggggcgcgatccgtggggaggggtttcctggattctgattggctgggggtgggagagcgagaagtggggtgtcacgcggatcgtggttcggttttcctgtgctgtgattggctggctcgttcggtgcatggattctgggacccagcagttgtcacttgcgttcagcgaaatgttgggcccgaaagcgtaattggcctggactgggccgtacctaggcggcgttgttaatgcgcacacaaatcattttttacggtatttttggtttaccagaggttaaaatgtgcattttcacccccaaacagcgaggtgatactatcctcgcatacgtgccttcgctcagggagcttaaacaagctactcagtcccaagggggaaagcataacatccaaaacactacaagtcgttcaaatacaaataaacctttactacgtacacaaaaataagttatcttcaagagagaaaacaaaactagaggtacaatcattaagacccgcaattcggctagtagaaaattcgaaacaaaaagctttcaaactgcacgggcaaacatccttgttgcccggtgaaacccaacacaacaatccattgcatacattaggaatgccctgatgcgatgccattgtctgaaaaaactgaccgactcagacgacctacactgcacactacctggacagatttcttccagtacaccaattgacttcaccttccgcattgccccatggccaacagccctcaggtgctactgaaaccatgggacgcatgcaaacaatctgcagatcacgtctcaatcagctgataatggtacaaatctgcccacaaacttagaagcacttcatgtggacgatgcctggaccagattcatcgtattcggccttggagatccacatctgtgacaaattaagtggatgtcattagttttgcagagcaaaatgatcagcaatagaaataccaatttcaaagaagaaatagtagtgcatattactagacaaagagaactgtctaaaaacttcacaaacaatcaggtttatgtaataggagttatgtcttatacatcatgtagtatgcaacaaaattacactagtttttttttgacatggtcggtacttaacagtttgacgctaagatttccttttaaaaatcattatttctaatccatgaactaagtatatattgaacttcctagtaaagtcctgtcttggcctttgtgttttaagataatggaaagatcaagtacatctccaccctttgacacagtccacagcacatggcccaaggagcatgtcaaagaaagcaacaccaaaaagtttgttaaatgtttgcaaggatgcagtgtcttgcagacaatggactaaaaatgcattaagacacatagtttggtaatctcgttaagcagatgaaacaaaagtatatgcattgagacaatggatacctgctgaaaggtactgagagaagccaggatggaaccaccaatccagacactgtatttcctctctggcggtgcaactaccttgatcttcatactgccaggggcaagtgcagttatttccttgctcatacgatcaccaataccagggaacattgtagatcccccactaaggaccacattaccgtacaaatcctttctaatatcaacatcgcacttcatgatggagttgtatgtggcttcatggatgccag

SEQ ID NO: 10404 - DNA, 21897 bp, Oryza sativa
agcacagtggcgctcacctaaccacatttattgcggtttggctgagcgtgtcacgccgcatgtaacgcagtgcagtgcactcgtttatccggtctgtgaccagtcacagaccggtcagatcgcgggttaggtggcgacaggcgatctgacgcacgcctcgccccatcccgtcaggacgagggcttctaggcgctcgtccccagctggagctagcgtgttacctcccagagatggcacgttagtcctggtcagatatatgccaggcttcatcctaaccattacaggcaagatgttttgtgaagaagggcgagcatgtagattgctaagctgacacgtggtggacaagaatgaccgacgtgactggtctgataccagtcatgtcgtcagcagacagccacgattccacgtcgcacctgctcccggcgaaagtggaggtagttgtgggccgtctcatcagaaggtgactcggacggcaactatacaaatctccgtccatttatgaaaagggggggtaagtccccacaaaaaagagagaaatggtgcatgtggtatccccttaaaatataaaaggaggaccttgcccactgagaggggggactggacttttccagattagaaacccagaacaagggagaggctggctgatactttgtagctccttcatacacagatctcccaaaacacaggagtagggtattacgcttctcagcggcccgaacctgtatacatcgcccgtgtcttgtgtgtttcctgtctcgcgagccttccacatacagagagcttagaatctctccctgagtccccggccgaaccggcaaaggggggcctgcgcggtctcccggtgaggagccccacgctccgtcatctggcgcgccaggtaggggctctgcgagggattttctgagctctcgcactctttcgtgtgcgccaagcttttcctgttcagcccaatggccgagccagcaaaggcgcacgacctctccccgagtatgagcggtgacgacggggagccaaacccacgccgtcgagctcgtactccaccgccccctccacgccaaagtcctaggcgggagaaggcgctcgagagggccgaaggatccgcgacttcgacacccacaggaggtggagaagggcggcgagatggggagcgtcgcctcctcgtctacggcgacggcagcacgccccagggcgcgctccaagctgcgggcgcgctcctacgtcacccgcccgtcgcccatgacccggagtctccagcccaacgttggctggacgatgtggccaaattggtcatgactgcacggcagcgcctagatgctggtgggcggtcctccgccaccaaggcctctggtgctgctaccaccggctccgcatcgtcaagacggagggcgcggcgagcggcagccgctgttcgccattcggccgccactcctccgtcaacgcctccgacccgggaagatctgcgtggggaaccggatgctcgcatcagtatcgagcgccggcgtaatggccgacgtgctccccacgcaacggagggcgcctcctcgtccggagtgtcacctcaccacggacgcggggatcagccctccgtgcccccggttggtggtgtcggctgtagagcctttgtggcgagccttcggaatgtccgttggcccccaaggttccggcccaccatcgccgaaaaatatgacgggagcgtcaaccccgccgagtttctccaggtctacacgaccgggatcgaggccgccgggggtgacgacagggtcatggcgaatttctttcccatggccctgaaaggacaagcgcggggttggctaatgaacttgccacctgcgtctgtccactcttgggaggatttgtgccaacagttcaccatgaacttccaaggaacatatccgcgcctaggtgaggaagcggacttgcacgcagtacagcgaagggatgatgagtcacttcgctcgtacattcagcggttctgtcaagtccgcaacaccataccatgcatccctgcgcacgcggtgatttacgcgttcagggggggtgtgcggcacaaccgcatgcttgaaaagatcgcctccaaggagccccagactaccgcggagctttttcagctcgcggaccgagtggctcgtaaggaggaggcatggacctggaacccctccggttccggtgtggcagcttcggccgcccccggatccgccgctcagatagggcggcgtgacaggaggaggaagaagaggtcagcccataccgacgacgagggtcatgtcctcgccgtcgagggcgcttcgcgggccacccgaaaggggaggcctgcgggaggcaaaaagaacgaggccggcgctcccaacagggagcgcccaaccggcaagtggtgcaccgtccacaacacttcccttcacgacctcgcggactgccgtgcagtcaaaagtttggctgagcggacgaggaagtgggaggaggagaggaggcaggagcgccgagagggcaaatccccggcggttccttccggtaatcggcgaagtgaggccaagcagaaggcccccgccgaggacatcgatgacggcgatgatgacctaggtttccaagagcctggggccaccattgccaccgtcgatgggggagcgtgtgctcacgtttctcgccggagcttcaaggccatgaagcgagagcttctggccgcggcccctactcatgaggcgacgtgtcgggcgtggtggtcggaggttgccctcaccttcgaccagaccgaccacccaccgtgcattgcccggggagggtagattgcgatggttgtttctcccaccgtttgcaacgtgaagttggggcgtgtcctcattgatgggggagcggccctcaacatcctttcccctgcggcctttgacgccatcaaggccccggggatggtgctccggccgtcccagccaattatcggtgtgacgccggggcacacatggccgttaggtcacatcgacctaccggtcaccttcggtggatccgccaacttccgcacggagcgggtgaacttcgatgtggcggacctcagtctgccctacaacgcggtcctggggaggcccgcgttggtgaagttcatggcggcggtccactacgcctacctacagatgaagatgccggtccccggtggccccatctctgtccatggcgacctcaaagtcgcgctcacttgtctggagcagcgcgcggaccacctcgccgctgcatccaagcccgagggtggcgacgagaggcttggcgcttccgcccccgccaccccgaggcaacggatgatcacaggcgacgaggtcccggtcaaggaggttgccctgggcgacggcccgtccaagaccacacggatcggtggtcttttggacggcaaataggaagacgcgctcgtctccttcctgcgggcaaacgctgacgtcttcgcatggagaccggcggatatgcccggggtccccagggaggtgattgaacaccgtctcgccgtgcggccgggcgcaaggccggtccggcagaaagtgcggcggcaggccccagaacgtcaagccttcatccgcgaggaggtggcgcgacttctggaagccggattcatccgtgaggtcatccatccggagtggctggcgaacccggtggtcgttcccaaggcgaacggcaagcttcggatgttcatcgactacaccgaccttaacaaggcatgtcctaaggatccttaccccctgcctcgcatagatcagattgtcgactccactgcggggtgcgaccttttgtgttttctagatgcatactctggttaccatcagattcgcatggctagggaggatgaggaaaaaactgcgttcattacccccataggaacctattgttatacgacaatgcccttcgggttaaagaatgcaggtcctacttttcaacgtactactcgaatttctttgggtaaccaattaggacgtaatgttgaggcttatgtcgatgacttggttgtaaagacgcgcaaccaggaaatgttactctcagatctagcggaaacttttgagagtctccgctccgcccgcataaaactaaaccccgataagtgtgtgttcggtgtacctgcgggcaagcttctagggttcttggtctctgcccgaggcattgaggccaaccctgagaagatacaggctatagagcggatgcgcccccccagcaaacttagggatgtgcaatgcgtcaccggttgcatggccgccctaagtcggttcatatcgaggctgggagagaaggcgttacccttatttaagcttctcaaacgctccggaccgtttacctggacggaggaagccgaaaatgccctcacccagttgaaggcgtatctaagctctcccccagttctggtcgccccggagccagacgagcccttgttactctacttagcggcgaccccgcaagtagttagtgcggcattggttgtggagcgcgatgagaacaattctcatttcacgcttccccaccctgtgccgacttggcccgggagagagaagggaggagaggctcccgagccgaatggtggcccaaggcccccgacgaccggagttggccctctgcccgcttgtcagacggtgctaggagcccccgacccccaggaaggccctgaggccactgtgggaaggccgcacctatcgcccttcgaccccgaggctaaccctgtgctgacccgacccgggaaagagcagggagaagaggcccccaagccgaacggaggcctaaggcccctgacgaccgaagttggccctttgcccgcttttccgacgacgccaggagcccccgacccccaggacggccccgaagccactgtgggaaggccgcccctgttatcctccgaccccgaggtcatcagcacagaagataagtgcgccccgcgaggctgcttggacgaagagtgccccagggatgcggcccctagcgaagaggatcggccccaccgaaaggtgcagcggcccgtctactttgttagtgaggccctccgggacgccaaaacccgataccctcaggcccagaagatgctttacgctattctgatggcctcgaggaaactgcgccattatttccaggcgcatcgggtcacagtagttacgtcttaccccctcggtcaaatcttgcataatcgagagggtacaggacgggtggtgaaatgggcaatcgaactttctgagttcgatttgcactttgaaccacgccacgctatcaagagccaggccctcgccgattttgtggcagagtggaccccggctcccgagcccgtctcgatccccgaggccagcacggacccctcgcagctgcctcacaccgcccactgggtgatgcagttcgacggctccctgtctcttcagggcgccggtgcgggggtcacgttgacctctctgagcggagacgtcctcagatacttggtccgcctcgactttcgagcgaccaataatatggcagaatacgagggactccttgccggactaagagtggcagctggactggggatccgccgcctcctggtgttaggcgactcccagctggtcgttaaccaagtctgtaaggagtaccggtgctctgacccacagatggacgcctacgtgcgccaagtacggcgtatggagcgccattttgacgggattgagcttcggcatgtgcccagacgggataacatgattgccgacgaactctcacggctcgcgtcctcgcgagcccagaccccaccgggcgcctttgaagaaaggcttgcccagccgtcggcgcgacccgaccccttaggggagacggatgcgcctgaccggcccccgaggcctgtcggagtccaggcctcgggacccgaggggagtgctcccaactcccttagattgattgcttggatcgccgagatccaagcatacctcacagataagactctacccgaggaccgcgaagggagtgaacgcgtccatcgcatctccaaacgctacgtgctggtagaagggaccctctatcggcgcgcggctaatggaatcctcctgaagtgcattcctcgggaacaaggcgttgtgcttcttgccgatatccatgaaggcgaatgcggagcccactccgcctcgcgcaccttggttggtaaagcttttcgccagggtttctattggccgacagctcttaatgatgcggtcgacctggtccggcgatgtagagcgtgtcaattccacgccaagcaaatccatcagccggcccaggccctgcagaccataccactttcgtggccatttgctgtctggggactcgatatcctgggaccgtttaggcgggccccgggcgggtttgagtatctgtatgtcgcgatcgacaggttcactaagtggcccgaggcttatccggtcatcaagatcgataagcactccgcacttaaattcattaagggcatcacggcccggtttggagtgcctaaccgtattattacggataatggcacccaattcactagtgaactcttcggcgactactgcgaagacatgggcatcaagctctgcttcgcctcacctgcccaccccagaagcaatggccaagtggagcgcgccaatgcggaaatcctcaaaggccttaaaaccaagaccttcaacatactcaagaagcacgtcgattcatggatcgaggagttgccagcggtgctctgggcaaaccgaactacaccaagccgagcaaccggggaaacgcctttcttcttgtctacggcgcggaagcggttctcccatccgagctcaccctgaggtctcctcgggctaccatgtattgcgaggctgatcaaaatcagcttcgcagagatgacctcgactacttggaagagcgaaggcggcgcgcggccctccgagccgcgcgctaccagcagagcctgcggcgctaccatcagcgccacgtccgggcccgatcactctgcgtcgacgacctcgtcctacgccgcgtccaaacgcgtgctggattgagcaagctttcaccaatgtgggagggtccgtatcgagtggtcggcgttccccggccgggctccatatggctggccacgggcgacggcactgagctgcctaacccgtggaacatcgaacaccttcgtcgcttctacccctgaggggagggggtcgggtgtcaggtttcgggctcgggccaaccccgcacccccctcgggcgtgcagggttggccgggggctacaacatatgcatattcttatttctcttatatctgaatttctataaaagcagtttcaatttcctaaaggctgtatctgtgctgttttttccttttgaagaatcttgacttgaaataggtcactcgtgctcaatcctgccctcgggggctcgggtcggctaaaatcgccaaacggggcccagaaccgagccgtgccccgaggcgtggtgaactccgggggggggaatcggcaaaaacctacaatcgggtcacccataaccctcggtcaccacgttcccggcctggccagtctcgacatgtggatctccccaggcactagccccgacccgcgccttttgaggaccagaacctgggcacaagcccttattcaagctaagacacaaaaggaccacggcacagatcatcctcatctcatactcacagcaagatgaaattaacacaaaaatttcttcatttttgattacagattaagttgatctatacaaaaaagaggcccgaaggccttagaagaaagaaaagaagaaaaaactgaagaatggcgggggtctgggggctcaatccgatgcgcccggatcgtcggcctcgacgtcactgtcgtctgcaccaccggcattgccctcctcgtcggagttgggggcgaacgcaagccgaggggccgagccctcgaagctgtcgacgatatggtcggcggcatcccggacctgcgcgcgcgcgcagtcctcggtcccaggagggaactcatccaacgccatccatggagagaaattggggtccctggcctggtaactcgccaggacgagctccaccgctccttgggcgaggtccctcgaggatgacttaattgtcttctcgagctcctcggggagccgttggagggccccgaccatcttcgagaggcgctgggcgaggcctccctggttggcggcgtactttacggtccgccctctccagaggcccacttgccgaccggcgcaatctaggcgggagacggcgtcccaaagcatgccgggccctacctcgcctgccaagcggagggcttcgacctccccggcggacgagtccagcgcgccctgcagatcggcgatggtgcgttcggcagctgcgaggcgggcggctaagtcgctttcgcccgtggccgccccgccgctgcgcgccctcgcgtccagctccttcgcccgcgcctcgagctcagcggcccgttggttcagtacggccctctcggcgcgggcaccttccagattgcggcgcgcctgctcctcctgcgctgcctcgcggagggacaggttgaccgccagctgttgcgccgcggcctcggccccctcgagagctcgctcccgttcggtgagcgcgtcctcgcgaaggcggaacgtgaactcttcttcggcgcaggcagcctcgtgcgccgccagcgttgcttcccggatggcgacggcggcctcgcggtccgccagatccctctccacgacgcaggcgcgctcttccagcgccatggcgcacgcctcgagggcctcttcgcgccgccgggacgccgcttcggtctccgccgcccgctgttctcgggcagcggcagcgtcaagcaccccctgggcggcgtcgagcttcttccctagctccgcctcccagctcccgtattaaaggcggagggtgtcctgcgcctcgttcatcacggtggtggcaatgagggcagccccccgctcctcctctatttccttggcgatctccgccagcaccttcttacgagtttcaagctccgagacgtgccggcggtgagccttacggcccacctccaccatggcctccaccgagcgtcgcccctcttcgacacgcgcccacgcggcgtcgagctccgcccgctctacctgcaggacctccacctgggcacttaacccatccaacaccgtggtgtttgcggcggccaaggcctgcagaaggggctctgcgttcagtagggcgatagaaggcgtggggaagagccgccttggagaggatgccacgcggctcgggccgccgatggaagtgccggactcggggatgtcccccggacccggttggtcctgagcgtcgcccgagggagtaggcccaagcgacgcgcccgcggcctcgtcgccagctgccccggaagttgtcgcctgagtgtcgcctgagggagtgggcccaagcgacgcgcccgcggcctcgtcgcgagctgcctcggaagtcgccatcgcctcgtcctggcgaaatccgacctcctcccgagcggcttccccggcctggcgggcccgggcggcctcctcccgagcggcttccccggcctggcgggcccgggcggcctcctctcgagcggtttcctcggcctggcgagcccgggcggcctcctgggcggcctcctcggcttcccgtaggcgatccgcggcctctcgccggtcagattcccgcctgagggcctctgcggccgccggatcctcggcctcagactggccggacttggaatggcgggagggacgcgacgggatctcgctgaaacaaaagaaaaaaccagaagacgaacaagatgggtgagtgaaaactcgcgttgagagattgaatacagccacgacgggtgagagacgaacctgcgagggggtcggttaaacgaccactttggaggggaaataaggtttccccgagatggttctgtctcccccatcttacggggccgcttcttcttgcgctccccctcgggctgcgatgttggcgcggccccctccgggcgcctgttactggcacgcgccgccccgccccctcggggaggagatgggggaagtgttcctccctgcttcctcttcccccgggcgttggcagggcggctgctccccgggcccctgtcgcgggacccagaagcacgaccccctctcggggtagattgttcccccctgcggctcccgcctgcgccgtcgtggccctttggagctcgctcctctgaggccccgaccgccatcataatggtcaggatggaggcgcggtctggatcgctgcagagggggaggattccttggggaatgagggccgcctctacggagttgagattcagcacccgttggaccaatatcttgaagtcctcaggagcccagtcccatctcactccctggtgggtcctcgtgaagtcttcggacccggtgtactcccaggcgccccgagcgcgtcactggagcggcgcaatccgacgacggaggtagtcgccgtacaccatggcccctgtgagcccctgggatcgcaggcccgccaggcggtcgaggacggcgtcatagccatcccccagatctaccggcgcccgccagctggagacctgcgccgggggctggctcggaagtcggaggcgcgcttcgtcggcgaggggagtgtagaaccagtcgctcttccagtcgtcccacttcttgcggagggcgcaggggatgtagcggttcagcaccggcccccgtggctggaagtagcagccaccgactaccgatggcggcgacaccgactgcacggtgaagaaccaccggaacagccgaagagatgggcgcaccccaatgaacatctcgcacagatgcgcgaagatggccaatgtcatcaccgcgttgggggtgaggtgcgccatctggagatcgtagaactccagaacatccatgaagaaagaagaaaatggtggaaccagccctgccattgcaaaggggagaaagaagacgaaccgccccgggtagtctggcgccgggcgtccctcgcccagcgtgactatctcccggccggtggcagattccggcatgaagcggcgcgacagcccagcctgcctctcgctcacgatccgggaaggcggcagcacgctaccatcgagcagagcggaaccccgtgccatggcgccggaggaagagaagattaagagcgagcgcgtgtggcgaaggtagggcacaggaaagaaggagttagggcgcaagcggcgaagacaaggggaataatggcgaaaggaaggaaacagatcccttcctcagtgcctttatactcttgctaacgctgtgcccggctcctcgcttctcgcgcccactatttcgccccctcgtttctcgcgccctcgcttccactaatcccattcgcccgcttgcggcgcatgaggtgggtatgcggttgtggcagtcgagatagatcatatcgtgcgcgcgttaattacgcttgccgaccgaagcgacgttaccatatcttcagacgaaacgaatcgccatgtccagattcgtgtgctactcaagtaatgtggcagtcttgaagagaccgctcattgttgacagccgagttaccattgccgatgtgcgtggtttgtgaccgttgggtttctgcccaattgtggagaccggtcccacctgtcaccaggtcttaggagtggcgtcacgcccgcccgtttcccttaaagaaggcgatcgccctggcataacgccgggggctactgtcggtgacatgggatcaggagtatcatgactagaggtttgaggcagacacaatcgcacacgtggcctggtacccccgagggacgtcgggcccgagggtgatgcgttcgccctcctcttagtccccccgagggggtcgggccgcacccccatcggccccgagggctgaggcgccccgacccctcgtgggtttttgctccgcgtgtatgggttaggtgagcacagtggggctcacctaaccacatttattgcggtttggctgagcgtgtcacgccgcatgtaacgcagtgcagtgcactcgtttatccggtctgtgaccagtcacagaccggtcagatcgcgggttaggtggcgacaggcgatctgacgcacgcctcgccccatcccgtcaggacgagggcttctaggcgctcgtccccagctggagctagcgtgttacctcccagagatggcacgttagtcctggtcagatatatgccaggcttcatcctaaccattacaggcaagatgttttgtgaagaagggcgagcatgtagattgctaagctgacacgtggtggacaagaatgaccgacgtgactggtctgataccagtcatgtcgttagcagacagccacgattccacgtcgcacctgctcccggcgaaagtggaggtagttgtgggccgtctcatcagaaggtgactcggacggcaactatacaaatctccgtccatttatgaaaagggggggtaagtccccacaaaaaagagagaaatggtgcatgtggtatccccttaagatataaaaggaggaccttgcccactgagaggggggactggacttttccagattagaaacccagaacaagggagaggctggctgatactttgtagctccttcatacacagatctcccaaaacacaggagtagggtattacgcttctcagcggcccgaacctgtatacatcgcccgtgtcttgtgtgtttcctgtctcgcgagccttccacatacagagagcttagaatctctccctgagtccccggccgaaccggcaaaggggggcctgcgcggtctcccggtgaggagccccacgctccgtcagcatatctcaaattttgtaaaattataatggtatgattccaatttttccttattattatagccacttgcagtaatgcttggattatattgctcgttgtgaactcagtggatgggatcaaatgacagggctgctggtcaccccccgaatgcatctggcattggatgttggtgttggtcatgcatacaagacgacatcaactattgtgcgtggctgatctgtttggataacctagcttaacagcaagtagcaactgccataaaacagtatataagctcaagttgccttctcacacatactcttacagtctccttaggtcgaaatctgaaggaattcaagcaaacaactatacgaaaattaaacatagttaactataattaagctgtgctgcttgcctgccactagtctgcagatctcttatataactatatatacttcgcaattcccttttctcgctttttcttattttaaacaggctttagtacttcaattcctttccattttgaaaaaacaagtacataaaagcgtaggcatggcaagatagaacacacaacacgacgaggagtgtatgaacatgtatgcttgattgattgatcagcttaaattgctttaattttgtgtcctgaatatgttttttttagaactgtcctgaatatgtagaacttcggtgcgtcccaagctgtgccgcaacgataaggccgacacggccgatgaggcacgtccggggatgcattattgtctggacaacatcaggcgcttgctaattgatcattgacggcttcttgattagaaatcactcgctataaatgttggagtacttgacatacacctctttgataagatgccttgaaaatacatatttcaaattaattcgagaattattcttacatatttcaaattacttcgagaattattcttctatatgctataaaaaccttaaaatatgaaattattactttgtgtataatctagcaccgaaggatcttgaaatattccataaagaatcttaaaatacgttttccttagacggtagtatgatgggccgatataagcacgtttttttagcagtccggcccagaaagcccaggcaaacaaaagaaaacgtacgcgcgccaaaacgaaaccaggatccgacaggaagttgacacgtcggacgccaccctgtcctacgtggccggaacggaccacccgcgtattgacaagtcaccgccgcggtggcgccacgggagccacgtgtcacgcgcccatgagccgaccggtcgcgctcaactagtggaggctccggcatgcaggattatgattgccatttgtttaatccagtctctaatgatggatggttagtgcggtttggcgtccgttgcatttgcgggtttcagcgagctagacgccctagaccctctccggctcgtagaaaactcggtttaaacacgcaactccgtgggctcgtttcgagtttgtattttgtctttgtgtgcttttagctcggtgcatggaagttgcaagcatcttaaagtggaaagttttgtgcttgccggaaatcaaatgctcagttgttcttttcactactgttatatcaatcgtgcagggactctcgagaaaacatccttttattatttacatgctatcgaaatagttataaaaaaattaactaaatagattaatatgtggtaaaacactccacaaacatataagttaaaattcaatttctttaagttgtaaaaaaattaaattataactatttaacgtatattcatagtttttttcgtttcttgtacaggttaaatttgatcttgcatatttgtagactgatttatcacatattaatctatcctattactattttaaaatttgttcataactatttagatgatacacaaataataataatgttcgagagtttagaataatttcctcaatcgtactgcactactgatacatatacgtcctgcctctcaaaaccatggaagatgccgctgtattgtgtgttctttttgcttaattaaacttactctttctgaaacataattttaaggactaccggaaagataaggaggtcgcatagtgctaaagctcgtaggttcaaatcttcaccccctccttaattcaaacatataacctccgttctaaattaaatcaatctagaatagaataagacattacctaattcaacgaatttggtaaacaaactcttatttaaatttgtttatgtaatatcatattttattttagattgatttattttggtacacaaggagtaggtgatttctaccaatttttttttagagaatatggggaattggaagtctgaaactgaactacgtactgaagcacttccgtgtaattctgcatctggtcaaaaagcctgtctgtcctgtgtgtctcctctgaattttgccggtaatccggctcccttacgtacaataggtagtgtggtgcatcttatctccacgactcccctccattactcgcacatgcctctgaattgatcgacaagtccacagggtaagtacttctgttaaagtctttcttttttttcccccgcggtgcccactaagcaaagaacaaaaatcacacagactgaaatgacggcgacccgaaatatctttactattaaaattccactgcgcactgtcaccttcctatataaacggccaccctcgccgtgcgacgagagaactcttctcccacgagaccaacgttttctactgtgcacgtgcgtacgttggtttcctcttggagttttacacgaaggaattgaagtgagctaccaaaacatggacgtcgaacagctgcagcagcatgccaggaggcttctgtcgaacggcagggtggtgtcggcggcggcggccgccggcgcgtcgcctggtccggctgggcgcgtgttggaaggcggcgcggcggcggcggcgcgtcgtccggcaccgttcagctcgctggacgcgacggtgatcacggtcctgtccctcctcctctgcgtgctcgtcgtcgggctcgtgctccacgcgatcgcccggtgcgcgttccgcgtcacgcggcgcatgtgctacggccaggagccgcccggggatcacggcgacgaggcggcggcggagcgatgcgcccgggtagccaggaagaagccgggacgcgccatcgcggagaagatcccggcgatcgtctgcccggccggcgggctcgatcggctcgccggctgcggctcgacggagtgcgccatctgcctctccgagttcgcgcagggtcaccgcgtccgcgtgctgccgcgctgcggccacggcttccacgcgcggtgcattgaccgatggctcgccgcgaggcagacctgcccgacgtgcaggcgggagccgtttgcggcggccgcggccgtgcagctgcaggtttaccctgacgccgccggcggccagcacgagacgccttagcaccaacgtgactcaactgtacagtaggctatcacagtagttgggaacacagtgaacatttttttgcttttcttttgtcatccgagatactgtggtcattatctctgttttttttttcttttctgttatgttcatgtcgaagtgacccggttccgatgaaatgaaggtgaaaaccacccgagtaaattttactgaaaactgcaaaaatatgtaccatcaggttgtgatttggttcaggcttgtaaacccatttgcaaatattgcacggagagtgccaacttttgaatcgtctgaattgtttcagacacgatgggagctgcatctggagtgttttttttctactttcgagaggtataatactctactaaaatattatatatacaatagaactgaacaaaaactcaactcaggagtataatatacatactctctctagtcaaatttattttatgttgagtttagttctcccaacgtcaaatatttttactagatcaagtatctcttaatatattctaaatacaaaacaaaaaaaaatccatgaaattgacgatatattgtgtgatctgttccacaatgaaatgggcaacaggcccattgagtaaattcggcccacggacgtactccaggagtgccagcctgctacaacactagtctgacgttgtgactctacattgtactgtacatacgagtattggtatagtagtagcagaattagaaaaagaggaatcggcctacggtgtatctcgtactataaaagatggatgtttgtgttgtggatttgtggtggcgtgtatctccctcgtagtctgaaaaagttaactaagaacgcatatttgctaaccacgggtaattccagattcccttgctactggttaagaatcgttttgacttgtacggggttgctgaattttctttgccgatgagttatagatgatgacggccgactgatgaattggtgacttcctgaagttcaaagcaggtacgctgaataatgcgatgcttatcgctgtttctgaagacatcattttcccctctgtctcactgcaaagtgaatcacaataccatgtgccatattcgattgtttgctgcaaaatgaaccttccggggaggaaatctagtcaatttatgaatagtttagcgcaataattagctgaaatggggaggcatgaagcacgctttttgactgcaagtcggttacatcttcattccgtcttccccccggccgtccagagtgggagctgcagctaccactgccacaaacctttccgcctcactgaattattggctcacgtaatgggttctcctgaggccttccactactggaagctgcaaagcactgtactatagctagcgtgtgcctcgttaattatacttttctgttgccaataatgcagccactattgcccagaacaactgacactaatacgcgggcaaagtgatcaactgagccgtagtattcgcgtatcaacttatcatatcccccagtgctgaaagcaccaacaggatatcaacatatgctgttcttccggcatcataggatggaactgcgtcaactttctgaaagagggtaatacagtatgaattattgctgctttgcgtggctggaaaagtcaattattgggggagagttcggttctctgccggctgcttgctcgaccgaatgatgcattctgctgtagctagtgatagtgctacgcattagtgttttgtacggtcttaatcaatcgtggtctgtagaatttgatggagcaagctcttcgtgttgcatccttggtccaatcttgtgcttgatatgtccgagtcacaacgcatgaaagttgtttcgcgtaatttgtgtcgtatatactccgtatctcctagcagaagaatatcacgatcatccgacgaggacttgtgttgacgtgacaaaatggtccgcgttttattcgtgtggccctggtgtaaatcggtttagctcagatcgcacctcggtagaaaagtgaacccgtaaatggtacgacaattggcgagttttctccccttaactttgtcttttattttgcttttctttcatttttctctctttactactgtaggcagaagccagaaaagctaaagagacgaatttcctctcttctttttttgaaggaactgaacacggtgacgccacaggagcaagtaagcaagagtatttactcccagaagcccaatccattgatcttcgtgagactttcaggagaatccaagcccaaataggtctcaggcgaacggcgaccagcccaacaggcctataattggcatccaaactaagcccaaatagacaaaagcgcggcagctggacaccttgctattcatcctggactttcgcaacgggaaactcatgggccctcaaggtgattggcagcgcaggccgccttcgccgtgctagcaggattttttttattagtttaaatttttatttacaaaaaaaaattattcaaacttatattctatccgtcctataaaaaacgaatctagtaccgcatgtgatatattctagtatgatgaatctggatagatatatgtctagattcgtagtactaagatgtgttacatccggtattagtttggttttttatgaaacggatggagtatgtatttagtagtgcatctctaccctctcttaaacggtttttatgacataacacacgactgtggatgcaagttagcagccacgcggagggaggtcaaccattttacaggcagccctcttccgctctcctaaaggactacaaatggttgctcgtaaaatcttcgtgcggccattaacatacaccaacggatatgtcacatatgccacgtcataaaaaaaatcatcttggaggaaaatagggttgtagatttataaagagtaaatttaacaaaattaaaggtaagttgatcaaattacagtaaaactacatatttaagataatataccacaaaactatatatttaacattaaatttttcccaaaactagatattcaaggtggagtgccgtaaaactatagatatagaaaaatgttatcacaaaattacgggtgtttacaactcaaacatagaaggatttaaaacctaaattttgtaattttgtaattttgtgattttttacgatacttggtcataaacctaaaattatgcaataaacttaggctgcgttcaggataaggggttgggaacccgaagcacgcattattgcataattaattaagtattaacttttttttaaataaaggattaatatgattttttaaaactacctttttatagaattttttctgcaaaaacctcacggtttagtaatttgaaaaacgtgcaggcggaaaacgagagatatgagttggaaaaaattagaggaataacacaacattagtgtcaaatatatagttataaatatgtagttttgctataatttagttataaagcatatgcagttttgtaaaatttaatcatttataaagctttgaaaaaatatttttgtttaacattttattaataactaaaattaaaaatattctgcaagcaaccggatcgctgtcagcctatcaccgcctcaccggcgaaggctgacggggtcacgggagtaggttgcgcggtcggcttccaccgcacgccagcacgccccgtccaaaccagccggtggcccaccggccattaagaaaccgactccgacgtggccgttccggtttcggcaccgaaagtccgtccgtttccgttgccaacttgccaatacccaccgacccggcacgccagtccaggtcaggtcagacaccttcggcttggctggctcagtggttcgcccaggtcgcctgcctcgtgctctgccgtgccgtgacggtgccatgtcacgttcaaacggcgaggcaaaggggaggagggtagctgagcacacacgcggtccgtgcttctgcaggcgaaggtgacgccgcagaagactagtccaacggggcggcttccacgcataaaacggctccccttgctgcgctttccgtttcggctctcccatttgtctcgcgctcgctgtctcgcgtcagcggcggagctctctagaaggagcagaggagtcccccccaagcgatcgattcgatcccctccgccgccgatcgcctcgccgaagtctccgaggtgtaagcccgttcgatctctccctctccctctccatccttgtttcgatctgatccgtggaatcgcttcgctggatcgccggtagagcttcccgtgctttgttgtccgggtgatttttccggggaatttcgcgctgttttcgtggactgtttgtgttgacctcggcgtttggacgcttgcggttgatagctgtatcctctcatgactagcaagggaattcatggcgtttgtgtactgtatgttgtatagtctgatccttggtcgggttgtatgctgcagttgcagacagcagagcagttccaatatcacttctggagatgatctcaaactgcataatacctattctaatactttctatttcctttctaacaatccgctgcgcagctagttgtatgttacttcagtcgatacttgcatcatgcatccagaattccagacaaatagttgtatgttacttcatgttgtgttttttcctttgttaacatgaaacctctgatgtgtcacatcgtgattgtgtttacctttattgcgtagttttttttaaaagatccatactgccttactgaaatcaaagcgaactcaaatgaaaattctttcttattttgcatgatcatacattcagtcccaggtgccacttctaatggttagtcccatgttgtgttttttcctatacctgatcagttccctaatgatatgatctgtattttattggttgttcgttggcatgttgtaaatgtttagtgattgctacttcattttttttatcatgcactttatttgggcccaggagtaagctcggtggcacttaagcaaaacagtgcttaagttaatatgcacaataattgatttttgaatgcattctgaatactgatatttgttgcagaaacacttgagggatggctgaagaggatatccagcctattgtctgtgacaatggcactggaatggtcaaggttagttaattttcctgccacgctgtaaaactgttagttcgcacaattgggatgttcagattctcttttgcctgctaatacatttgtagcacccaacgaattgatcatttcttcatgtggaataggccggttttgctggtgatgatgcacccagggctgtctttcctagcattgtaggcaggccacgccacactggtgtcatggttggtatgggccagaaggatgcctatgtgggtgatgaagctcagtcgaaaagaggtatactgacattgaaatacccaatcgagcatggtattgtcaacaactgggatgacatggagaagatatggcaccacaccttctacaatgagctccgtgtggctcctgaagagcatcctgtattgctgaccgaggctcctatgaaccccaaggcaaacagagagaagatgacccagatcatgttcgagaccttcaactgcccagcgatgtacgttgccatccaggccgttctttcgttgtacgccagtggtcgaacaactggtatgatgattgctgtacaaaaaaaaccatttgattttaacatacttatctaaaaaaaattgattttaatatccaatgagtagtcgaactgcgctaactagtttataaatgcaggtattgtacttgactctggtgatgggtaagtcacactgttccaatatacgaaggatttacactcccgcatgc

SEQ ID NO: 10405 - DNA, 2950 bp, Oryza sativa
gcagcggcaacagatgcaggggaccatcggcttctttcgctacccggggcatggcgccgccgcggagctcgcgcacgtgagggcatggtggtccccgacctcgcacgccgccgccgccgactgggacgacggcgccgactgggagctgcccctgcaatgcaacgggctcgtgctggtgttctccatggagaagagcctctcctcctctctgatgttcgtctgcaacccggcgaccaagaagctcgccgtggtgccgcccggtacgccggacgcgcacgggaaccaaagcgtgggcttcggcgccgacaaatctacgggcaagatcgacatgaaggtggttcgctgcttcgcccgctcagacgagagcgtcgggtgcgaggtcttctccctcggatcgccggcgtggaggccggtcgccgactcgccatgccccgtcagggccggcgccgcgtcgccgtgcatcctcggcgccatctactggatcaccaccgcagcgccaaccccagggatgctacgcttcgacgtgcgccgcgaggtgttcgacgatttcccgagcccgccgtgcgtgcatcacgacggcacttcgccggcgaccgcgaccctgacggagctgtccggcaacaagctgtgctacgcgcacgtcgtcgccggccataccgttgagctctggacgatggcggctgcttccgccgccgacgacgggccgcggtggtcgcggcattgcgccgtcgagctatggcgccccactcagctcgtcgtcccgtttgccgacgatcgccatggcggcatcttcttcaacttggatctcgccgtgattgacaggcatgacacccaacgccaagttgttgaacgtgtggtcgacatgaacaaggagatgacctacttccattcaagggacaagcagtactacataaatcgtggatttaggtggatgcaccatgtcattcagtacagggagagcctagtatccgtaaaagcgaattaattaagggattgtatcagccaaaggaaattaactagattgacttctgttacaattttatatccaggaaagttactgagagtggatgttcacccctttcatgcatttgagtgggaatgggttctaatacctcgcaggatgtctcgtttacctttcttcaatcaaaattcaatacaaatgagattgtgaaaaattctagaaaacttttgacaaggtagagtacaacgagatcaatgactccacctgtccaccagcaaatgttagaacgcacaacgtgagaatgcatcgccggccaagcggcagcgtgcccccgccggcgccgccgaggccgacatcgtggagcaaatatttgtttgcaatccgtgttgccggacacggcacgccggacttcttcagtgcccaaagcgtttcaacaaacggaggtctcaaagaatgtgatgacacaacagaagataaaccgaaatcagcagaacactgaattgccacaactgaatatcagagtcaggcatcataaatgacgtgttccattcttttcttttcgccaaaaaaaagccgaaatcagcagtacactgaattgccacaactgaatatcagagtcaggcatcatagatgacgtgttccattcttcgtttttttacaaacaatacaattttgtgcgatttgaacacatgtcccatcaaatatgtacaatatacccacaagatttataatatactaacactttgatcagccgaaatgaaccgaaaacagaattgtcagccgaaatcaaccaaactatattcgagcacagtctaatttattaatttgcttggatggataccaagctctcactgtactgaatggcgtggtgcatccaatccccatcacagcggtacagcttgcaccttgaactgtcgaagtaggtcatctcctcgagcatgtccaccactcgttccacaactctgcgttcgacgtcgtaccggtaaatcatggcgtaatccacgtagaaacatatgcctccttggtaatcgtaggtaaactggaagaaggtgtgaaaggagtgcggtagcacgacggtgcattgcagcgaccaccgtggcctgctgccgcctccgtcggcggcggaagctgtccagagctcaactctatcgtcggcgggagcatgcacatagcacagcttgccacccagctccgtcaggtccccacaagcgacgtcagacatcttctgccgctccatgaacggtgggcacgggaaactggcgaactcctcgctgcacacgtcgaagcgtacaatccctggggtggtgcagctgccggtggacggcgacggtagggcggcgatccagtagatgccgccgaggatgcacggcgacgttttggtcttgatgaggtagggtgggtcggcgaccggcctccacgccggcgagccgagggacaaaacctcgcatccgacgctgtagtccgtgtaggtcttgtcgcagtggcggatgaagcagtggaccaccttcgtcttgcccgtagattggtcggcgtagaagcttaccgcttgcaccccgaagtagtccagcgcacagtccggtagctcggcaagctccttggtcgccgggttgcaaactaacatctgagtggagtacttcatcgtcgagcgcagcaacacgagcccgttgcagtgcagatgcatgccccagccgatggcgccaacgtcgtcgtcccagtcgtcgtcgtcgtcccagtccgcggcggcgtccccgtcgtcgacggcgtcgtccaagttgtcggcggcggccccgtcatccgcggcatcggccccgtcgtcgacggcgtcccagtcggcggcagcgtacccgtctgcggcggcggcgacggtcgacttcgagttcgaggaccatgttatcctatgcgcgaagtccgcggcgacgccatggcccggatagctaaagaagtcgatcgttcccctccattgctctggcacacaccagtctgccagga

SEQ ID NO: 10406 - DNA, 2599 bp, Oryza sativa
ccgccgctgttgggcgtctacgacttcaccatcggcttgccttcgccgctgccgactggtgtttccgcctgcacggctggcctttatgccgccgttgttgggcgtctacgtcttcaccgactggcttgccttcgccgctgccgactggtgtttccgcctacacggctggcctattatgccgccgctgttgggcgtctacgacttcaccaccggcctgcctccgtcgccgccgattggtgcctccgcctacacggctggcctattatgccgccgctgttgggcgtctacgacttcaccaccggcctgcctccgtcgccgccgattggtgcctccgcctacacggctggcctattatgccgccgctgttgggcgtctacgacttcaccgccggcctgcctccgtcgccgccgattggtgcctccgcctacacggctggcctattatgccgccgctgttgggcgtctacgacttcaccgccggcctgcctccgtcgccgccgattggtgcctccgcctacacggctggcctattatgccgccgctgttgggcgtctacgacttcaccatcagcttgccttcgccgctgccgactggtgtttccgcctgcacggctggcctttatgccgccgttgttgggcgtctacgtcttcaccgacgggcttgcctccgtcgcccgccgattggtgcctccgcctacacggctggcctattatgccgccgctgttgggcgtctacgacttcaccaccggcctgcctccgtcgccgccgattggtgcctccgcctacacggctggcctattatgccgccgctgttgggcgtctacgacttcgccgccggcctgcctccgtcgccgccgattggtgcctccgcctacacggctggcctattatgccgccgctgttgggcgtctacgacttcaccgccggcctgcctccgtcgccgccgattggtgcctccgcctacacggctggcctattatgccgccgctgttgggcgtctacgacttcaccgccggcctgcctccgtcgccgccgattggtgcctccgcctacacggctggcctattatgccgccgctgttgggcgtctacgacttcaccaccggcctgcctccgtcgccgccgattggtgcctccgcctacacggctggcctattatgccgccgctgttgggcgtctacgacttcaccgccggcttgcctccgtcgccgccgagtggtgcctccgcctacacggctggcctattatgccgccgctgttgggcgtctacgacttcaccaccggcctgcctccgtcgccgccgactggtgtccccgcctatacggtcggttggtcacaccaccgttgatgggcatcgtcatcttcaccgccggcctgcctccgtcgccgccgactggtgcctccgcctacacggctggcctattatgccgccgctgttgggcgtcttcgctttcaccgtcgaccgccttcgtcgccgccgactggtgtcttcattgttattgatggacgactttgttcccatattggccacttctgccatcaccaaggggaatattacaaagctaagtcatcatttattttattctttatatgatattttgccttttcctctgcctcactacaccaattggtcttccattgagtagtgagtcgggggctacagatgttatatcgtattttttaaacaattttcataatatttatcttgattgcttgcgacataatctgagtacaaaagtacctatcgagttatggagttctatcttcctatgctttctgttcggtttgccaatggatggttgcctttgggccgattcctagcacccgggggctcgttggatggaccgaataacgcaaggtgctaagtattattcagaataaatcaaaagcatagagataagataatttattttctgctcttaataattgcaaaagtacccgagtagtaaactccgatccgtgaaactttgttccattaatgacgaactcatgacactcatatgcatgtttgggaagtgcttaggccgactcccagtgcttggtggctatgactagtcgggcagagtgcttaaacgtaatgagtcatctgttcggggaaatcaaaattgacaagaggagaaatacatatttataaatattttaaactgcttgaatttttctcgagtattatatttatatcagatactactcatcctatatgtttgttctgcaggatccagatccagatatgcataaaagggattcatggctttaagcttatctcttacgctccaggaatggatcagtcagaacaccaccaccggctcgcctcgaccgccgccgactggtgttcccgcctgcacggctggcctattatgccgccgttgttgggcgtctacgtcttcaccgaccggcttgccttcgccgctgccgactggtgtttccgcctgcacggctggcctattatgccgccgttgttgggcgtctacgtcttcaccgaccggcttgcattcgccgccgccgactggtgtttccgcctgcacggctggcctattatgccgccgttgttgggcgtctacgtcttcaccgaccggcttgccttcgccgccgccgactggtgtt

SEQ ID NO: 10407 - DNA, 4971 bp, Oryza sativa
  unsure (1)..(4971): unsure at all n locations
cctgctgccaaaattgagaagagacttgctacctggaaatgtagccatttgtcctatggggggaggtcaatcttgattaattcctgcttgagtagtatacctatgtatatgatgggcattatttactgcctgagggggttcatcagaaaatggattctttcagagcaagatttttttgggaaggtttagagggaaagaaaaaatatcacatgatcaaatgggaagccctgtgcagaccaaaggattttgggggtttgggttttgttaacacaaggataatgaatgcggctctactttgcaagtggattttcaaacttgaaactggggtagagaatccttgttgtgatctactgagaaggaaatatatggtagaaggagggggttttttccaatccaaagttgaggggggatcacagttctggagagggttacatgaggtaaaaggctggatgaaacttggtagctcatacaagcttggagatgggaaaaatatatccttctgggatgatatttggttaggggaaacaccacttaagactcaatttccatatatattcagtgtatgtgctgatgataacaaaactactcaccagatgtatgttgaaggggagtggaaaatctctttgagaagaactttaggtgaaggggagttagaagagtggggtcaattacatgctttattgcagaacatcgaattgaattcaggaaaagattccatgtgttggaatttaaacaaaactgggatgttttctacaaaatccctgtatcgagaaataagttttggggggattaaagactacatcttacaagagctgtggaggtgtcatattcccctcaaagttaaagtgtttttctggcttatgctaaaaggaaaaattcaaacaggtcatcagttaaagaagatgaaatggaaggggagtcccaactgtaaactctgtggagaaatcgaggatacagatcacttgatgtttcaatgtgcgctatctcagtttacgtggtgttgtttcagagatgcatttggttgggatggtatccccaaatctagagcagaacttttgaataaactgagtggtcagagcggtgattcaattcctgttttgctatctttgtttgctgctgccgcttggtccatttggcttttgcgtaatgactgggtgtttaataataagatgattgttgatgcgtcacatttacctcacaaaattgtgtctttacatctacagtggagaagcttagcacccgtgaagaagaggagtgctttggatacattaaggggcttgctccttgccagtatccgaaagatcggaggatcaaatacttgatctaatgccagggagttccttgtctgattttgctatggagtctcatttagtaggacaatgttactagctgaaagaaactggcttgttttggttgtgccagcagcccacttttgntngntgnaaggnccccnttngnccnggnnttggctccagttcttgttttgtctagctggaatccccagtatcatctttttcccttttcctttgtcgttcgatgtatgaactcttatgctttttaatgaaagctgggcgtcagcctttctccaaaaaaaaaaaaaagtccattaatggaataacttttttcagggatgcatttgtaaaataagttctcaaaaagaacaaaaaaatcccgaaacatttttagccacctttcctgccgaagcaatggttgcaaatagcagagctttatgtatacacaagatgatcactatgatgatcaacgcccagactccagaatgccttgcacagctccaccctccatgctgaaattcccggtgctaaccatctccaaaccagccaccgacgactccccgagtaagctctccatctcctccgggtcatgctgcgcccatgggtgctgcatgaccttcctcagccggccaagcttgtcggcgacatctctcatcgacggtcggttatcgccgatcatctccaggcactggctcgcgaggtcagcaacctcctcgagcaccccagcattctcatcagtctgaatgtgatgatctataatgtccatgagtcttccctccttcatggcacacaagaagctcaatgaaaggctcttctcattttcaggaccttcaaggttgaaggccattttgccggtgagcagctccagtagaacgacgccaaagctgtacacatcgctcttatctgtcaattggcacgtctgcatgtactcgggatctaggtacccacaggttccttgcaccaaggtgacaaactgggcctcatcagtcggcactagtattgaggctccaaagtccgatatctttgcggtatagttctcgtccagtagtatgttggaggtcttgacatcaccgtgaatgattggaggcgatgctgatgaatgaaggtaatctagtgcttgggctgattcatgggcaattcgcactcgagtagaaaaggggatgttgcggcagtcattgccgccatgaatgaagtgaaacaaggtcccattggggataaactcatagactagcattgggacctccacttcgaggcagcagcccaggagcttgacgatgttcttgtggttgatctgggacaggatgagcatctccttgccaaactccttcttttgcctgtcgtcaatcatcgacatgcatcgtttgatggcaatcagacggctgtccttgagcatgcccctgtagacagtgccatggccaccgcggccaaggacgttcttgtcctcgaacttgttcgtcgcttctatgagttctgcttcagtgaagattgtgaaggcagtgctctgcccttgctttaagcctatctcctgcagcagaagcatgccaccgtgctgttggaaatacttcttcttgatattggccagtttcttccgttcacggaccaagtatgagcaggtgacgatcattgccatggcaacaattccaacacttaggcctgcatattaatttatcaattttttgttattgcaaactcagttgtgtgccaaaaaatctataagattagggaacgacaacttactaacagctagtatcaccgttctggattgtgaggggcttgaacaagtaaaactgccaggtatgttcttgcaacggccagggcatggaggtggattgttaacatcacattcattaatatctacagacacagtaaaagtagcatgatacttagtgtttggctctacaaagattgaatcatcatgggatcaatatctacagacacagtaaaaagtattccctccgttttaggttataagacattttaactttggtcaaagttaaactactttaaatttaactaactcaatagaaaaaaaatatgaatatttacaacaccagcatagtttcattaaatctataattgaataattttttataatatattagtcttaggttaaaaatattactacttttttctataaaattagtcaaacttaaagtaatttgactttaacgaaagtcaaaatgtcttataacctgaaacggagggagtagtatatatgtacttatatatcaacaaaattcaatcaaggtaaattggcaatacagaccttggcatccatcgggaaggtacggattgccacggtagccttcagtgcagttgcagaggtaacctgtagggccactggatgaatcgatgcacatgctgtttttgctacggcatgcgtatctatctcccatttgcttggcaacctgacatgtctcattacccacaacccagttcaagaccaccgggacactgccattgtgctcgtcccaaaaggccgttgagttcaggtatgctgttcggaacctgaatgcagcagcctccatcaccacagcgtagccacagtagcttgccctgtccgtgatgcttctgttgttgtaagacgttgtggtgttgtataaggggttgaattgcacttcgtggtaggaaatgttgttgctgagtacggcctggcagcagccgatgccgacacacgacccatcttgagctgtgaagctattatacggtgagcactgagacaagcacccgatcatatttagcatctgcatccaaatcccggttgagtttatggatgatatatattaccacaaaaacgactcttttacagttttactccagcgtatcgaagattaaattttaaaactggcagcagcagaatatatatggtgaatttacaagagagatcaactcacggtagagtagcggctgtaaccaaacatgtttgcggccgtgttggcaccgatgactatgaatatgttctccttctgcgagatggtgaacggagaggttgtgaggttcaggagccagttcttgtagtccatattcttggttgagaggttgtagcacatcgaggatatgtacgttgatttcatccgaacctgaccatagcgcagcgatatattcagcaccggcgtggtgccatataatgccacatccccacgtccatcctctgtcttgctgcagctaagcacaaagccttcaatggcacagccttcgccaatcccaaatgggtatagaatgtcaacatcaccacacttctttaggcacctatcgtccggcaatgatgcgccgtctgccatgaactgtagggagatcacgaggcctatgaacagcagcagacgcattgctagtttttcaactgggagcttgtagtagcagtccatagttgggttcgatatgctacagtttcagtgctgatgaaatgtatatgcaatggacatcttcgtctcttatttctctaaatatagtagcttccacaccctacttggttatctttatattgaacttgttataattaattggtcaaacacaactatataattaattatttaattggtcaaacacgtgctatagtatggttctgccttctcaatcaagtaggaaaaatcttctttctgagttgttttcttctattttgttcttcgcgagctgggatgagatgcaacttgcaatactaaacaattcttagatatctttt

SEQ ID NO: 10408 - DNA, 6894 bp, Oryza sativa
tggtgtttccgccggcacgcctgccctttatgccaccgttgttgggcgtctacgtcttcaccgaccggcttgctttcgccgccgcggactggtgtttccgcctgcacggctggcctttatgcccccgtagttgggcgtctacgtcttcaccgaccggcttgccttcgtcgccgccgactggtgtcctcgcctgcacggctggcctgttatgccgccgttgttgggcgcctacgtcttcaccgaccggcttgcctttgtcgtccccgaccgatgtcctcgcctgcacggctggcctttatgccgccgttgttgggcgtctacgtcttcaccgaccggcttgccttcgccgccgccgactggtgtttccgcctgcacggctggcctttatgccgccgttgttgggcgtctacgtcttcaccgaccggtcaccgcatccgccgctgactggtgtcaccgcctgcacggctggcctgttataacgccaactgatgctatcttcttcacggctggctacatcgctgtcactactaataggcatcaatatcttcaacacaagctgcctacgtttgccatggctgccgactggtttcttcacttccatggctacatgattctaccagtgttgattagccttatcttcttcaccgccggtcatctcgtctgctgttgactagtgccctcgcctctacgtctggtttatacagctaccactactgatggacatcatcgttttctgccgccgactcgtgttatgccgccgtcgactggtgcttttatcttcacaactgcgcgtcttcactaccggttcacttcatcacggcaacacaactttgtcatcatggtggaccgacttcatctttattatcttcggaaccagcaaactctattgctgctacttaacaagttttgctacatcaccaaccatgacgttgttgtgaatctcgacatctcggcatgcgatgccgtgttattttactacaacaagtggctctccaatattcaggatttctacttggacatcttcaacacatatcttcaatcaagcaataattattcgacgacaagatgctacagttctcgactctatgttcagttgtttcccaactaatcaaagagtcgggggctacacaaatacaaggctcaaaatttgacaaattttatataagccaatgagtcaactccaggagtcattatcttcatctttgcttcggaacagacattctacttcaacaacttcaaatatttcggtttagacgagttgggcaacaacatcaactctcctccaattatttgtcttcacggttggcctactacgcaactgccgatagaggatctcatcgttatcatcggctgctacatcgctattgactggatcaccgacatcgtcatcttcatcaacatcttgtcaagcctcatcaacatagccaactctgctgccgttgatgggaaacttcgtcatcatagtcggctatctctgttgccgctaatcatcattaccgtcggatgcgtttgtcgccgccgattattttcttcatcttcatgattggtggatttcgccatcaccgttgatgcgcgtctacgtcttcatcgtcggtttgcttttgtcaccaccgactgttctttcgttgttgttgggcgcctacatcttcactgctagctgacctgactgttgccgactggtttcttcacctccgtggttatgcaacttcattacatttgattggtggcatctttactaccactgacatctttcgttacttctgatgagcaatttcgtcttcatgttggtcatttcatctccatgccgactgcatcagctaccatcaatggacaattttgactatgacagaaggacaagctatatgctcaggggctcatcaactcaagcgtgaggattatatctccaatttggacttgttccggatacattccacatggattcatagtcatgagtctattttctatgctcaaagactggaccaattattattccccgtaagggctatcaaccgaatacttgcgccagtcgggattcaattattatatttatttttggagtatcccataagggataatcattcagatcagaagctattcatatgagctacacttggtctatattacccggaagatttattactcaggagcatgttacatgcgtcatcctttaaagggtgtcgaaggcatattttttggcctaggcctaatatgtctgcagcccatattttcaggtgtggcctgtcacgttcttttagggacttaggcactttttgcttaggccaaagtgcgcgtgatcaagtgcccaataccttaaaatccttttataccgcagttacttaactttttaggagttggtacaatgcatcttaaaaggtgtcaaacagtaaagctttatatagctggcccgctgacttttttatatagtcatggtgctgtttgggtttttaagcaattgattggatacaatatcattgctttttgccacgtaagtgtgcatttttattgaccaatattatggcttaggctgattatatattgtggtcattttctaggcggttggtaaatcctttatgagtttatttactcggattttacaccacatatgccatatatttccaggtgtggtgaaaccatgtgtcttctagggacttaagtacatctgttaaagcagtgtgcgcatggcgtatgcccaatactttggaaatttctttattcacaatatacaagcttctttatagctattttgctatatcactcatcatattttacaaagcggttggtatatcactcggatcatgttatttggaggattcacaccgcatatgctatatattgatatcaagtcacttggttgattacgattatcaaaaccactcggttggttggattatttattccttgactatatgcttggtttgttcaattaaccacattgtcgggggctacacctattaggtgcatctagtcggtgcacctgactttattttccagccctccacagtcttcagatttggtaaaagtactcgggagaccatgacaaagataattgaagcactcggctttggagtaatctggttcgagagaagattatcttttcgactgcgaaggtctcaggggctactgtggatattgtgggtaccccatacccatacggcatggttatccgactagtcataggggataacttatatctatggaatatgtaatagatcatgactcgggtattacgtttccttgtatattacggaacggcctaaagtcctggtttgataatattgtaaagtagatttaggaaaccgataccgtattggttaatgtttctatcttgtaatcctgccccccatcctatataaggtgggcaggaggccctctagggggcagatgacataacctgatcgtcagatcaatacacactcggcggattcaaatccccaaacaggagtagggtattacctctcattgagagggcctgaacctgtctaaatcctttgtctctgcatccatccacttttaggtctcgtgcgctacccccttttattattgccgaatccatgtttcgacagattcgtcgtcaacggcgcggcccgggccggggaacacctggggtacggcagtagtatagcatagcagcagtagtcaagcggtgttgggtgttggtgttgtacggcagcctgcaggggggccagagtggtgtggacgtgttggcagtgcgcgccatggttggtttgattttcgtttcttccagagggggggtggtggggttgagcgcaaccaacggtttttttctcttttctaaaaaggaagaaaacgattccgtccagcgattttgtgctccgctgcttttgggcgataattttgtgatctctgggtggttggtatgtcgaggttgtaacacgtttcttttcgtgtcgacactaaggccctccaagacgaaaaattttggcatgtcacatcatatatatggataaatattaagcgtagtctaataataaaataaattacatattccgcctataaattgcgagaccaatttattaagtctaattaatccgtcatagcaaatatttactgtagcatcacattgtcaaatcatgacgtaattaagcttaaaagattcgtctcgcaatttacacgcaatctacgtaattagttttttttcttgtctatatttaatattccatacatgtgtccaaacatccaatgtgatagggtaaaaaatttttgtttggaagtaaacaaggcctaagtgtccctttgatttggaggaaaaacgtaaaattttaaagtttttcaagcctataggaaaaatttatatgaattgattgaatcatatcatatcctttgaaattcgtatgggatagacaatcctacaaagattttggaggaaatttagcaaaagctcttacctcttggaaattttattttgagtctatctctcttatttgatttctatgtttttttacatgttttgcaattttgttttacacttaaattatatcaaaatcatatgtttaattctctgttttctcctatttatacttatgcatagggctgagctaaaatacatttgcaaattacatagtactagtatttttgtaagattagtattttaatagggattatggagtgactctaatccttacctatcctatgccgtctctgcccatggtttgatggacttaactgaaatggtggtagcaaatgtcagaagtagaagcacaaagcatattgggatgcctgttttaaacgtgggatttcttttctatttttttagttatttcatatgaaattctttgtaaactcgtgcactctaaatcgttttgtgagtcacatcacttctcaggcccgccaccttgttttaggtgattaccttaaaatgacaataaatctgtccatttcaactcgatttttttcaatatttctagttgacagacagtgaacccatttttggtaccagtcgagaaattgtggtggtgacaacattgccatatgaattatccagctcaaaaggaatttgaagtgtatacaataataacctgacaaaattattttgaggggatcaattccattgcctccttgagcaatctatgaccatgaattttcagttgcaaagttggtttatcagccacatgggatgggactgaaccctaaccataaactaggtggcaaacgcactgatgcagctgtctcctcctcctccactgtgtgaaccattttttatagtgcagcttttgagcctgaagagagagggcatcagcaagcaatcaagcactgaatcatcactgcacaacacaacaactctggctcacaaactctgaactttttaggttggataacgctgttggtttcagcgtttcagatgacaagaataacaaagaaatatctcctccaatttgcagtgaaaacgaacggcaagttgacagccacatcaagcaatgacactgcacatacatagaccactatgatcagtattgacaaccacagtatctacagaaaattttcaactttttttcgtcagagtgacacgctcttggttctttcttttcccttttgtttcacatcacaagagggaccaaatggaaagcaaaatcacaagatatcccaataggccatggttccgtgtgcaatctaccttgacctgttgatgcgcaagaaaatggcctcttaactgcagcatcaccagtgtctccccacatatattccaaagccaaatctattgcccagagaagggagaaaagaaaacagtaccaaccttgcataaaggttcaggaacccatgcacagatgtacatgtatgtactctctctgatctctgcttctgcaagaaatgcatgtccttttagtgcatatcatgtcaatcttctcaaaacattaagcgttaagcatcaatatctctttaaatatttagattggacacatgaaaaatttatgggtagattttatatcaccaaatgctactctttccatttcaaaatacttactttttaacatgttgtttaatgtgttgtataaatttctaaaaaagaattatagtcaaaattaagaatgtttggcttagcacaaaacaaatattttgaagaggagggagtaatacttttacgatatacattacaattttttccatgttatacatacatgttgcaataggaaaatggttagccaaagtttgtactccctccatcgcaaagtaatacccgattggacacattctattacgaatctggaccagtattaggagaaagtattattttgttaaccattattaaaaaaaatcagtctcccaaagctgccacctttgctggttttcttggtttgttcagtttgttgcttgtgtgtcccccagttgcatataaacatgggcatgtcacacctcacaacccccctttgctttggccattttctcaagcacctaatttgcttggatccttcttgcacttgcaacttgcaaaacaaccaaaggaaatactagtagcatcatcaagcgaagaaggtcagctcaaaagggcgttgtgtgcttcgcctcgcgaaatgagagtcgcattgctccggagatgatggtcgccggagtaatcaggagcaaccaggatggcggcggcggcggcgggacggtgtccggtgcggcgaggattagcccggcggtggtgttcgtcctggtgatattggctgtggtgctgttcgtgtccgggttgctgcatcttcttgtcagattcttgctcaggcgcggccgtgggcgagatggcggcggcggcggcgacgcggaggcggcggagggtgtggaggagtcggcgttgcaacggcagctgcagcagctgttccacctgcacgacgccgggctggaccaggacgtcatcgacgcgctcccggtgttcatgtaccgggaggtggtggtcggcgt

SEQ ID NO: 10409 - DNA, 5817 bp, Oryza sativa
gttctcgaccaacggtgtagcgattctcccactatttccacttcaagtggtcgagttacgactactacctggtcctcgaccagaggtgtagcgattctcccactacctctacctcaacaaagttgatatcagtacacaataatgccaagtgttttacccagagatcccttaccacgacgacacctagcgttgaaacctatgctattgtccctttacgccgtcttgacaaggcctccgaggaacctaagggatcttcggctgggaacgcccagagccgataaggccttgtcagatcctgtagagacaaaagaccatgtaagatctggtcgtgtaagagttctcgccgtgcgtattaaccaagccgtgtaatcggaaattgagttttccaacttcacggctcggggctaggatcagtgcttgttcaaccaaggcaggtcaagggtccaagagccttatcctccgagaacgattctccaacgagaaggctgggggctagggagagtgtatgactctacaaactgactgatcgaagtcggtaagagagaagacgctcatacacaaaacattggtcggtaaatttgattcatttttagttttccatgcatattataacatgtcaccctttgagcattcactcgggggctatttctatttgatattcttttctgagtattgatttcaggaaaattctattcggcattgttgaagtctccatgtctctatggttctataccaagatcgactaaggcgagtacgaccaatgttgataaggctccgtcgcagactctgcgccttctcgatcactcgagaacagttggtggatctcgacaaggaatacagactgaagagatggtgtacccgccgagataaaatttcttgacttcaatccaaattctcgattacagcaagacgggagacttagttgtatgctctgtactttcttggttgacgtcggagattgactcagacaaaccctttaggtacccgcacgaggctgataaagcaagtctaacgttatctctgaactcaccgagaacggtcacttgagctcgataacagttactccatggttagcggccgagaatatgaattcgttcatttgcattgaagtcggggctactgtcagggttatggatactacatacctactagtagtcgactacatctcggcaggacccaccacgtaccatgtcttatacggaaactgacttcggatatggagggagttccagataaggaaagacaaccagagttctacatggaaacgataagtactcggattgtatccatattggtttccctagttctatttagacaaggggacacctatgggtataaatacaagaccccctaggaggagaggggacacgaccacctcaatcaacacccaccacaatctacggaacaacagaagccaaaacatacaagcctacatacggcaagacaaaacgccggatatcgacttcagggataagcacggctagtcccctatggtgtctccggatactatcaggagagacgaaagcgttatctctgatctcgctgggcatggattcgaggaggaagactaccctattgtcgactacgagtcagaccttcagaccgtcatgtcgacaacagttagataggttacctcacatattgtactggtgtaattatggtgaataagagcaatatcggcttcggctaacaggatgtagggttattacctgacaattcaggggcccgaacctgtataaaaatcctcgtctccgtctcttttacctcagtctcgcgtatatcctagtaccaacgatccccatacaatacaaataccggaatcgcgacatcaaacgtcgacacttcctacaaacgctctcaagccgccatgtataactcctataaatgcttctaagtcgccacatagcgttttaataaatttaaggaatatctaataattcttaaaaaggaaaaccatagagtggacccactttaaatccgtattgtgtatcaccagtgcacgttgtgtgcacgtatgtatgccaagtatatcctttccttactcctcttcatgctatattatgtagaaaatacataatacatcattagatcattagattatttaccacaaaatttatagttcaagacccaaactaactatatttagtaaaagaaataaaacacatttatacggaaaatcatatagatattttaacaatctatttaacaacacatatattttaatagaacaatatgcaataataaacaattttaattagaaaatagatatttaataagtacataactttgggttgggtcattattatgtttgtaaatatagataactcaagttggtgaaaccattgaatctatctcaaaggaagcaaaactcctctcctcctaatgtcagacgtacatgtgcacgtctcctggaagcaagatcacgatatatacatatatctaatctatctttattgatccatatataaatatatgtataacaaattatgttaatatgaaccaattaaaaggagggctagcttaatggtccattattaacaataatattttttaagatttgttaaaaaaaagtcccaaaacattcaatttaaaaagaaaaagcatcgtatttttaatttgaacttttagacatattttctaaataaactaagtctacctcctttttaaatgatgaagaagaaaataataattacttatagagatgaattaaatattacgtagtatgaagataacaaatacctaataaaaattatttaagcaaagctagcaaataaatttatgaagaaaacgtacttctaaagcttggcaagtgttatatggttgattttcaatccttaagtttttcaaatacatgcttatgatatacatgcccgcgtgaatacgcgggctaccatccttgtttttctaaaaagaaaaaaaagaaagagtccttatctgctttgaattctcatattttttattttactagaaaaaaatacacgtgcgttgcagcgggtgaaagctattttaattttattgttcttatacggtctagttaaggtgaaactcgctgtagaagttcacttagatatatattttattagaaattcataagctgcaattaaaagtccgatcgttttaagttagcatgagagtttttttaaagagaattcttatacgactctttctatattttcaaaaacgaacgaacttaaacccgacttaaaaacaatatgtattttcaaaagtgatcaaacttaattttgtatttccaaaatcgactcatacatggatgacttaccaaagtgccggcaaaaatatttttaatttttataatagtagatactttaagtaatgtgagaatttctaaactttaataagttaatagattggcaacgatgttatcgtgtctgcctataggaggaggtgaacagcggcgaatgctcattttctattcatcctccgccactatcggcgatgctatcgttctgtatgccacgccaagctatcgtggtatggcggtgacggtggacagacgacgatgacaccagcggatggacggacggcgcgtcttaagcagacaaacggaatggcagtttggcaccgaactacagtaagaaattcgcatgccggtgtaattgggaaaggcgcgcaaattactagatgacgaataaaaggtgtccgtatttaatgtcaaattatgaaatttatcccgagagcgacacccaaaggtggcaggccgcagcccgcaggcgtggtccctggctggtttagttgatatattttttattcaaaactaaaatttgaaatcaacgagttcaaagataacattgttttgtgactttgattaaattaaatcaatcaaataattatatatggatatgatatttgtgccgtgctcttgataaattaattaatttttatttgtgtgcatagataaagactcgtaatagcgcttaaggggtcattttggattgatgccaaaatatgcgctactaattgtttggcaattgaaatagtagtttgattggtttggattagagccgaagcattggcaatacacatacataatttggtagcactctaaaactttcttcactgtaacaagcattttggtaacaaatggtagcaaaccaaacacatattatatgaattctatcctaccaaagaattggaagtgccaaaatttacctaaatttgtgcactaccattaaatcgataggatagagaaccaaatagacccaagattttgtgttgaaatcctaaaatcataggtttgccactacggttaagcaagtattaattataagaagtgtgatctagttatagatggccaaaaggcccgccctgcatggcccggcccaggcacggccggcacttcgtgccgggccgtgccggcccatgggctgcgcctcccgcccaggcacggcccaccagccgtcgggctgtgtcgggccagcccgaaggcgcgggtggcccatcgtgccttttttaaataagtctattttttgtccctcctgtttgggctgtgacatatatatagcgaaaataagtctattttccgtccctccaatttagactgtgacatatatatagtgaaatactacctctgtcccagaatacttgtcattctaggttgtttagcatgtgctaaggttagaagaaaaagactataatacccttaataaaatattatatagttagatgttgaatggtggttgggggtatgatggagacaaatttgaatttgaagtggttgatgtgacaagtactacttgcaagtgacaactattttggggtgacgctaatgggcgactaatcgcgcgcacctccaggcgcgcgaccactactagtactaaggtacttctactactagtcctcctaatcgcacgccccaggactccagggctgtgtttagttcagcgcaaagtttgaattttggttgaaattggagatgatgtgattgaaaagttgtgtgtgtatgacaggttgatgggatggaaaaggactgaagtttggatcaaactttgaatctaatcacaacctaggagtagtactaccatcttaatctaagcactactactactagactacaattactactcatacagtgatactactacctattactagtagtagtaagtaatactactagtactactattctactactactataaaaaaatatacatgtataaaaatcctaaaaaatacgtatatataacctaaaaaatacgtgcatataaactttatatatgtgtatacaaactttgtatacgtatgtataaaaacctaaaaaaaatacatgtatacaaactttatatatgtgtatacaaaattggtatatgtacatataaaaacaaaaaaaatacacgtatataaagtttacatacgcatatacaaagtttgcatacgcgtatacaaagtttgcatacacgtatacaaactttatatacgcgtatacaaagtttgcatacatacatatttatacagaaaaaagatacggaaaagaaaaaacggatattatggaataaaaacagaaaaagaaaaagagagaaaccgagaaaaacaaaaaaaaaagggaaaacacggagctcctctcgcgcggcgcgccgtcgccgccccctctccgcgcgcgccacgtgtccagtcgcacggagaggggtgcgcgcgaccgatcgccaaatagcaatttcgcctattttgggacaaattttaaatgcgaaagagacaagtattgtgggacggaggaagtaagtctattttccgcccctcctctttgggctgacatatatatatataggtaaaataagtctattttacgtccctattctttcg

SEQ ID NO: 10410 - DNA, 6595 bp, Oryza sativa
aatcccaaatgggtatagaatgtcaacatcaccacacttctttaggcacctatcgtccggcaatgatgcgccgtctgccatgaactgtagggagatcacgaggcctatgaacagcagcagacgcattgctagtttttcaactgggagcttgtagtagcagtccatagttgggttcgatatgctacagtttcagtgctgatgaaatgtatatgcaatggacatcttcgtctcttatttctctaaatatagtagcttccacaccctacttggttatctttatattgaacttgttataattaattggtcaaacacaactatataattaattatttaattggtcaaacacgtgctatagtatggttctgccttctcaatcaagtaggaaaaatcttctttctgagttgttttcttctattttgttcttcgcgagctgggatgagatgcaacttgcaatactaaacaattcttagatatcttttcctctcgtgcccccggtcgctccgtcccagggagagatttttgataataaaccactaaatacgcgcgccattgcaatccgcatgtcttctctaatacatcactaggagtgctaattttttgatttcataccactttctctcattcccgtcattttttcttttttttttcgttttctgtttttcccttttctttggactgttttacccctggctccacctgtcaggtaaaagagagagggagatggggttttatctgctgctgtgcgccggttgccctgcccttgcctcttctcgccagagagaacaaaatggcatcaggagtacgcctgctgccctgctgttcctcttctctgagcaggatagtggcatataactgttgcatatattgctgcatgtatagtatatatgtgtatacataaacggttgctccggatgccaaaattttgacagcttgtaagcaaaattttgacagaatgtaccctaaattttggcagcatgtaccttgcaatttgtatagcatttgacacaagtcaagaaagtacccataatttggtcacagataaaaaaaatggcagcatgtacccataatgcatataaaatcatttcagaacaaacaagttcaatagcaaacttgagaacatcatccagattacataaccatttggcaagttgagagaacaaaatgaaatcaaccagctttgtcccatgtttcacattacaaaagcatccagaacactaaatattatatttagaaaagcattcattttttccctttctttggagtgatcttccttgcagctctagtagggcctcggaggggttgccatttgactcgatccttctccaacaacattagtcaatgccaattgccttcaatgaactgagtgttagtaaaattttgagaatcaatcataccattgaactaaagaaaaatcataccttctagtgacaagcccaggactcatattgctggaatcattgattgcaaccttttgtcttttgggtgtgctagaacccgctgcatcactagttgaacctagtggtcttccttgtttggcacgatttttcctaaaaaatgtaaaacaagttaaatgatctataaagattaatgtacaatatgctagaagtaaatgtatgtggctacctttttttcttggtaccatttaaaggacattttgaggatgtttgcctatggcccatgttaagacacctcttacattgaatctgccaccttcctttggtcctaggtttgcttcctttctcaaggcacccaactatcctattctttctttgcctccctacgtccctcatagtgagaggtggcagcaacttgaaaccaatatttacttttggccattgggacttatctggaagtggatgaataactcctgcatatgccagcttatacttttccactgaataacaaggatccaggtaatcagccattcttgggtttctagctgatattatgagagctaatgcatgtgggcatgatttgccagaaacttgccactctctacaagtgcatgtatgttctgtaagattgacagcatgcctactaatatcatgttcaggagtaatctccgccatttctgcttggtccctattaccttgcactaccttcaagtgacccaaatctctagtcattgcattcagttgacgaactacaatagggagcatcacaccatctagtttctcacctatcttcctccgtctcgcaaatagatccattgtctttgctctgatgccttctgcaagatctgcaataggacgatccttcatatccttgacccatttgttccatgactctgctagattgttggtgatgaagtcacattttatcttttctgagatcttgtcctccacattaacaaacaaaatcaactttctatcactcttcctaacaaacaatgcatgggctacatccatattatccttaaacagtgtttcctcaccagtgctcatgtcgtagccacttatcacaacatgttggctgctgccccattttacccttgctgcaagatccttttccaagctctccaatgtgcactgatgataatccacaacctattcaagccatttacgcgccacttcaacacaagtaccatcatcaagtttagctataaactgaccgaactgaacacacacgctaaactccacatcatggttggtcctatcacatacgaacaagaaaaacgagagtaaaaaatcattagttcacctgctaaccaaatatgtcctagttttgctccttagcccgttagtgcaaataatggagatgtggagagttatagcattacctagaagggagttcacttggaatcgaggagcttgccgcttgcgccatgatctcttgaaccgtgacccccttccccctctctatcttcaaaccctagggtccggaggctggccggcggcggggcaaggaggctagctggcggtggcgggtggcagggtgatggggaggctggtggcggcgcccggcgaggaggcggcgcggcgacgggactggagacggcacgacaacaggacgggagtgcacgcgctctgcgtccccttcccgatccccttctctcgatccctctatctcttttacctcacaggtggggccaggggtaaaacagtccaaaaaaagaaaggaaaacagaaaatgaaaatgaaaatgaaaaaatgacgggaaggagagaaagtggtatgaaatcaaagaattatcactcctagtggtgcattagagaaggcatgcggattgggtggtaagtttgcaaaggcgcgcatatctagtggcttattgtaaaaaatcggcgtatgaagccgcaccgccccctcccttcccctgctctctcccgcctcgccgccgctagagcagctgccagcaaagccgggtggaggcaaggaaggcgacgacggggctttccctctccctcgctcgtgatcaaggcggttggggcgccgacaggagcgaggcaccggcgacaatgtccagttccagcgctgccgagcatggatccggccctcccttggccggatctggtgctcctaccggcgggagtcgcgggggacagcggccctcggtctggcgatggggatggccggtttcgttgcccattggctagatccgccgccctcccagccggaagcgacgaagccgtggtttgtcaaggagaggtaggaaccggcgcgccctcgccggtgcggagacggtagccgtggcgggaggccgacgacggaggaaggagtccgatgcgtgccatcgtcagcgggggatggcggcagatataggacgccggtgatagaggagagagttgggaggacggcgatggaggtgggagccgggcgtgaggacggcggccgccggctgtgcccaccggtggttgtgggaggctggtgatggcggcagtaagaggctggcaccggtggcagcgggaggaaggtgcagccggcagggtgaggccggcgcgggtggcgccgacagctgcgggaggtcgactcggtcgaggcgagctattcatgggcaacttggtcgaggcaacgacgacaacattgccataaggggggtgttgaagccttcggcaagattcattccaggcgattgttctcttgcggcggcggcttgccgccgtaggatggtcacgttttaattaggtttttttttcatgtccaagggtttttttttttttcgggctttcctttttttgtcgatttggtttgttcgttgccttttttttttaccgatctcagttcgatccaatgtgctgcacacgcacaatgcccctccggccactaccctagccaaatcctagcgccaccgcgatatcgatctacctccctatgcttttttccttcaactagaaaaatgtccgtgcgttacaacgggtgaatgttatattaatcttatcattattattattattatacggtttacttaaagtgaaattcactgtgagaattagcttgtatatatatatttccagaaaatcatgagctataattaggagtccgattaattatctcaagttagcatccgagttttcttaaagggatttcttatacgactcctttgtttccaaaagcaaacaaatttaaaacccgactcaaatacaaatctgtattttcaaaaacgaacaaacttaaaaaccgactcatacacgagactcatacacgagtaatatatcaaagtaccgataaaaaatcttcaattttataacgtatcaaagtaccagtaaaaatatcttcaatttttataataagtagagacagatagaaagatacatagatagctagctagatggatagaagaaaaaggaactcgtgaaaatcccgtgggccgatcgtacgcacacagtttttgtttaccttttttacatgtcttgcttatactacgtacgtatacatgggttattagcgcctgcttatactacgtacgtacatgggttattagcgcctgtaggcaggcgtttttctcttttttccaatatatctcttgcatacgtgcgcgtactgagagagaagatattagccggttttagcatggagtaattagttaatagatccgattaacggttgataataaagggtccaccaatttaaatggaaatcgatggttggatatttttcttttttcttagaatttctatgattttgtctaatttattagagtgccatgttgcagcgtaggagcgtttgtagagtaccacgtgactgtttgagagtgtttttaagaagtttaatggacttttagtatagaataaataggtagattgattgcaaaaaattgttccgcacttcttcctcattattctctccatgatttcccctttcaattccattttaattcttcggatttgatctccattaaagatggccgatcggcgagcttccctgaactttttatcttgagttttgctaattttctctgattttggagaaacggaaagaggagattgagtagataaaaaattctcaactaattataggacatcgagaaagattcggccggatttgatagggagtgtcggctccggcatcatatgggcatggccgcacgggactatgttctggaggttgaagattgtagtcagccatgcgagctgagcctgtgactccacttatacttgtgggttgggtcgaacagagatagaccgagcggagggaacatttatacttgtggctgggtcgaacagagatagaccgagcggagtgaaggaaagaatggcctttcagccaaaaacatacgaaggattttcattatttttttcaattactagaaaaaatgcccgtgcgttgcaacggttgaaggctattttaattttattattgctatacggtttaattaaggtaaattcattttgagaattcgcttggacatatattttttctagaaaatcatgagctgcaattaggagccatatcatcttaagttagcatgtatgttaaatttttaaagagatttcttatacgactgctcatgtatttccaaaagcgaacgaatttagaacccgactcaaatacatatctgtatataaaaaagcgaacaaacttaaaaaccgactcatacacggatgacgtactaaagtaccagcaaaaacatattcaatctttataatagtttcactgtgagaattcgcttagatatatatttttctagaaaatcatgagctgcaattagaagtctaatcatctcaagttagcaacttagcatgcaagattttttaaagagatttcttataagacccctcctgtattttcaaaagtgaacgaacttacaaaccgactcatacatggatgacgtaccaaaataccggcaaaaatattttcaatttttataatagtaaaatgtacggacgaagaaatcacgtttaactttaacttttttattaagtagtagagattatagttttatagtgatttagttatttttaattttggatcgatcatgaaatattcacacacactgtagaatatccatatatttttagctttggcctatttcaattttgaactttatttttaacctttgagtaggtgcaaagccgcatgcgtgcaaagtcatcagtcgagcgtgtgagtggcttgatctctggatggcaatcatggcatgcagtcgaaggcttgcatgt

SEQ ID NO: 10411 - DNA, 5506 bp, Oryza sativa
cctggtcaaggtaaaagttatcatgatgataatatttgcatgtttttcatatgttgctgatccaagcttacttatcttaataccatgcagctgagactaaagttgcacctgttacaccccaagttgaggatcttcttgatggtttgtcctcaagcacatctctttctggtcagatcctactgccttactattatctaacattatggagcactacaaatgattatgatatttactgttgctatgcttgcttgctcaccagatgagaatacagcttacccgccaatcacagctttccagagtgcagctttgaagatcactttcaattttaagaagcagtctggaaaacctcaggagactacaattcatgctagctttacaaatttgacatctaatacattcacggatttcatctttcaggcagctgtaccaaaggtattaccttcaaactgttgttttggggtcacctctgatgctcatattaactggtcagaaatggaatttttagtaaaaaagttaggacttaagaaccaactatttatttatctgttttaatttctgtataaaatttgtataactattacttggcttgaaataccaaaaaccatctattgaggaggttatttatttgcattttcctttttctgacagtttgaaactctgtgtactggccatttaatttttaaaagaatactttaatctatattttcaagcatcattgtgatggctgatagcctgttatgcacatctgtattcttttggtttcctttaatatcgttattagaatatataaaaaacgtttgtaaatttcaagggagtgggtgacatgatacttttagttgtttttgctattcactttaaccttgaaattccatcattcagatgagtttgtagtttgctttagtagttgtgaaacatacaaaatactcgaggcttatatttcatttctgctgaatttggatttcagtttatccagttgcgtttggaccccgctagcagcaacacgcttcctgccagtggaaatgattctgttacacaaagcctcagtgtcacaaataaccaacatggacaggtaataaaggagttgtgccccgcagaaacaaattatgacctatttctggtttctttgatttaatagtcttctttaaaagcttgaaagagcatatgtaaccataacgattcagttttagctcagtagttaagttggaatattataagtcaagagttaatccatgtgccaaggttacatgcttttgtcataactcctacctatatgctgccttttgcctttgtgccattgatatttcgagcttaattacatctcaactctccaagtaaaaactccatttctggagatctaccaattacaggttcatcttacacgtatcaaataattaggtttaaaatacagtattgctattaggtgcactggctgtatgcatgagtaacagaagatgatgtgtgtttttactgattcgcacaaccaccatgaatagctgcctattatacctgtcatgtttccatgcttttattcagtatgatccgtaagtatacattgttcgttgctgttatatctggaattagttgcgtcatctatgcatattttagtgcatcatacaatatcaggcgagcagaattaggattttatgatccatcactaaagcttcccgtagtcagtcctaccatcctccacatagacaactatttggtgcacaaacagtccatcactaaggttcaatattctttctagacttgtgattcctaatctccgtttctgaattttaccgcacagaaaccccttgcgatgcgtatccggataacttacaaagtgaacggtgaggacaggctggagcaagggcaaatcaacaattttcctgctggattgtagtttgacctgtgtctataatgttgtgatagctcttccaactgctgcaagcaaaggcgagtttttctttttacttttttctgctcttccccttttgcttgccttctagtgagttatgtacacgacttagctggttttggccattcattcttcctttctatattgtatagtagccggcagcaattaatgctacatcttcagttttggcaaaatgtattcatatggtgctgtatatcacttgaggataactaaaattttcagcctccccctcatttcaggcagcaaaggaatgtgttgtatcatgatattgttcaatgtaattatttgtttttttgggtttacgtacctgttccatggtaaaaccccactggcatattttggacaactggacattttttttggctggaaagactttataatctgcacaaaaggaaaagaaaaccatccagaattggtttattgttttatccggtggcagattatttcattacacaactatcgggctgcaatttcttgataaaatatctggaatgaggactcccgtcatctcttcccagatgcaatgcaagccgaaattgtggaatgataaccctgttaactgtcacagacaaactcatcatgaatcggaggagatgctcgacaaaatatgacctggtaaagcactcgagtctcctggccatcgaggtacatcctgtgaaagctgatccccttatccatgattcattcatcggtgtctcagcatcagcaccatccctgaatagttgcttccactgctccagtactaatagcaggactgttcagattccagaaagcctcctttattgtcatttgacaccttgccttgccccatgttttgcctgatggatggggtgcccgtctagtgtgtgcattagtgtctgtgtgtctgttcggtcatcaccactcacaagtcagtagcaagcagcgcagcacaaaatttcaaacctcctttggaacggaggatctttgaaggattttgcgggatttgaaataattactggcaaaatcctataaaaattatgttccgaaggggaccttgccctttaatccaaaacaggtactagataacgaggtagctcggcttgtttgagttcgttatatgagccatgcttgttgaccctggctggcttgtcttgttaaccctgacgagcttaaaaacctagctcggctcgttaatagtaagttctatcttgtttatgtcaacatttataattttaaatttgtctatttatcgtatactaacatattgatgccagatactttagatgtaacttaaaatactagtaagtatatagtgatcttttatactagcgagttattaaatgagtcgcttgtttagcttacaagaaaaatgaaaactagctctgctggactcattacgactatagtttgagccgacccattgtcataagcttcggcgtttttttccacccctagtccaaaatatgccctctcttaccaagattgccatgctttgcaaacactcgtcgttacaagttttcaatggaacccgccaaacttttttctcccattttggacctgagagcgcacacgccctgagcactatcacaagattagtacagctaattaatgttcatttaatatcggataaagacacataaccacactcactcaggaccagctcttcacatgctgcagtttgcaggcgataaaccctcccttgtaccgaagtgaacgagcactagtgcacgagtacttagcctgtgtctatcgctttcggccgtttcgaaacgctcccgtccaagcaataagacgagacgtggctgagatataacacgattaattaatgtaagtatcttgcagctttaatgcaggcttgaatctttgatcgatagcagatgctgccttcagtttggcggatgcgtccgccctacctgtcccggaagccaatttaattactcccccaaagccacatcataaagcacagttttagttgataattcttcgccaaccttttgaaattgtagtcattgggtataggttttttagaagtcatttgctttttttattttcaatacaagatttgtttgaaagtgttctccactggaactaagataaaaaaaattacttcagttaataaagtttctgtaactaacttgttctttttttatcactaactaacatgtactctctccgtttcacaatgtaagtcattctatcatttctcacattcaaattgatgttaatggaaatggaggaagtagtactgtagtactgtattttttttttcttgaggccaacactggtaggcttaaactggcatgacttgtgtgtttctttcctttttcctttctctctttgtcatcatcaacaggagatcctgaaaacaaaaattaataactacaagatgactctaatggttgttgcttggcaggaaaactgcgaagaaaaattagtttgatacaatcctgaaattctgcaacagcagctcaactgctcaagtattatagaaaggaagcttaaattaagcctaaatgctaaaccgtttattttcaatcgtcagaaaacaatcctatgcgtcaatgcgtgtaaactaacgatagcttgagttgtggagaacttgcaaagtacttgaagataaagcaaagagtagtgtacaagcagttgcttgctaagacaacaagaatctactattaaaacaagtacttgttcttacttaaatgtttgatcaactctaccacattggctgattggcccacaggcatttctttcagggcaaagtgcagttattccagcgttgcaaatggtggatatccatagcccataggaaataaactagtatttttgttcataaatttagcctcttttgtttagtattgcaactaccaatactaattctgcagagtaagaaatcctctatatgaagctatttgttcatcatgaacacacgaggtgatgcaatcgaacagcaaaagtagaatggaacgaattggctatgaacagattgattaatacggtgttaaaaagatgagcagaattagctctgaaaaagttttgcaaattgcaaacacaccatggaaatcagcatcaggaagccccggggcttctcctcggccacggcagccggccgtccaccgccggcgagtcgtcggaggcgagcaccggcagcttccccttgccttgccgcggccactgccaaatcttggacaccgagaagctgtcgcccttgctgccggcgccgatcttcttcccgtcggcggcggcggcggcgtcgttgccggccgggttggcgccggcgagccctctcagcctcgccctgccattgccgtcgccgtgcctccggtgtacggacacctgcaagctcgcctcggcgaggacgtactggtaggagcccatggagaagcaccgcctggcgtccaagctgctgctgctcgactcgccttcctctcgcgtgataatgccaccgccgacgccgacgccggcggcggcggcggcggcgtcgtcgcggtcgtggacggggccgaccgccctggagaggttcttgaacttgccgaggcggacggggaacacggcgtactcctgctgcttccggtcctcctcgtcggccatctcgtcgaacgcggcgtcgaacagagcggcggggta

SEQ ID NO: 10412 - DNA, 8949 bp, Oryza sativa
gaaggggcgacgtcgtcccccagccaaccacctcgccgccgctgccgcctcgcctccgcctcgcctcaccgccgggtgggagaggggagagaagctgccgctgccgctcttacccgcccctgcgccgccctgcctcgccgccgccgcctcgcctctccgccgccgcgcctcctcctccgccgccgccacgctcgcctctccgtcgctgcctcgcctcctccgctcccgtcgcctcgcctcctccgcccccgccgcttgcctcactgccgccgcgctcgcctctccgccgccgcctcgcctcctccgctcccgtcgctcaactcgccgccgcgccacctcgcctcctccgcccccgccgctcgcctcctccgctaccgccgccgcgctcgtgtcgccgccgcactgcctcgcctcgccgcgccgtgtgaaggaggagagagagagatagaagagataagagagagagactgacaggtggggcccacctattttttaataaataaattgctgactggactgccacgtagaccaaaaccaccgcggattgggttgaggggggtaattcgtccggtttgcatagttgggggtgaagaatgtccggttttgtggtttaggggtgtaattcggacaaccgcgataattcggggggggtaattcgtactttttcctttaaatttaaatattgtctagtttgaaataattagtatcccaatcccaacgcgattctgattatctcaatactagcgcgataccacccaaaaaagatcctaaaccaacacgtatcattttacccggttagtatcgtagtatcttaccatacgtatcccaatagagacaatcttgcttagagcaactccagcagagttgccaaatggctctctaagctaaaatatggtaagtttggtgacaattgcactccaacagcttgccaaccgatggctcccccactgaccaaacttgcctagccagaaccagcttgccaagcataggccccacgcggcctttatccccccctgccccatctctctctcgccacactgtttccttccccacaagcagagcgcccgccatcggtggttgtgcactcgggctgtctgtagttgcgcgtcatagccatagtcaaaggggactctgccaccgctgtatatggaggaaggggcggagacaacgtgggggcgggggggcggtggggaagacccccctacccctaatagaccattagagcccccataataccctctaaaattttaatccatatatttatagatgaggggctaatatagactttgtttgaggttgttagaaggaccaaaaggctaagaaggccaaaaaaaaaatcctaacccaaccctaaatctcacttagttgctcttggtcattttggtttagcccctgctataatttcatcctagctccgccacttgcaggaggattctactgccattgccatcatccgatttttgctgctgatgttcgctctccatttttcatctctgtgagctccaacacctctactcgtgagctctgcccccaatccacgcgtgggtggataggataagctgttgccatcggtggcgaggatgggagggtgtggcggtgggtcggctcgacggtgagagagggaggtaaggagcgacagcggagtggcacgccttagacaccgcctccacagcgttgccaccgcctcccctgctggcgtgagcaacaacagcagtagcgtcgccgccgatgtaccccatcgtcgtggttggcctcgtctcgcctcgccccgtcatcgcccgcagtctcttgcgtcgccgtcatcaagatccgtgcgcgccctgccatcattctcttgtgcactagggagaggattggagagacgatggaagaagaaaaaggaagaggagaatgactggtgtggtccattggtatctagagaggtatgtggagagtttgttggagcgaagggcaaatctaactgtaaaattttggcaagctggtcaaataggtatttagaaagacaaaaatgacactctgttggagatgctctaaagcaatatgcacccaaacatgttgtctccaactctattggagagaggtgagcccctgttgtcatgtctgccctagacttaagaaatttcacagttttcccccgaatatgaacccaagagtaggaatctttgttttcttttacttttttttaaattaatacagatataaatttataaacaaatatacatgtatataaaaattttatatacgtataaattttatattcatacgttatacatataaactttataaatatacctataaaagagctttgtatttataaactttatatgtatatttcttaattggctaatataaaataggcaaattttgctatagaacattgtgccttcacggttttagctgtaggacaccgtacgagtgacttttgagggaagacactcttaaaagttagatatttatgggtggacatgacacctattaaaataataatttccaactaaagaggagagagaaattgcgtgaaatgtcaaaaataatagtggacccacatgttagctctcccatgagatagacagaagagacatgagaggtgacatatgggtcctgtggtatttttgatatttcacgtgatttctctctctttttcggctggagtttattactttaataggtgtggtgtccaacatcaaatacctaaactgtgaagtcacgatgtcttgtagcaaaatttgctaataaaatatatacactcaaatgtgcataaagttttcatgtatatatgttttgaatttgtttcaaaacttatacttttgtatatatgttacttacggtacatctagaacgattgagagatagaagatatccagccgcgagccaggagcgaggcaggtggggcgagcgcgccgcgcattagagcagctacaatagtggactacaagccagctataaacatattttaaggatataaaataggagagaagagcacatgtgtgtatgacatgtgggaccagatactaattgtgtagtacatgtgtataggtaactattgtatgaattatctataaaattgactatagatgatttagagatagtagttggctatactgttgtcgaatgacaactacgtcacgtcgaacaacgtggaacttggatggatgttttgaacagtaaagtgatgtattgtcttaataaaatttttgggatccctccattacatagccctagggggctatttatagccttagtattggcttacaccttatagggtttatgttgtatggggaaatttacatggttactcttatgatagggacgttaacatgggtacacagtgtcttttgcatctatgggctctaatgggccacttaggccggtctggcccatggctaacgggtccccatgggcctgtcagccctctagttctcctttacataagactccagcttgggtgaaacctttgtgcttcgcgacatggccttcgccattcgcctttcgcccatgtggccctctagagccgagcctttggtcttcgcccacacgcttcgtcacatggccttcgccatgtaccttcgccttggtcgaagccgacgcctctggtttgatccttcgtcggatggatggtttcggcagggttggtcgaaggctctcgtgtcatgcctccaacatatactattaaacttgctcttaggcgttgggatgggctgttgtcattgatggcgattagcatggtggctccgcgcagattatagggttagcacggttatacttttttctcaaataatagcacatatattttcaccttatatgtaaaaaaaatattaaaatggcggccaaattttaaactttggcttccaaaccggcaaatgtcacatattctgaccggtatagtaattcatatgccgataaatcaaacatcatgaatcatttactatattttattaataatacaataaatcaaagatactaatatgtgttatatttgttttctcttctcccctcatctttatctttgtactattggttgtaatttcgagaatgattaaactcggtcgctcggtgcagagggagccggatcgggcgctccccccgcgcacccctccctccatgtgctgcatgcagatcctgggccccaccacgtctatgctcctatctgccattgcaacaaatcacccacatattttggaacccctctattaagggaattcggtttattttttgttccaccaaaaatgtttcacctagtgtattcacaatgtttcactatgtatagatctaatgttgcagtgaactaaaatactccattgcaacaaaaaaaacccacatattttggaaacccgctattaagggaattcggtttattttttgttctactgaaaaatgtttcacctagtgtacttataatgtttcactatgtatggatcaaatgtaacagtgaactgaaacattctttcgctatttgctgaaacattatttctatataagttgaaacaatacccgatttaaacgagtgaaacattttcgatctatttagtgaaacaattccgatatacctggtaggacatcgtgcaacatttaaaaataattcaataaaaagctaaaaaaaatttcgtcggaatatatccatgtgtggtcttgttttgaagatttaattgcaacgaatttaatggtgcaatcggatcatgatttggatataagtagtttaagagaaaaatcagtttaaagtagtttttacacgtaaatctggtgctgacgtcaacgcccgatttttcttcaaatcgatcgggcacccgagccgtagactcatccttgtaatttcttattatttaatgatattctttcacctattaaagatggcatattgcagcaacagagagaatagggataagtaatgtgtccatactggtagattgtatccaatattaggtagtaattatttttcttgcaaaaggacgcgcctacggatcggtcgcccgatctggggctggggaaatcgggcgctgacatcgacgtcagcgcccgatttacgtgcaaaactactttaaactgatttttctcctaaattacttatccaaatcatgatctgattgcaccattaaattcgttgtaattaaatcttcaaaacaagaccacacatggatatattccgacgaaaaaaataagcttattattaaattatttttaaatgttgcacgatattccaccaggtatatcggaattgtttcactaagtagatcgaaaatgtttcactcgtttaaatcaggtgttgtttcaccttatataaaaacaatgttttaacaaatagtgaaagaatgtttcagttcactgcaacattagatctatacatagtgaaacattgtgagtagactatgtgaaacattttttggtggaacaacaaataaaccaaattcccttaatagggggtttccaaaatttgtggtttttttgttgcaatgaaatgcttcgttcactgcaacattagatctatacatagtgaaacattgtgagtacactaggtaaaacatttttggtcgaacaaaaaataaaccaaattccctttgtagagagtttccaaaatatgtgggtttttttttgcaaaagaatattttaattcactgcaatattagatctacaaatagggaaacattgtaagtacactaggtgaaacatcttttgtggaaaaaatgggagggagaagtaggtgggtccagcagatacgcacatggggagaggggcgcgcgtagggagcgcccgatccggctcccccgcgccggtcacccggagtagagcattatcgaaaagattcgtccatgcatatgtccaatcggacatcacatgtatataacatgatttatctattatatactaaaagtccattaaatttcctgtcagggttatggataccacatacctactagtagtcgactacatctcggcaagacccaccacataccatgtcttatacggaactgacttcggatatggagggagttccagataaggaaagacaaccaaagttctacatggaaacgacaagtactcagattgtatccatattggtttccctagttctatttggacaaggggacacctatgggtataaatataaggccccctaggaggagaggggacacgaccacctcaatcaacacccaccacaatctacggaacaacagaagccacaacatacaagcctacatacggcaagacaagacgccggatatcgacttcagggataagcacggctagtctcctatggtgtctccggatactatcaggagagacgaaagcattatctctgatctcgctgggtacatattcgaggaggaagactaccctattgtcgactacgagtcagaccttcagaccgccatgtcgacaatagttagataggttacctcacatattgtactggtgtgattatggtgaataagagcaatatcggctccggccaacaggatgtagggttattacctgacaattcaggggcccgaacctgtataaaaatcctcgtctccgtctcttttacctcagtctcgcgtatatcctagtaccaatgatccccataccatgcaaataccggaatcgcgacatcaaacgtcgacagtggcgcgccaggtagggggactttggtgcttcaggatttcaacgagatgggttcaatagatggattctccaacaacaatctattcgacaactttggctgtggggagatctaacccgaccgaagtatatcccccaacgagatcggaatcatcgccatcaactagtcgatccggccagatcgatcaaattccaagatatcgtcgccgcggagtcaacccaatattaagttgctgatcaagccctccgcctgcgacatcagctagtacggctggtgtacaagcgtcagggattcatctgtacctgtgccccttgtgttgccgtgttctgctcggagttggtcaactggagtgtgcttgcttaatcatgtctcgtgcacaattatgggcacacacggccatactactacaggtcagcacgctcccagtcatatgtggactcacgtcctaatccactaaatgcatgggacttctaccagagatgttcggcataaaaaacaaagtaattagtagattaatttaaaaaattgatctactaattttgtagatatatacagcatatatctacacaggtacgcaataatctatatacaatttaccgtacctattttttctaatctatacaatattggcagatcattaatttattatgtttagctagagcgtgtttttatacaatatctattgtgcgagtgcttccgatgttaggccaactacggtctaacgctgggggctcgctctgttctcttctgtatgaatcattcttgtttacggtctacataatgcctgatatttacatctgctcgttatatcctgataataatagaagattcattcagttttttgagtacatactcgatattctctgctatatatctcgcattctagaaaatatttttcaggaacaattgagcactcgagtaggttgtggtcgagcacaccccattatcgagaacgatctcgacaaatgcagagtcgtcgcccccgacctaccaatgacctatctcatagcaccggccatggctggactattcgagaaaaggtggttaacggatacttcctcgcgaatgttgtcggcttgatcacccgacatgattgtgaacgaacatccggatatgctataaggtgggtatgtgagtcatgctggccacatgagatgcacatgtaataacccaactctagctcttccattggtgttcgagagataattctactcgctcgctggttcccgaaccagtacgtagcaatctctcgcaccgcaacctccattggtgttcgagagataattctactcgctcgctggttcccgaaccagtacgtagcaatctctcgcaccgcagcttccattggtgttcgagagataattctactcgctcgctggttcccaaaccagtatgtagcaatctctcgcaatcgcaccttccattggtgttcgagagataattctactcgctcgctggttctcgaactagtaaaaagtagcaatctctcgcaccttaacttcagatggtcgaggtacgactacagcaatagcgtagcggtcctcgcaccatgacttcggatggttgaggaacaactacgactggtcttcgaccggcagcgtagcggccctcacaccatgacttcagatggttgaggaacaactatgactggtcttcgaccggcagcgtagcggtcctcgtaccacgactccaaatgatcgagagacatctacttactggttctcaaccagttaatcgtagcgatctctcgtacatttacttctagtggtcgagttatgactactacctggttctcgaccaacggtgtagcgattctcccactatttccacttcaagtggtcgagttacgactactacctggtcctcgaccagaggtgtagcgattctcccactacctctacctcaacaaagttgatatcaggtacacaataatgccaagtgttttacccagagatcccttaccacgacgacacctagcgttgaaacctatgctattgtccctttacgccgtcttgacaaggcctccgaggaacctaagggatcttcggctgggaacgcccagagccgataaggccttgtcagatcctgtagagacaaaagaccatgtaagatctggtcgtgtaagagttctcgccgtgcgtattaaccaagccgtgtaatcggaaattgagttttccaacttcacggctcggggctaggatcagtgcttgttcaaccaaggcaggtcaagggtccaagagccttatcctccgagaacgattctccaacgagaaggctgggggctagggagagtgtatgactctacaaactgactgatcgaagtcggtaagagagaagacgctcatacacaa

SEQ ID NO: 10413 - DNA, 3599 bp, Oryza sativa
ggacttcttaactgagaaagaatcatgggaactttgcaaattcaaagcaggagttcctgacatatctggaacagaaaccgtggaaggaaaaatagcgaaaagatgtggccgtttacctcttgcactagatgtaatcgggacagtcctgtgtggaaaggacaagaggtactgggagtgtgcattgtcagagcttggagttcctaccctcttgagaaggccgaagtgttgcaaaagatatacatgcccttggaatccagttacaaccatcttgaaggggatgagaaaaaatctttgttcttgttgtgtagcttgtttcctggaggacacaaaataagtaaaaatgagctaacaagttactggacaggagaggacatcttcaacgagttcaatactttagaggaaaccaggcgaaaattacacatgaggatcacagatatagaagactcttttctgctgttgccaattaattataccaaatgtgtcatgatgcacgatatagtgagagatgtggcagtttttattgcctcaagattctgtgaacaatttgctgcaccatatgaaattgctgaggacaaaataaatgagaaatttaaaacgtgcaagagagtatcatttataaataccagcatcgagaaacttactgcaccagtatgcgagcacctacagttgttactgctcaggaataactcaagtctgcatgaacttccagagaacttctttcaaagcatgcagcagctggctgtcttagatatgagtaattcttccatccattctctgcttctctctactaaagacctagcagcggtccgaacactgtgtctaaatgattcaaaggtatctagaggcatttggttagtcagtagcttggagaacttgcgagtacttagtctagctggttgttcaattgattcacttccagaacaattgggaaatctaaagaagcttaggctattggatttatcatcgatggaatcccttgagatactggagggactaatttctaagctacgttacttggaagaactgtatgttgacacttcaaaggtaacagcatatctcatgattgagattgatgacttactacggctcagatgcttgcaattgtttatcaaagatgtcagtgttctctctctaaatgatcagatcttcaggattgattttgtgaggaagttgaagtcctatatcatttacaccgagttgcaatggattactctggtcaagtcacaccgaaagaatctatatctcaagggagtcaccaccataggagactgggtggtagatgcattgctaggcgaaatagaaaacttaattcttgacagctgctttgaggaagaatcaacaatgctgcatttcactgcactaagctgcatcagtacatttagagttctgaagattctgcgactcaccaattgcaacggcctgacacaccttgtctggtgtgacgaccagaaacaatttgcatttcacaacctagaagaactccacataacaaagtgcgacagcttgaggtctgtgatccacttccagagcacaagtaagaacttgtctgcgtttccttgcttgaagataatccaactaatcaacttgcaagaaactgtcagcatttggagttgggaaggaaatccaccaccacagcatatctgtccaaacctaaaggaactcaatgttcagcgctcagaaaacttgactttgtccttgttgcaagagtagctgctatgcttagtaatcttgagaggttgacactgaaaagcaacgtggctctgaaggaggtcgtggccgatgattacaggatggaggagattgttgccgaacatgttgaaatggaagaaactgttggaaacgaaattgtcagtgctgataccagatatccggcacatcctgcagatgtcggtgactcgttggatccagaagcatttcctagtctaactcatctctctcttgtggatttacctggaatggagtacttctacaaggtcggaggtgaaatcatgagattctcctggaaatcactagtaagtctcaagctgggaggttgccactccctgaaagggttcccaatccatggtgcaagtgctccaggactgaagaatgttgagttagtacataatggtgataaaagctggtaccaaacgctgatatcacaggatgcatctttggctgaacgattcaaaactacacaagagtaatcggccggtgactccatcttaatcttaatttatgtttcataaactattaaagcttgttatgtttcataaactattaaagcttgttgaaactatttgtaacatgtactattcctccagcatttccccccttcctatagaaactatgttatgcaaagtcaaaatgttgaaattataagcacataatgatttaatttattccataaataaattatgacattgcagatgtaaactagattgaacgcatcattagatctacacatgtaaactaagcagtaaaacatgaacagatcaaatgtgcgcaacatgtcgaacacgtaccgaggtggcggaaagaccggttgctcggcaagaactactcgcggttgcgggcgtcgacgaaggcgcgcagcacgcgagcggagaggaaggcgagccatcgcggacgaacagggagcagttgcgcgaagcgcttcccaaaaaccttaatgccgccttctcccggtgcaggacgtcgaagacagaggttccggagacctgctctcccgatcactggtgcacgccggcgagcgggatggagtagtctacgagtgacggcgcagtacagagtaggaggcaaaccctagattgatttcgcgtatgttgcgtgaaggcagcggctcagtttatatagagataggtcgcctgatcaaggcgcccgcgtaaccgaaccggataagtcgcgcgtaacctatccggactccacgccgttttcacacaccgaatttttcggaatgtttccaaaacaaaacaaatctgaatttcccgcagcaaaacaaaacagcaaaaggaggctgcatctacgcaagggtgagaagccaattttgcggaccattcgacgcgtacgtcatgcacgcgcgccgcctgccctgccatgccaggccaggcgaggcgagtgagtgcgcgcatgtgtttcccctcttctctccaccacacatgcttcaagtggctaggagggcatcctcccttttaaggaggtccccctctcctggaataagcaaggcggtactaaactccacatgcatgccatcccatgaggtgggcttttgtgattttccatagaattaatcttcgaatgggccttagcccatctattaattccaacaatcccccaccaaatctcaaaatcccactgagatttgccttttccaatgtactatttatataccagcggttcgatggagactgattaaggttgaacatccacctagaactccaagctacacttactcacaacttgaacaatggactacgccttgaattgcaagtcttgtgcaagcaagtttcactcagagtcttatctggtactagaccgtctgtagactacccctcgggtggagcgtataagtcatactcctaggtctttagtaagcttcctagaagattcacccaaaatct

SEQ ID NO: 10414 - DNA, 10576 bp, Oryza sativa
aattctttcaagaatgctctgcaggacagcatcttcgctaattaaagccaatagaagtcattaaggcatagccaacctgccttgcagctcacgagagtacatgcatcttcacttagagagggtatagattggtactctcctctagtttactaatggtttattcttcccaggttctaattcacgggatctccgatcacatagactgggttaccaccatagtataactcacatgggtctcaaacccatctccttcgatgcattgtctatcacatttcgtgatagtcccttcgtgaagggatctgccaggtttctagctgtttggatgtaatccaacgttataactccggagtttctcaatttcctgacagacctcaatcgtcttttcacatgtctagacgatttcatattatccttagaactattcactttgacaattaccgtttgattgtcacaattcataaggatacccggcaccggtttttcaacaataggcagatccattaatagatcacgcagccattctgcctcaacagtagcagtatccagtgccgtcagctctgcttccatggttgacctcgtcaaaatgatctgtttgcaagacctccacgaaatagcaccaccacccagtgtgaagacatatccactagtggctttgatctcatccacattagagatccagttagaatcactatatccctccagtaccgcaagatacccagaatagtgaagccccaattccatagtaccttttagatagcgcattactcgcttaagcgtacgctagtgatcatctcccggattagaggtaaaccggctcaacttgctcacaacaaaggagatatcaggcctagttgcactagccaggtacatcagcgagccaatgatttgggagtattccagttggttcctagcaattctcttgttcttgcgaagcaacaagctaggatcataaggtgttggagaaggcttactatcaatgtagccaaagcgattcaagatcttctccacataatagaactacaacagtgtaatcccattctcacctctaattagcttaatgtttaagataacatcagctactcccaaatccttcatatcaaaattttgagacaagaatgatttaacctcatttatcacctcaaggtttgtcccaaatatcagtatgtcatcaacatacaagcacagaataactccctctcccccaccatggcgatagtacacacatttatctgcctcattgactgcaaagcctgtagatgtcaatgttttgtcaaatttctcatgccattgcttaggagcctgtttcagaccatacaaagacttcaacaatttgcacactttgccttcttgaccttcaactacaaacccatcaggttgatccatatagatctcctcatccaactctccattaagaaaagctgtcttaacgtccatttgatgaacgagaagaccatgtgaggctgctagggaaagtagcacacgaattgtggtcaatctagcaacaggtgagtaagtgtcaaagaaatcttcgccttctttctgagtatagcctttagcaacaagccgagccttgtacttttcaatagtaccgtcaggcctaagcttcttcttgaacacccacttgcaccccacaggtttacacccatagggtcgctctgtcacctccaaagtcctgttagcaataatggaatccatttcactacggatagcctccttccagtagtctgcatcaggagatgcatatgcttctaaaattgacttaggagtgtcatccatgaggtacacagtgaaatcatcaccagaggacttagccgtcctttgtctcttactccttcgaggagcttcactgacatcctcctcagtgacatgttcatgtgtatgttcagtttgttctggtggtgtgattggactgggaattacttcagagggttggctcaaactactatgtgcatccttcattgggaaaaagttctcaaagaaggtagcatcacgagactccataattgtaccaacatgcatgtcaggtacctcagatttaactattaaaaatctataggcaatgttgtgatgagcatatcctagaaagacacagtccacagacttaggtcccagtttgcgcttcttcgttattggtatattgactttcgccaagcacccccatgtgcgcaaataagaaagtgatggttttctcctaatccatatctcatatggtgttttgtccttatttctgttaggaactctgtttaacacatgattcgaggtcaacaatgcctccgcccaccgtgccttaggtagtcccgcggtgtccaacatggcattcaccaagtcagtcagtgtgcggttcttccttttagcaatcccattagactcgggagaatagggaggcgtcctctcatgtatgatgccatgttcctcacagaataagtcaaactcgtttgagaaaaactctccaccacgatcaaacctaagcctttttatctttctatcaagttgattttcaacttctgccttataaattttaaaatagtctagtgcctcgtctttcgtttttaacaagtacaaatagcaaaatctagtagcatcatcaatcaacatcatgaaatatcgttttccacccttcgtcaacaccccattcatttcacaaagatctgaatgtaggagttctagtggtgccaagtttctctcctcggcagccttgtgaggcttgcgaggttgcttcgattgcacacaactatggcacttagaacctttgacaatggaaaacttaggaattaaaaacatgctggaaagccgagacatcaagccaaaattgatatgacataaacgtgagtgccaaacattagcctcatcatccacactgccacaaatatggttcacagatttattgcagaaatcagaaagggaaaagcggaacaggcctccgcactcataacctttaccaataaaatatccatgtttagacatgactactttattagactcaaaaaccaacttaaatccgtctctagtcagacgggagccactaacaagattcctgtcgatagaagggacatgttgcacgttcttcagctgcacgatctttcccgaagtaaacttcatatctaccgtgccaacaccatgaatagaagcatgtgacccattccccactaggacggtggaaccccgtgcgacctgataagaagaaaacaatgagatgtcagcataaacatgtacattggccccagtatcaacccactaattagtagactgattaactgaaaaaacaataggtaaattaccatacccgcttcgatctccagtgttgccaatggtcacattagcagacttagaagtctggcttgtaggtgtcttcatccccttgcgctgtggacacttcctagccagatgaccaggttggccacacacaaagcaagtcctctcatcctgattaggattattgttgttcttcttctgcttcttgaagttggtggtctgttgagctttgtatttccccttctcttgttctgggccttatgcacaacattggcactgtactgcccaccatcgcccttagacacaacatctttttcccgagctttctcctcaacatcaagagacgctatcaacccctcaacggagtattcctatctcttgtgattcagtgcagtaccgaaacttctccaagatggaggtagtttcgcaataatgcacccgaccacaaatttgtcgggtaagacacacttaaggagttcgagttccttagccatggtttgtatctcatgagcctgttcaactacagaacggttgtcagccatcttgtagtcatgaaactgctccatgatatacagatcattgctagcatcagtagcaccgaatttagtattcagtgcatcccacaactccttagcgtcggtcatatgcatatacacctcgaccagacgatcgccaagaacgctaagaatgcattccacaaagagagtagtggcttcctcaaattgcttctgctgatcagcagtaagaattccttaaggtttgtcagtactcacccagaagcatttcatagctgtcagccatagagtgaccctgatatgccatctcttaaagtgcacaccggtgaatttatccggcctcagtgcatcggcaaaaccagccatagtaaaatcacagcacctataataaggtttttggattgttgaaattataagcacataatgatttaatttattccataaataaatcatgacattggtgatgtaaactagattgaacgcatcattagatctacacatgtaaattaagcagtaaaacatgaacagatcaaatatgcgcaacatgttgaacacgtaccgaggtgccggaaagaccggttgctccgcaggaactactcgcagttgcgggcgtcgacgaaggagagtcgcacgcgagcggagaggaagacgagccatcgcggacgaatagggagcagtcatgcgaagcgcttcccaaaaaccttattgccgccttctcccggtgcaggacgtcgaagacagaggttccggagatgtcacgcccggaaattcactagtaatttccgaactaatttgtgcattaaatcctcgtccaggaatcagccgaggtacacaaactgacaatttaatatacagattcatcaatataataacgttacatacttacaaaagaaaagaaaactacagcggaattacggtctagcgaagctccggctccactcccacaggcagctcaactggggtataagccaaacgtcttctcgttcgcaacttgtcttcaactgaagtttgattgattattgcaaggtgagcatatgacatactcagcaagccacatagcaaatatgcaagtgcacaaggataccaaagaatggcataatatagggctcatttgcaaaagcagcatttagcaaataattgaggattgtaaaactgtaaagcaattaatcatcaatattaatcaacactgaacagcacacccatgctgcacaggcccaaccatcctgaacaaccataccctgctgcacagatctatctccaaaccaggaatgtaccattccaaaccaggagctaaattaattaccatcaattatcacattattattaatgagtagtgtgggactaatcacgaaagacattgttagacccgcccataaccgcgggcacggctattcgaatagttttactctggccaaaggtgtaccactgtacccacaagacacaacccaccagcatgttaccgtgcctggccagacacgtcaccatgttgagtgattgtgacaagacccctcgcataactcaactcaaagcagtgcaccgttcctggatcataatcacccccttataaaacaaggcatggactccccagcgacccccatgggcttgtctccgccacatctcagtctggcacaccacaatgagccttgctatacaaagtgtccagctgttgcccattctggtttgtggttagcacggttaatgtttcacaaccgaaactcgtgaaccggtccttaattgtcatgagcacgaccatcaaaaccatgtgctcacaacccaccattatcaagttttagttggcacattaattaattaaccaatcatgattagacatcgtgagctaccattatcatgtccatcattaagtagtagtgaaacattagttatcccaatcgtgtactaatgtttctaagcatggctaagcaattatatctaatatatctagttgaaccaatatataaatccaactagtcaaattataacccgaggtaatcaagaaataggataatcaatgcaaattggccataacaaaggaacaggttcacaccacccggtgacattcgaaaataaattcatagttgaaataaatagagaatttaaatataggatcaacatgctcaaaggtattgtgtttgggatctgtgtgacttgccttgcaataatcggtcttcaattaatcttcttgaatactcccgacgcacacgcgaaccttcgaaacgacggaaatgacaagctaacacgcaaaacgaggaaaaagactaagaaactccaaataaacaatacatataaagtaaacaaacatgtagatcatgattttagattaattgtgagacttgaacggcctcattccgatttcatatgaattagttatgaattttacaagatttaattccaattaaacctattaaagaaaaagactattccactaattaaatcatttacaaatgatttataactgagataaaagattaaagcaacctccggaaatagattagatcatatttggtagatgacatatgataataaggactaatatgctactgaaaagagaggaaatgatttatatggctgagattaatcttgaccgagagttgaccaaggttcaacggatgcaagcgagcctcacaagataccgacttaacgagtcaattctacgtgacacgggatcacccaaatgatcaaccgaaaccggcgaacggaaccggcggctctgaacggctctaaactaaagaacgattccacacggacgaacgaacgaagcatggggacacctcgttcgaacgaacgagcgaacaactcaacaacggctgcgactaaaccgatgggctagacacgattcacggtaaagccccggtacggcaacgataggccggtaggaatttagggatgcacctacggccagacaacttgactaccgagcaacggctaaagcggcggctagattaaagcggcacacagctgcgacacggcagcactagggcgacttggctcggctaggcggcagcgactcggcagaggcacgcggctagggttagggtgacggcatagcgatgacgacacacagctacggcagatggtggctacggtagtgggacagcagcgacttggcacgcacgagcagcagcagcacggctgtagcagggagtggcacagcgacggctaggcggctagtgcagcggcgacgctagggcagcagctaagcgtggcacggcgacggctactcgacgacaaaaacaagagattaaaaactaatccgagggaacacggatagaagtttcaccgaaccaaagcgatcggagaggaagggtcgacgatgatggtctggcgacaacacacggagacgatgaagacgcaacacttacgcagcgacgaacagcgaaggagatggccggggatgagctccgatgggcggcgaggtactgtccacggcggcgacgactttccagcgatgagcagcgacaacggaggggtggacgggcttcacttcgcagctgcgaatccaatggaggcgacggtgaagcttggcgatgacgggaggtaaaacagacttctctgcgggctgagaggaagggagagaatgggctgaattcggcccaagactaggaaggaagattttattgcttttccaaataaattaaccaatgagatgatctttcaattgttaaaaatacttccaacgctcaaataattccatgaaaaatcttgaacatacttggacactctaagtatttaacaaaattgaaaccatctcatttcatgattaatttaatatgtgaataattactgaaatgttctttgcattattaaaattaataattgagctctgaaaaattcgagaaaattccagagagtataattaatcatggagaatttaataaaaattaaatcctgccatgctttatatttaggaaattttatttcccacatttaacttcacttgtaaattaatgaacatttaatataaattctatgaacaatgtattaaataatttataaatcctgaaatgaaattcaggctgtgacaggagacctgctctcctgatcgctggtgcacgccggcgagtgggatggagtagtctacgagcgacggcgcagtacagagtaggaggcaaaccctagattgatttcgcgtatgttacgtgaaggcggcggctcggtttatatagagataggttgcctgatcagggcgcccgcgtaaccgaaccggataagtcgcgcgtaacctatccggactccacgccgttttcacgcaccggatttttcggaatgtttccaaaacaaaacaaatccgaatttcccgtagcaaaacaaaactgcaaaagaaggctgcatctgcgcaagggtgaggagccaattttgcggaacattcgacacgtacgtcatgcacgcgcgccgcctgccaggccaggcaaggcgagtgagcgcgcgcgtgtttcccctcttctctccaccacacatgcttcaagtggctaggagggcatcctcccttttaaggaggtccccctctcctagaataagcaaggtggtactaaactccacatgcatgccatcccatgaggtgggcttttgtgattttccaaagaattaatcttcgaatgggccttagcccatctattaattccaacacaaaacacgagtaaatatatactccctctatcctataaaaacaaatatagcatggaatgtaacacatcctagaaatatgaatctgttagatcccatattaggtttgttttgaaatatgaatctgttagatcccatattaggtttgttttttatggggcgaaggaagtataaatcatcaaaagtaagaatccagaacagactcctagtcctaggaccaagcatacacctacccaggttcaactcctcccttctattttttttcgataatggaatcttcattaagactcagtcaaatacaccaacaccaagttgatacattccaactaagccaccctcggcctctacataaaatgcacacagcctacctagaccttcattacgataccgagatatcagtggctatcaatccatatactagatcgccacccatgctcctgagtaaaaactcccacctagtccaaacgtcgcgatactatcgcaatagtatcccgaagacccggtttgtggaggatagcctaggtgcgaagccaccgggtgactaaagtaataacctgcaaaggagaagacaccaacttattataaaaatttacctcgtttctgtttatctaaatggactaacaaagagctgctgcacccatcaaaagaagatttgatgggtgtaatttgtaatcctttttacatatgcaatctgtaagttttataattttaatatatttacacacggcaggaacctctcctatagtttctttttttcaaaacaaaaacagatttctcatttctttaggaacacatgtaagcaacgcccatgttagaaaaccggcctcgaaatcacatcggaaaccaaaccgcggacgaaaacaccataggagatccaaacatgatgacgacaccgaggcacgatatttgataacagagtttagccgaggcctagtacatctcaggggtactgattacgagcgctcctccccgatccagcatattacagcgtatcagagttacaatgactcacggccagtatacaactccaagtcctatactgtaaccgattacgtacatatattcgacacaaacaataacaaactccaccttgaagaatatgccaacctgaatttgttacttgctcgaacctctgtgtacccgaacttgagttgatcctttttcgccgctcacgctgaactgccccgacaagcctccaccaggctcaccgtaaacaagagactctcactatccctgtaatttctttctcttgactccacctgcaacagtgctccaccgtctctcatatcaccacagtcatcttaccaagcaaaattggattccttcctagctatcacgtcgtagacttccccaagaccatgttcacctccatctaccgtcttaaatttgacttgatctaatccatgaccagataaccgatgtcatcaccaaatagataaatcaaactcaccacacatgaagagaacattttcttcattgtcgccttatgaactaagctaataaatctaacatccacgctttcctgcattcgtagacttaattcctgataatttgagaaaatcaccgttgctttgaatcatccgaagaaattaccaccatagtgcttgctctttctcttcagtgacgtatatttcatatatcctcatcatgcaaaccccgcagatcctggatatatcctgtactgctaaacaacccgttgacgctctcaacgattttcacccgttgttgcccagcaaccatttacacctgcctgacaataatatccacttgcgctgcctttcctgccttaccaatactttgacttatcacgctaccattacttcgctgcatgtataaacttagcatggtcgcatcataccgtgacacttgggattgtggacgtttatgcagaccagcgtcaacatccaacaagtgtgctacagtagtcttgactcttgaccaagttcctatgcatgaagtccatgcagccgtattggtttccacgcacagccactagtacttcggctcatgcaacgccctggattgttcttgccctctgctgttgttcgctgtgaacagtaactcggcccatggacaataacagctccacacgaacaatatcaagcccaacgagacagtggcccaagttaccagcctactgccggtcaacccaatcctttccaccagggaatagtcgtactcatcccctt
